United States Patent Application Publication US 2005/0228172 A9 - sequence listing, part 23

SEQ ID NO: 74312 - DNA, 1196 bp, Homo sapiens
aaattgtacctcacagttgatttcttcaaaaggcaaagatgttttcaggaaaaaacaaaagctaagggaactcatttccatcagaactgcactacaaagtacactgcaagcaacggaagctttttcagattcagggaaattgtccaagatgggagcctgggtctgtggaaataaataaagagcctcattttggaggcttggcccctgcattcacagggagatgcagcctcccagaagagccttccgggatccacacactgtccccaatcagagctggctggagatgctcgggatggggcatttcctctgagagcatccatagctgaagctggggtacccagcaccgtcaattactgtgaccaacataagcaagtttttcattgtaacaggttgaagttgatggtcataaacgctttgcacattgatccatttttaactcgttacataactctttagttgccagttcaagaaaataacaataagtgaagcttgaagtattcctgaatatatacatagtaatgaatttttcagttcatagtgctgaatcactggcggccctattcttaagcatggaagggctcagggaatatcaaaactatacatcctcttgaaatgtctatttgccaattgaattttgaaaaccaatagatgagttaaaatagagttctcaggaatggaaaatctgtgatagaaggactgatggtgaacactaattcatctatttgcagtcctggtaatacacagcagtgagaataacagttacagaacagaatgttttataaatcttgacaataataatcaaaataatgatactatactggctctaacaaaaattgaaggagataagaagtgagtgggtaaaattctgtgccttttaaaatctcttcttccagacaagggagtcgatcattactgagtaaaatggaagccttattgcaacaaagaactgaaacctcagtatttttcataatgttttgatttaaaatctcagarggatcttttatgaaatagaacaaagaaaatatttctctaaaatttagcagtttcctgagtttcacttctgttcctgtttaattccagtgaaattaagcttaatgtattttttaaacactgatgtatattctaattctgttataacattttctctcaccttcatgtttctgttcttccacctgtatgtaggcagaaaatacact

SEQ ID NO: 74313 - DNA, 600 bp, Homo sapiens
gcaggagaagataagcctcccgttccccagccaggtaggttttcctacaggacaacttgcctccaagcatgttaagcattgcactgaaatgtccctggaggagaaaggtggcagtttttgaaagggaagggttgcagcctggagcatctctcctgaacatggaaggataacagggctgtgaggcagctgcagagggcacagagtccaggccacacagaacaactggagctaggagctaaatggcagcacgctgtgtttggttctgggctctgaacctcaggcagctgtgtggttactcctcctgctcagagcttaggggtcatagattgaaagaattgtgattcctgggcagaggaatgaacctgcagactgcagcccggtggcagggtcagaattctcccagtaagttacctcttgaacttctcaccttgctaattgtgcattggaggaggaaggaaggaagaaaggaaggaaggaaggagggaaggaaggaaggaagggagggaaggaaggaagggarggagggagggagggagggagggagggagggagggagggaaagagtccagggatggaatcagacagacctgacttcaaatc

SEQ ID NO: 74314 - DNA, 1409 bp, Homo sapiens
ttaacagactcgacctgaatttgatttatatgtaccaaaaaaaaaatattttaggaaaatattaatttcaattttgaattttatcattcaaaatctgttttctctcagttacacttgtattatatcgaggataccaaaatagatactaacttcctttccaccaaattattcactgtcttttcatgttattaggtatcatctgttgaagggcccccatcttctcatgcttggggtgcagtctccttgtgtttggttttgacctcacygtagttgcttctgtgctctgcagccagcatgatctttaagaaactcaaatctgatcacgtcattccttgctttcaaatatttcagtggctccctgtttctgtctgtaaaaagcatgaaatattccttaccaaaaggcacctggcctttgatgtcctttcctctgctttgtctcttgccaccttgccatactcatattcattttctcttccccactccttccatccctaacacacacacacttgagccatactaaagtatttgctgtttcccagatgtaccacattgactctttctactgtaattttgagcatgctctctctcttccatttggaatgtccccaacccttccatttttgcctgatttttttcttccttcagggcatagcttagctgacaactcttcctagaaaatttccctcctcccaagtctgggtacctttctctgggcactaaaagaataccgaataaattctacatatagtgtctatcataatgcattgtaattgcttatttttactctgttttattaggagtacctggaagccaatgtccatgtcttattcccagtgacatctccagctcctactacatggcctggctcggtgcaatagtaatattgggatgttatcgttgagtattctgtaaacaaattagtgtgcccagaaaactcagaggtgaattagttcatggcccaaatcttacaacccatctgtttaggttctacagtttacgatgatattgtctattgctcctctgtaattaattttaattttatattattttgagtgaagtttcatttacccagttccttaccaaaccaggacaaagccaaatctcagtagagtgtgtgtatctactcatatgccactagacaagacaaatctgcctttacatctggctgcggtagcaattcccagatgcacttaattctgacacatggccattattgaaccaaaagcaattgcctggcatgattatagttcttatttgttttcgttttaaggggcctcatccaggctgccaaatgtacaacaggtgccttagttttatacttgccaatctgttgttattcaaatgaccgccctaacagagactaatggtatctaataaaattgatctcggttctggcaagccagactcac

SEQ ID NO: 74315 - DNA, 1409 bp, Homo sapiens
ttaacagactcgacctgaatttgatttatatgtaccaaaaaaaaaatattttaggaaaatattaatttcaattttgaattttatcattcaaaatctgttttctctcagttacacttgtattatatcgaggataccaaaatagatactaacttcctttccaccaaattattcactgtcttttcatgttattaggtatcatctgttgaagggcccccatcttctcatgcttggggtgcagtctccttgtgtttggttttgacctcaccgtagttgcttctgtgctctgcagccagcatgatctttaagaaactcaaatctgatcacgtcattccttgctttcaaatatttcagtggctccctgtttctgtctgtaaaaagcatgaaatattccttaccaaaaggcacctggcctttgatgtcctttcctctgctttgtctcttgccaccttgccatactcatattcattttctcttccccactccttccatccctaacacacacacacttgagccatactaaagtatttgctgtttcccagatgtaccacattgactctttctactgtaattttgagcatgctctctctcttccatttggaatgtccccaacccttccatttttgcctgatttttttcttccttcagggcatagcttagctgacaactcttcctagaaaatttccctcctcccaagtctgggtacctttctctgggyactaaaagaataccgaataaattctacatatagtgtctatcataatgcattgtaattgcttatttttactctgttttattaggagtacctggaagccaatgtccatgtcttattcccagtgacatctccagctcctactacatggcctggctcggtgcaatagtaatattgggatgttatcgttgagtattctgtaaacaaattagtgtgcccagaaaactcagaggtgaattagttcatggcccaaatcttacaacccatctgtttaggttctacagtttacgatgatattgtctattgctcctctgtaattaattttaattttatattattttgagtgaagtttcatttacccagttccttaccaaaccaggacaaagccaaatctcagtagagtgtgtgtatctactcatatgccactagacaagacaaatctgcctttacatctggctgcggtagcaattcccagatgcacttaattctgacacatggccattattgaaccaaaagcaattgcctggcatgattatagttcttatttgttttcgttttaaggggcctcatccaggctgccaaatgtacaacaggtgccttagttttatacttgccaatctgttgttattcaaatgaccgccctaacagagactaatggtatctaataaaattgatctcggttctggcaagccagactcac

SEQ ID NO: 74316 - DNA, 636 bp, Homo sapiens
gcatttaaataaattcgtaaaagtcatttttgtttctttcttcaattcaaaatttacatttgcactttttcacaaacctggtttatttgtatttcacaagtctactgctttgtaacctagaacaagtctccattaacttatttttattgaacagacaaggcagtggtttatcaaataagcaaataattactgtgttggttcattttcatattgctataaagaactgcccgagactgggtaatttataaaggaaagaggtttgactcacaggtcagcatggctggggaggcctcagcaaacttacaatcatgacggaaggcaaagggaaagcaaagcaccttcttcwcaaggcagcaggaaggaaaaatgctgagtaaagagggagaagccccttataaagccatcagatctcatgagaactcactcattatcacaagaacagcataagggaaaccacccccaagaatcaattacctccacctggtctctcccttgacacgtggggattgtgggaattataattaaagatgagatttaggtggggacacaaagcctaaccatatcaattacctcgggtctaaaagtactattttaggccaatattttgcagatatgctgttattctttcctagagtg

SEQ ID NO: 74317 - DNA, 683 bp, Homo sapiens
aaagagtgttgtgtgcttttgctgagtttaggatggtgtcaattgtgcctcaggagaagagtttagacattctgtcctgatgaatgtaatcaagtctttatttcatggtttctcttaacgcaaatacgtacaggttcatattcgtcgatgagggtgagaggaaaactatcgccaacagaaagaatccagataggaagagagaaaaagaaagaccagagatggtatactgtggtggttaaaggccagagactggggaaaaagtggttatgggtttaaagtctgcctccagcattttcttgctctataattttggagaagttaccaaaaatctcaaaacccaagtttttttgtaagatatctacatttcagacttcttgtgaagactaaaaaagataatgtaagcacaaggcttagcacagtgcagatacaataagggtgcaataatttgtaatttgcatatgtctttattcaagaaagtattggtccaaagaaaaagcatctgtttatctaatggtttattttatctgctaaaagtgcttttctttcatttctggctgagacctccttggtcctatttctcccaggattctccaattctaatttttgattctccatgattttctctgatggrccatccctcctatatttagatgagataatacatgagacacatttagagtaat

SEQ ID NO: 74318 - DNA, 1363 bp, Homo sapiens
ccatctgtatgatttggggcaagttacttaacctctcttgggcctcagtttccctatctgtaaaatacctactgcatagagttattgtgaagactaaatatgcaagtatatgtggagtacttaggacagtccctgaaacacaatagctcgtcagtgagtgataggtagcattattaactataatgaagtaccaagcatttggcagggctctggagtaataccgatgaataaaacatgaattttgctgtgcatatattcacattctagtcaatttgaagaaaatcaagctagtcacttaaatatagctttttgtttgtttctttcctattatctcattttctctaaatccccttcctagataatcccatccagtttcctagctgacaaagtcctaacattaactatagatcagacctcttttgggctccagagtccatgtgagtaactaactcacaggtagaacaaaaacaagatgttataacctcagcggactcatctggtttaacttttaagtgtcatagttgtgagctgtttttcaattgccacagscccccggggctaaaggtcacatagcctgaacatgcctagataaaccaagcatgcaaccacaggtggaacccaaatgctcagactgaggagtagggactgaattaagaaagaacctcacatggcagaattcaggatctaatcagatgaacccttgcatcaccccatggcaggatccaatcagatcatgtctcccagcatcacctcattgcaagatccaatcagatcatacctcattaattttttttttttttgaggcggagtttttgccctttttgcccaggctggagtgcaatggcacgatcatggctcagcgcaacctccgcctcccaggttcaagcgattctcctgcctcagcctcccgagtagctgggattacaggcatgtgccaacacgcccagctaattttgtatttttagtagagacagggtttctccatgttggtcaggctggtgtgcaactcttgacctcaggtgatctgcccgcctcggcctcccaaagtgctaggattacaggtgtgagccaccacgcccggctaaccatttcttctgtctccttgccagtctacttgcaataaagctttgcttttctcaaaaggtgccatggtattggcttgtatgtcaagaggcaagcccattgattgctcagtaacagtatataatattagtgtttatttgcccaccaacttggttattctcctttattacttatcttgatgaatggtacaactagcctttttagtttcctcagaacaatgaactcctaaattctttcctcttcctcatcccaacattcaatttttgtccttttaatttct

SEQ ID NO: 74319 - DNA, 1363 bp, Homo sapiens
ccatctgtatgatttggggcaagttacttaacctctcttgggcctcagtttccctatctgtaaaatacctactgcatagagttattgtgaagactaaatatgcaagtatatgtggagtacttaggacagtccctgaaacacaatagctcgtcagtgagtgataggtagcattattaactataatgaagtaccaagcatttggcagggctctggagtaataccgatgaataaaacatgaattttgctgtgcatatattcacattctagtcaatttgaagaaaatcaagctagtcacttaaatatagctttttgtttgtttctttcctattatctcattttctctaaatccccttcctagataatcccatccagtttcctagctgacaaagtcctaacattaactatagatcagacctcttttgggctccagagtccatgtgagtaactaactcacaggtagaacaaaaacaagatgttataacctcagcggactcatctggtttaacttttaagtgtcatagttgtgagctgtttttcaattgccacaggcccccggggctaaaggtcacatagcctgaacatgcctagataaaccaagcatgcaaccacaggtggaacccaaatgctcagactgaggagtagggactgaattaagaaagaacctcacatggcagaattcaggatctaatcagatgarcccttgcatcaccccatggcaggatccaatcagatcatgtctcccagcatcacctcattgcaagatccaatcagatcatacctcattaattttttttttttttgaggcggagtttttgccctttttgcccaggctggagtgcaatggcacgatcatggctcagcgcaacctccgcctcccaggttcaagcgattctcctgcctcagcctcccgagtagctgggattacaggcatgtgccaacacgcccagctaattttgtatttttagtagagacagggtttctccatgttggtcaggctggtgtgcaactcttgacctcaggtgatctgcccgcctcggcctcccaaagtgctaggattacaggtgtgagccaccacgcccggctaaccatttcttctgtctccttgccagtctacttgcaataaagctttgcttttctcaaaaggtgccatggtattggcttgtatgtcaagaggcaagcccattgattgctcagtaacagtatataatattagtgtttatttgcccaccaacttggttattctcctttattacttatcttgatgaatggtacaactagcctttttagtttcctcagaacaatgaactcctaaattctttcctcttcctcatcccaacattcaatttttgtccttttaatttct

SEQ ID NO: 74320 - DNA, 1363 bp, Homo sapiens
ccatctgtatgatttggggcaagttacttaacctctcttgggcctcagtttccctatctgtaaaatacctactgcatagagttattgtgaagactaaatatgcaagtatatgtggagtacttaggacagtccctgaaacacaatagctcgtcagtgagtgataggtagcattattaactataatgaagtaccaagcatttggcagggctctggagtaataccgatgaataaaacatgaattttgctgtgcatatattcacattctagtcaatttgaagaaaatcaagctagtcacttaaatatagctttttgtttgtttctttcctattatctcattttctctaaatccccttcctagataatcccatccagtttcctagctgacaaagtcctaacattaactatagatcagacctcttttgggctccagagtccatgtgagtaactaactcacaggtagaacaaaaacaagatgttataacctcagcggactcatctggtttaacttttaagtgtcatagttgtgagctgtttttcaattgccacaggcccccggggctaaaggtcacatagcctgaacatgcctagataaaccaagcatgcaaccacaggtggaacccaaatgctcagactgaggagtagggactgaattaagaaagaacctcacatggcagaattcaggatctaatcagatgaacccttgcatcaccccatggcaggatccaatcagatcatgtctcccagcatcacctcattgcaagatccaatcagatcatacctcattaattttttttttttttgaggcggagtttttgccctttttgcccaggctggagtgcaatggcacgatcatggctcagcgcaacctccgcctcccaggttcaagcgattctcctgcctcagcctcccsagtagctgggattacaggcatgtgccaacacgcccagctaattttgtatttttagtagagacagggtttctccatgttggtcaggctggtgtgcaactcttgacctcaggtgatctgcccgcctcggcctcccaaagtgctaggattacaggtgtgagccaccacgcccggctaaccatttcttctgtctccttgccagtctacttgcaataaagctttgcttttctcaaaaggtgccatggtattggcttgtatgtcaagaggcaagcccattgattgctcagtaacagtatataatattagtgtttatttgcccaccaacttggttattctcctttattacttatcttgatgaatggtacaactagcctttttagtttcctcagaacaatgaactcctaaattctttcctcttcctcatcccaacattcaatttttgtccttttaatttct

SEQ ID NO: 74321 - DNA, 461 bp, Homo sapiens
agagaacacgaattacttcctctggcacaagtgattagtaaaaacataccccaatgtctccttgtgcctgggctgatgaagggacattatatccagaggagagggctgttagaagagtatggcctttagtcagatgaatttagattcaaatcctagctcttttgtttaccagctgtgtgacctagagtaagtttattaacctctcaggaacaaaattctttgatctgtcatatggcaatgttagcaaacaaactagactgttagggaattcatagttcactatatgctgaatcctcagaaaagtgcctcccacagagagggcatttggcaaatgctctagcatcctaagccctagcrtcaccctcactcatctaaaatctctgtacaattgctggttgcctctcacaggccccatttgtatcctgcagggacacagccagatggaggcaggagatggggct

SEQ ID NO: 74322 - DNA, 830 bp, Homo sapiens
catcgatgtcaactatgagaagctcaaaactgacattaaggtaacagggtcaggccttcctcaagcatcttaacctctcatcctgagagcagcggtcccaaacttccatgtgtgttaggatctcctggaaagcttgttaaaacacaggtggctggcgcccaataattcacttttctaacaagttcccggacattgctgctggtggtcctttgagaacctttgggcgtttcacgtgtagataatgcaccttgtttgcaaggcagccttccaagccagcacctcagcttggcgtacaaatttatttttgagggtcttaccaaaagttcttttttgtttgtttgtttgtttgtttcctctccttaatctagagaggagctctgtttttctaaacccttgtagcgtgaacttttagaagacttattaccggtgtccatttcagaagtggaaatgcttgatggcacctgtaataaaaacacaatgcttgsgttcatttttctctggtgctgaagtggactgtgttggcacacacagtctctgaacaccccgcttagaccaactagaggagggatttttgcctcagcttctagatggcccggtccttgagcctatctccacactcatgtgccccattgtcctcagcccattccctgcagtgttgcaggggtttgggtgggcgagagtatgttgagtctggtaccaggtgtttacatcgctaaagaaagagccttggcttctttcctaggacaaagtatagacctatgggtcccaagcagggtaagacaccacatgtcatttgttttgcccctagagcaccttcctgatgggaaaac

SEQ ID NO: 74323 - DNA, 1360 bp, Homo sapiens
ccccaccccctagcaaaaaaagcaatagcaaggagcatagaaataatgaaccaataaaataaaggacataaattttgctgaaagagaaaaattaaataggataatgtgataaatgtcagcagctgttagaagtacaagcccagtgtgcaggtctatgcaagagcaaagaaaaggaggctctgaagcatataggaggagtttctgtcctgcagtttctcaggcctgtggtcaagggaggatgttcccagaacaggaaacctcagaacaggtagcttttggccccatgagaggtttgtggctgatacatgcagtgtggtctctggacctctaagcctctgcttcatcaggaagatttgctgaaatgcgtttgacccccaggagcccttaccttagctctcataaaagtgttgcaaatcagtttggatttggataatgcctaaaacaggagagttgttttgttttgtttgtttgtttttwaaaaaattcctagttatttaacactgagctattcctttgtatgtaaaccttcaattaaaagaaaatagttgggatccagaaatctaaatttctgaattctgaaatctgaatttttaacaagcacccaaggtgatttcattgcaggcaggtgttgcaaatacggtcattttctaagaatgtggtctatttgggcctcatgaagatccacctgctccaggagtctacaaccttgctttgccaggaatgcctttcttctcagacagctagtacttatcttctaaatgagcttaattactaaatccctaagggtgttgaacatcaaggactttatctcttggtgtagataaattagctcactgaagtgttgtacaccagtttggacctgggaggggtctagagagaggaaattattattatttgatacataacatttgtacatatttagggcatacagatgatgtttcattacatgtgtagaatgagtaatgattaagtcacgatattcagagtatccatcacttgaagtatttatcatttctatatgttggaaacatctcaaattctctcatctagctgttttgaaaaacacagtatattgttggtagctatgattatttttaacttctttgttatttaacattgctgctatgcccctttgtgtaaaccttcatatgggcatttaataccatcttctttaacccctggttcactggggtcttccagatacatgcggtttaattcttcacttttctaagggagaaaagtctgcaaatcttttttcctagtgttttcctttggaagcttcgtcccactgttatcacagagtatttgaattctcatcagtttccttgtaacttctgtggaatgtgctggtagaactgca

SEQ ID NO: 74324 - DNA, 1148 bp, Homo sapiens
aaacctagatgacaagttgataggtgcagcaaaccaccatggcacatgtatacctatgtaacaaacctgcatgttctgcacatgtatcccagaacttaaagtaaaatttaaaaagcagaataaaattttaaagrtagtgtcaatataaattcataccaagattagctgaagggaaagtaactcccataagacatctcattttgtttccactgagcctgttctgactccttgaaatggcaaaaacaggggtaataacaatatcttttatcatgtattaccttatgcttttcaaaaaaagtttcaaaaacacaataaatatttgaataaatgcacttagataatcccaaatcagagtcaagaaaatatataaaagttaaattcaaatgatagaatttgtccatttttccattcaaattacaatttaagtcaagtaaagaaagacatacaaaagctgcatgattaggagggagtgcagcgctcatcctcctgtccccaaggccgattagccagctgggtgagagatgagatcatgagttctgggccaatgagtcactgcccttcaccattgcccccagacacaaacagctgcaggtctcccaaagcgtgtgtccaccctacggagctgccaccctacagaggagaaaatgtgggtgaaagtaagcaaaagcaacatcacaaccatgaaattaactcagtgttctacaaatggagaattatatatctctttctgaatgaagagcagcatatttcatacacagtgtggaaataaacattgagtaaattgttttcaaaattgtcatacctaggagtaaacccagcaataggtaaattataaattaaaggagcccttctttcttcctccatctatccatccatctagactgtaaggtatttattaggcatctactggtgctaaatacttcttaatgattttagtacaccccgatgtgcccagtccttctgatgaaacaatatccggaaacttcatgagaatgaattctcttttttccacgggactataggcttctcaatggtgtagacaacactatctatttgaatttacatatcaatttacacatatatatacaaacataagtatatatattttttatattcaagagctatcatagtatctgactatatagtgt

SEQ ID NO: 74325 - DNA, 776 bp, Homo sapiens
tcccccaatgcctttctggtctctcctccagtgtctcctccttggagaggatgctatctgcagtagcttccactgcctctgcagactggcccttttcccctcttacccttktcctgttctaagttttttacagcatttatcacaataagattatacatttaatatacatatagtttattgttaattatttggtttcatcactagaatgtgagctccatgaaagcagaactttgtccatttttctcacttttttatctttagcatcttgaacagtgtctgcaacatagtgaggcttaattattatgtatgaaatgaataaatgagattgtaaatgaacgaatgactgaatagaataaatgttctaacttcctaatatctaataacaacagaagcacctaacatttactgaacacgtacagttccagaaaacacaccaattactttacccagatgatcccatttattcttacaaaaactcttagacctgttattactaattccaattttcagatgaggaaactaagactcagagaggtacactaatgttcccaaggtcacacagcaagtaagtgacagaattagatttttcagccagatctaattcccctaaagtcaacagaaagtctcctgtgctgggcaccacaagagatagcgccattgtttccatggcaacaggtcatgtcagtaactctgatgcaggatcaagtgtaggaaaacactgagcttggagaggaggccctcatgccgcaatcacaaatatttaaccaaggtagaaa

SEQ ID NO: 74326 - DNA, 776 bp, Homo sapiens
tcccccaatgcctttctggtctctcctccagtgtctcctccttggagaggatgctatctgcagtagcttccactgcctctgcagactggcccttttcccctcttacccttttcctgttctaagttttttacagcatttatcacaataagattatacatttaatatacatatagtttattgttaattatttgktttcatcactagaatgtgagctccatgaaagcagaactttgtccatttttctcacttttttatctttagcatcttgaacagtgtctgcaacatagtgaggcttaattattatgtatgaaatgaataaatgagattgtaaatgaacgaatgactgaatagaataaatgttctaacttcctaatatctaataacaacagaagcacctaacatttactgaacacgtacagttccagaaaacacaccaattactttacccagatgatcccatttattcttacaaaaactcttagacctgttattactaattccaattttcagatgaggaaactaagactcagagaggtacactaatgttcccaaggtcacacagcaagtaagtgacagaattagatttttcagccagatctaattcccctaaagtcaacagaaagtctcctgtgctgggcaccacaagagatagcgccattgtttccatggcaacaggtcatgtcagtaactctgatgcaggatcaagtgtaggaaaacactgagcttggagaggaggccctcatgccgcaatcacaaatatttaaccaaggtagaaa

SEQ ID NO: 74327 - DNA, 776 bp, Homo sapiens
tcccccaatgcctttctggtctctcctccagtgtctcctccttggagaggatgctatctgcagtagcttccactgcctctgcagactggcccttttcccctcttacccttttcctgttctaagttttttacagcatttatcacaataagattatacatttaatatacatatagtttattgttaattatttggtttcmtcactagaatgtgagctccatgaaagcagaactttgtccatttttctcacttttttatctttagcatcttgaacagtgtctgcaacatagtgaggcttaattattatgtatgaaatgaataaatgagattgtaaatgaacgaatgactgaatagaataaatgttctaacttcctaatatctaataacaacagaagcacctaacatttactgaacacgtacagttccagaaaacacaccaattactttacccagatgatcccatttattcttacaaaaactcttagacctgttattactaattccaattttcagatgaggaaactaagactcagagaggtacactaatgttcccaaggtcacacagcaagtaagtgacagaattagatttttcagccagatctaattcccctaaagtcaacagaaagtctcctgtgctgggcaccacaagagatagcgccattgtttccatggcaacaggtcatgtcagtaactctgatgcaggatcaagtgtaggaaaacactgagcttggagaggaggccctcatgccgcaatcacaaatatttaaccaaggtagaaa

SEQ ID NO: 74328 - DNA, 776 bp, Homo sapiens
tcccccaatgcctttctggtctctcctccagtgtctcctccttggagaggatgctatctgcagtagcttccactgcctctgcagactggcccttttcccctcttacccttttcctgttctaagttttttacagcatttatcacaataagattatacatttaatatacatatagtttattgttaattatttggtttcatcactagaatgtgagctccatgaaagcagaactttgtccatttttctcacttttttatctttagcatcttgaacagtgtctgcaacatagtgaggcttaattattatgtatgaaatgaataaatgagattgtaaatgaacgaatgactgaatagaataaatgttctaacttcctaatatctaayaacaacagaagcacctaacatttactgaacacgtacagttccagaaaacacaccaattactttacccagatgatcccatttattcttacaaaaactcttagacctgttattactaattccaattttcagatgaggaaactaagactcagagaggtacactaatgttcccaaggtcacacagcaagtaagtgacagaattagatttttcagccagatctaattcccctaaagtcaacagaaagtctcctgtgctgggcaccacaagagatagcgccattgtttccatggcaacaggtcatgtcagtaactctgatgcaggatcaagtgtaggaaaacactgagcttggagaggaggccctcatgccgcaatcacaaatatttaaccaaggtagaaa

SEQ ID NO: 74329 - DNA, 828 bp, Homo sapiens
tctaagattcttactcttttttctggtgctcagggcctcatgttacaaartggctgcaggagctccaggcatcatgtctacaggatacaggaagaaaatggggaggcaaaggctgatgatatattctgactgaatctgaccctttcaataaagaataaaaaagctttctggaaggcactgcccacaggttttggtttatactgagttgtccaggactctgacacatggctacctctaaccagaaggtggcataaaagaaagaattgtggaggaggagggtcagtctagccaagacaaacagtctagaaagcagtccatttggaaaatgtcactgaagaaacatatttataaagaagtcatacaagatttatcctgcagtgaccaactaaatttaggtgctacaaatacacaagaagttcttgaaattggcattttgggaaactacagacgggttatattgccttcagtactttctattgtatcatcaaaattaatcatttcaccagttctatggaataaatgtaattattagccccatttcacaaagaaactgaggtggagagtggtaaaataactagtccaaggttatatataggtaggaggggcaaagtcctccttttccttgactctgcacttgagcatgggtatgtgcattattactcactgaagcatgaaaatgtgtgcacacataccaagcactgatgtcaagaaagctgcgactaaagggtagaagtttagctaatggaagtgtttccagagcaagtaagctttgaaccaaaaattccagggcagcttaaaggctgattcattcattcccttattcaagaa

SEQ ID NO: 74330 - DNA, 828 bp, Homo sapiens
tctaagattcttactcttttttctggtgctcagggcctcatgttacaaaatggctgcaggagctccaggcatcatgtctacaggatacaggaagaaaatggggaggcaaaggctgatgatatattctgactgaatctgaccctttcaataaagaataaaaaagctttctggaaggcactgcccacaggttttggtttatactragttgtccaggactctgacacatggctacctctaaccagaaggtggcataaaagaaagaattgtggaggaggagggtcagtctagccaagacaaacagtctagaaagcagtccatttggaaaatgtcactgaagaaacatatttataaagaagtcatacaagatttatcctgcagtgaccaactaaatttaggtgctacaaatacacaagaagttcttgaaattggcattttgggaaactacagacgggttatattgccttcagtactttctattgtatcatcaaaattaatcatttcaccagttctatggaataaatgtaattattagccccatttcacaaagaaactgaggtggagagtggtaaaataactagtccaaggttatatataggtaggaggggcaaagtcctccttttccttgactctgcacttgagcatgggtatgtgcattattactcactgaagcatgaaaatgtgtgcacacataccaagcactgatgtcaagaaagctgcgactaaagggtagaagtttagctaatggaagtgtttccagagcaagtaagctttgaaccaaaaattccagggcagcttaaaggctgattcattcattcccttattcaagaa

SEQ ID NO: 74331 - DNA, 688 bp, Homo sapiens
caagctctgacagaccccaggaggttcaaatttcacccattaatattagtattgtcattggaaaatcacttaacttccctcatttccttcatatacaacatgagaaaagtagctgcacctacatcctaacttggcttaggaaccaagtgtgactgtacacaaggcagttttcactgtgcatgttgtatgggccatgttcaaccaaaacaggtattccagggtccacaaatctcagggaatcacctttgttcatgtctccagttgggagcaataataacagaattttcaatrgttattattgtaacaacttctagcaggagcaaaaacaatgcatttcttaaaaataatgccaatctttttaaatttttttttaaatggagtcttgatctgtcacccaggtcggagtgcaatggcatgatctcgggtcactgcaacctccacctcctaggttcaagggattctcctgcctcagcctcccaagtagctaggactacaggcacgcaccaccacacctggctaatttttgtatttttagtagagacggggtttcaccatgttggccaggctggtcttgaactcctgacctcaagtaatccacctgcctcgggctcccaaagtagtactgggattacaggtgtgacccaccatgcctggccaaaataatgctatttttttttttttttttttt

SEQ ID NO: 74332 - DNA, 625 bp, Homo sapiens
atgtatgtgtgtacatgtgtatgtgtatgtacataggagaatcagaagtctgtttcctcctcttctgatttccctgccttctccccaacacctaccataccccacccacttgccttctcactcctctctgttttgaggtccctgtaaggcaagtcctctcggagaaatgcgaagaggtgaagaggagaggaaggcaagatgataccttgagttggaaatagcatgtggagtgaaggatgaaagaaaaaggggttgatgttggctgactatgtagatataactatgttttgcattttgaaaacactgcggtattttctttacctcctgcttcctctctgctaaagatggacccaayaaatagatcagtatggtaggaaatgaggtagccacactggaaaaaactgaataggcagaataatagaattctgaatacggaaagtgggactgatccctgtccataccacattttcagcagccttagaggctttaacttggagttgtacccatgtcagtgggcagtggggtgggatggaatgtgatagctactgtggttagtttgtttttcctgcccttagtagtccactcttttacccttcttcagtcacaggagtggacatctgacctg

SEQ ID NO: 74333 - DNA, 625 bp, Homo sapiens
atgtatgtgtgtacatgtgtatgtgtatgtacataggagaatcagaagtctgtttcctcctcttctgatttccctgccttctccccaacacctaccataccccacccacttgccttctcactcctctctgttttgaggtccctgtaaggcaagtcctctcggagaaatgcgaagaggtgaagaggagaggaaggcaagatgataccttgagttggaaatagcatgtggagtgaaggatgaaagaaaaaggggttgatgttggctgactatgtagatataactatgttttgcattttgaaaacactgcggtattttctttacctcctgcttcctctctgctaaagatggacccaacaaatagatcagtatggtaggaaatgaggtagccacactggaaaaaactgaataggcagaataatagaattctgaatacggaaagtgggactgatccctgtccataccacattttcagcagycttagaggctttaacttggagttgtacccatgtcagtgggcagtggggtgggatggaatgtgatagctactgtggttagtttgtttttcctgcccttagtagtccactcttttacccttcttcagtcacaggagtggacatctgacctg

SEQ ID NO: 74334 - DNA, 684 bp, Homo sapiens
atcctcctactaagcttacaaactaacacaggctctccactttctttgaaaatgcacgcctcacccctgttgtcagctccccagttacctcaggcttcctgctctctctgctttcccgtgatgagagatgcttatatttaccaactgactcaggccttatgagccccgcagtggaggcccaccgacagctgcagaccttctgagctagttctactctccctttgattcccagccctgccccctccaccaacaaacaagaaaatagaaaactccccaaaaccaaccatccaatcgcaggtatacaatctatcagtaccacccttgaaaacatctgtaaaccatatgggttaacatacagaacaaagaaggatgctaatcacaaagcttcagaaatgctcagcaccctccaggtcacctaagctggggctctatgggttacaagaaactgaaacattttcaactcaggctccagggcattggcacacactgtccccactttgcagaawagtctcctcccatatgtccacctggcttaccccactacttcctgtctttgctcaaagatcccctctccaaccatactatttaaaacattgaccatgcgccactcacatcccagcaccccatccccctcccggtaattattttcctcattgcacttatccttttcttacatgccatata

SEQ ID NO: 74335 - DNA, 684 bp, Homo sapiens
atcctcctactaagcttacaaactaacacaggctctccactttctttgaaaatgcacgcctcacccctgttgtcagctccccagttacctcaggcttcctgctctctctgctttcccgtgatgagagatgcttatatttaccaactgactcaggccttatgagccccgcagtggaggcccaccgacagctgcagaccttctgagctagttctactctccctttgattcccagccctgccccctccaccaacaaacaagaaaatagaaaactccccaaaaccaaccatccaatcgcaggtatacaatctatcagtaccacccttgaaaacatctgtaaaccatatgggttaacatacagaacaaagaaggatgctaatcacaaagcttcagaaatgctcagcaccctccaggtcacctaagctggggctctatgggttacaagaaactgaaacattttcaactcaggctccagggcattggcacacactgtccccactttgcagaaaagtctcctcccatatgtccacctggcttaccccactacttcctgtctttgctcaaagatcccctctccaaccatactatttaaaacaytgaccatgcgccactcacatcccagcaccccatccccctcccggtaattattttcctcattgcacttatccttttcttacatgccatata

SEQ ID NO: 74336 - DNA, 717 bp, Homo sapiens
attacgtttttgttcctgatcgattgtgttttgaagataataaggaagtatgagatagaggctggtataataaagtcaactcataatttgtaaaaatgtgttgtccattataatagtagccatgtctggctatttcatcttaaatgtacatgtaaattacattttcagtttctcaattacattagccatatttctattgttcaacagcccatgtgcctagtgactatcatattggatagtgcaacatgggacatttccataagtacagagttttctcaagcattcgaaaatatttcagaacattctagaatgttctagagcaagtgactactatattatgactctaacagaggcttttaaggagtttatccaggcttctggcttaaggttttctttggtgaaaatcagcctgatgtgctttagtgattctgaagctgtgttaggaagagatccattctgatttyaactggtttgcatgcttttatgtaagatttagctgaaacaatggacttcatgggtgagaaaaatttgaaaatcactagaggaatgtaaagaggctaagggggcataaacatctgaatttaaatccttttccttccacttatgagctatgagatcttggagaagttaactgatgagcagatccacagatttaccatctctagagactgagatggaatgtccacctcacagtgttgttacaaaggtgacaggatc

SEQ ID NO: 74337 - DNA, 717 bp, Homo sapiens
attacgtttttgttcctgatcgattgtgttttgaagataataaggaagtatgagatagaggctggtataataaagtcaactcataatttgtaaaaatgtgttgtccattataatagtagccatgtctggctatttcatcttaaatgtacatgtaaattacattttcagtttctcaattacattagccatatttctattgttcaacagcccatgtgcctagtgactatcatattggatagtgcaacatgggacatttccataagtacagagttttctcaagcattcgaaaatatttcagaacattctagaatgttctagagcaagtgactactatattatgactctaacagaggcttttaaggagtttatccaggcttctggcttaaggttttctttggtgaaaatcagcctgatgtgctttagtgattctgaagctgtgttaggaagagatccattctgattttarctggtttgcatgcttttatgtaagatttagctgaaacaatggacttcatgggtgagaaaaatttgaaaatcactagaggaatgtaaagaggctaagggggcataaacatctgaatttaaatccttttccttccacttatgagctatgagatcttggagaagttaactgatgagcagatccacagatttaccatctctagagactgagatggaatgtccacctcacagtgttgttacaaaggtgacaggatc

SEQ ID NO: 74338 - DNA, 812 bp, Homo sapiens
caatggccgacacaaagaaggaaataaatattagttcacattattattatgttgaatacataaatattatcatgagaggacatgaataagaagacacttgatggaatcacaatttgagaggkgtttattttaatcactttagaaatgactttggggctatgtgtataaaacaattgatattctgaatttttagatagtttaactgcactttagggggtattgtattctccagtgtacttgagaattgactaatttgcagatgtcacagtgagacaaatgtctcctttccagtatcaagggtcgaccatttaaaaccaactacattcaaattagttcaaccattgtggaagacagtgtggtgattcctcaaacatttagaactagaaataacatttgacccagcaatctcattattgggtgtatgcccaaaggaatataaatcattctgttataaagatacatacacatgtatgtttactgcagcactattcacaataacaaagacatggaatcaacccaaatgccaatcaataatagagtgaattaaaatattgtggtacataaacaccatggaatactacgcagccataaaaaggagatcatgtccttggcaggacatggatgaaactggaagccattatcctcagcaaactaatgcagaaacagaaaaccaaacactacacgttctcacttataagggggagctgaacaatgagaacacgtggacacagggaggggaacatcactcactgatgcttgttgggggaggactggggggagtgagagagagcattagggaaaaaagctaatgc

SEQ ID NO: 74339 - DNA, 664 bp, Homo sapiens
aaactgcagcagagagctcaggttcaggtgatggtctgtcacttacctctcctgtcgccgtggacaggccatctcacctgcctgtcttccatttytttagctggccacttggataccaatagagttgtgcttactgtgcttaaatattgcttttccaggggaggtttgatgactttgtctactcccatactcctcagatgccggaaacgacaggctctgtgtacccctgtggaccagccagattcttgagcagattttcctgatctgtttaccaggaaaatggtatacccagcagtttcggcaattccagagtccttggtggcctggcagtaatggtgtctctccagtcacccagatgtccctatacagctctctacatcagggtttggccatgggccaaatccagccaccacctgtttttgtaaataaaagtgtattggcacaaacctgcatatttgtttatgtaatgtctagggctccttttgtgctacagcggcactgttgagtagttgtaagagagtctgaatggcctgcaaagcctaaaatgcttactatctggtcctttacagaaaaagtttgccaactcctgctctagattgatggttacaaagtctgacagaggatacagttacagggacatggcaaagccagaaaaacgaggacc

SEQ ID NO: 74340 - DNA, 664 bp, Homo sapiens
aaactgcagcagagagctcaggttcaggtgatggtctgtcacttacctctcctgtcgccgtggacaggccatctcacctgcctgtcttccatttttttagctggccacttggataccaatagagttgtgcttactgtgcttaaatattgcttttccaggggaggtttgatgactttgtctactcccatactcctcagatgccggaaacgacaggctctgtgtacccctgtggaccagccagattcttgagcagattttcctgatctgtttaccaggaaaatggtatacccagcagtttcggcaattccagagtccttggtggcctggcagkaatggtgtctctccagtcacccagatgtccctatacagctctctacatcagggtttggccatgggccaaatccagccaccacctgtttttgtaaataaaagtgtattggcacaaacctgcatatttgtttatgtaatgtctagggctccttttgtgctacagcggcactgttgagtagttgtaagagagtctgaatggcctgcaaagcctaaaatgcttactatctggtcctttacagaaaaagtttgccaactcctgctctagattgatggttacaaagtctgacagaggatacagttacagggacatggcaaagccagaaaaacgaggacc

SEQ ID NO: 74341 - DNA, 1197 bp, Homo sapiens
tcaaatttaccattttaaaagtgagattgataatgttagctcctcaacgaacaccaactaattcctctcttttctatttctgataaagctaccacaatgctggttgtcaagcccaccttctagttatcactcgcttacttactacatctttcctttttcctttataaagtcttttcctttctatggttagtgacagcaatctagtttgggccatcaggacttcacttggttaacagtctcctacttggtctacgtgcctccagtctgacctttcttccattcattttataacacataccccaaatcctacagttctactcccctgatcttcacagctccttaaatcctattgaattatgcactaatttctttcttaagtaattaagtctctctcatgacctaacttcaaactactttttttcaactttatcccccacatatcctctacagttactctaaatttcagtcaaaacatactagtcataattaccatggcaaactttgagattcagtacacatactcctttgttcatgccatttccactacttaaaatggtgtttttcccctatttctgtctactaaaatcttccacatcttttaagccttcatggaaaaagtggcacttgagtatagctttggaaaattgtcaacctcattgatcctcagttttctcatctatacattgtgtctatattcaacatatataatatgcaaaactgatgcaaagatttaggattaatatgagtaggcacactaacaggtgctttttttttttttttttttttttttttttwaatctgtaacccaggacagtgctgactacctggtgcttagaaggcatttatttttatattcaaaatatactacaaccaactcatgactgttaaattacattagcaatttaaagaattaaaactgtgaaaattaatgataaaatgacactaattattaatgctaaagatatctactctaatgccagtgatgagttgttttcttcatttaaaactaatgtcaacttatagcattccaaatgattagacaaagtatttgggtgggggtcttgggaagaaatgtgtttaccaaaagacctagactaaacagcattatttggccatgaaaaggcaattaattctccttctttgcctcagtttcatcatcacagaaaaatagtttaagtaaggcaaaaaataatgttt

SEQ ID NO: 74342 - DNA, 1459 bp, Homo sapiens
tcgatataagtaaaactcaagtctactaccaccattggttttaatttagtgttaaaaggcatatttaaataataactagcaagatcagggctgtttgggggcaaacccactaaaacaagtaaaaaaaaactttttcagatgttgcaagtcagaaaagtatgatggactattcacgtcaaattaaaagcaaagtattcacaggttttaaaatctcacatacttctttaaggcttaaagaaaaacattttctatcctgggcaacatagcaagattctgtctccaaaaaatgttaaaaaatgtagccaggtgtggtgctgcaaatgtggtcccaactactagggaggctgaggcaggaagagcacttgamcacaagagttcagggctgcagtgtgttacgaactctcacactctactccagcctgggctagagtttgtgttgtttctcctgagttataaatggctaccaaaattattatcaatgtctcccaaactctctgacaaaattgtgctcactcttgcactgtctttaatctcatcagctctttgatcagttcccttaatatgtttgtagataactttctgaaagcactaaccttaccactctaaatttatatggctacttgctttgctttcatcctgggagttcccccaccaccatcctatgaattcccttcactattttccatgtttcctgaataccatgtcttctaccttctttttttttccattctcacttaatgaaacatatcttcccgtaggctttgaaaggggttgtatataaggacacatcatattctacaaatataattatgtgagtacacctaataaactctctatatactttttatactatataaatatgtattttactctttctcatacttacaaatgtgttttcatatatatttatagttgctaatcacttatccctaaaatgttgaaaagacttaatttatattctatattaatttttagaagtccaaagctactcagattctgcattttctactcttagaagaaaacagagaaaagcttcatgacaatagagatggcaataatttatttgacacaaagggcacaggcaaacaagaaaaaaatagatgtcttagttcattcggtgctgctgtaacataatacctgatactgggtaacttataagaaacagaaatttattgattcatgattctaaagactgggaagtcccaaaaccaaggggctggcatcttttgaggaccatattgctgtgtcatcctgagaggtgaagccaggtggacctcctgggtccagtggggacttggagaattttctgtctagtaagaggattgtaaaatgcacgaatcagtgctctgtaaaaactcagcaatcagcgctctgtagctagcaagaggattgtaaaatgcacagatcagcactctgtaaaatgctcgaatcagcgctctgtaaaatgcaccaatcagca

SEQ ID NO: 74343 - DNA, 1459 bp, Homo sapiens
tcgatataagtaaaactcaagtctactaccaccattggttttaatttagtgttaaaaggcatatttaaataataactagcaagatcagggctgtttgggggcaaacccactaaaacaagtaaaaaaaaactttttcagatgttgcaagtcagaaaagtatgatggactattcacgtcaaattaaaagcaaagtattcacaggttttaaaatctcacatacttctttaaggcttaaagaaaaacattttctatcctgggcaacatagcaagattctgtctccaaaaaatgttaaaaaatgtagccaggtgtggtgctgcaaatgtggtcccaactactagggaggctgaggcaggaagagcacttgaacacaagagttcagggctgcagtgtgttacgawctctcacactctactccagcctgggctagagtttgtgttgtttctcctgagttataaatggctaccaaaattattatcaatgtctcccaaactctctgacaaaattgtgctcactcttgcactgtctttaatctcatcagctctttgatcagttcccttaatatgtttgtagataactttctgaaagcactaaccttaccactctaaatttatatggctacttgctttgctttcatcctgggagttcccccaccaccatcctatgaattcccttcactattttccatgtttcctgaataccatgtcttctaccttctttttttttccattctcacttaatgaaacatatcttcccgtaggctttgaaaggggttgtatataaggacacatcatattctacaaatataattatgtgagtacacctaataaactctctatatactttttatactatataaatatgtattttactctttctcatacttacaaatgtgttttcatatatatttatagttgctaatcacttatccctaaaatgttgaaaagacttaatttatattctatattaatttttagaagtccaaagctactcagattctgcattttctactcttagaagaaaacagagaaaagcttcatgacaatagagatggcaataatttatttgacacaaagggcacaggcaaacaagaaaaaaatagatgtcttagttcattcggtgctgctgtaacataatacctgatactgggtaacttataagaaacagaaatttattgattcatgattctaaagactgggaagtcccaaaaccaaggggctggcatcttttgaggaccatattgctgtgtcatcctgagaggtgaagccaggtggacctcctgggtccagtggggacttggagaattttctgtctagtaagaggattgtaaaatgcacgaatcagtgctctgtaaaaactcagcaatcagcgctctgtagctagcaagaggattgtaaaatgcacagatcagcactctgtaaaatgctcgaatcagcgctctgtaaaatgcaccaatcagca

SEQ ID NO: 74344 - DNA, 1459 bp, Homo sapiens
tcgatataagtaaaactcaagtctactaccaccattggttttaatttagtgttaaaaggcatatttaaataataactagcaagatcagggctgtttgggggcaaacccactaaaacaagtaaaaaaaaactttttcagatgttgcaagtcagaaaagtatgatggactattcacgtcaaattaaaagcaaagtattcacaggttttaaaatctcacatacttctttaaggcttaaagaaaaacattttctatcctgggcaacatagcaagattctgtctccaaaaaatgttaaaaaatgtagccaggtgtggtgctgcaaatgtggtcccaactactagggaggctgaggcaggaagagcacttgaacacaagagttcagggctgcagtgtgttacgaactctcacactctactccagcctgggctagagtttgtgttgtttctcctgagttataaatggctaccaaaattattatcaatgtctcccaaactctctgacaaaattgtgctcactcttgcactgtctttaatctcatcagctctttgatcagttcccttaatatgtttgtagataactttctgaaagcactaaccttaccactctaaatttatatggctacttgctttgctttcatcctgggagttcccccaccaccatcctatgaattcccttcactattttccatgtttcctgaataccatgtcttctaccttctttttttttccattctcacttaatgaaacatatcttcccgtaggctttgaaaggggttgtatataaggacacatcatattctacaaatataattatgtgagtacacctaataaactctctatatactttttatactatataaatatgtattttactctttctcatacttacaaatgtgttttcatatatatttatagttgctaatcacttatccctaaaatgttgaaaagacttaatttatattctatattaatttttagaagtccaaagctactcagattctgcattttctactcttagaagaaaacagagaaaagcttcatgacaatagagatggcaataatttatttgacacaaagggcacaggcaaacaagaaaaaaatagatgtcttagttcattcggtgctgctgtaacataatacctgatactgggtaacttataagaaacagaaatttattgattcatgattctaaagactgggaagtcccaaaaccaaggggctggcatcttttgaggaccatattgctgtgtcatcctgagaggtgaagccaggtggacctcctgggtccagtggggacttggagaattttctgtctagtaagaggattgtaaaatgcacgartcagtgctctgtaaaaactcagcaatcagcgctctgtagctagcaagaggattgtaaaatgcacagatcagcactctgtaaaatgctcgaatcagcgctctgtaaaatgcaccaatcagca

SEQ ID NO: 74345 - DNA, 1120 bp, Homo sapiens
gccaaatttgtggcaccaagaattgaaagtcagaaataattatgaatgacaaaaaagagaatactcaagtttttatattttatttgctatggaagatgaagaaaaggtaatgatttggactatttaaagttttcaagtctgaatgactgactcatatgtagtacatttgaaatatcagaataggtatgagtttggaagtacatgatgaattttattgtggatgtgctgcacttgagggtactagaaaaatgttcagctggaaatgtcttatacgtgattgaaaatgaagtaaaagtttgatgaaaagtcaagtttaaagatagaactttagggactcatttttgtggatgtaatagtcaatattgtaagattatacggaagtcctagaaagcaaagagtggagtcaaaaacataaacctcgggaaggcacacacctaaagagtgaaagcaacaaaggaaagagtgaaagcaagaaaggaaagagtgaaggcaatattttccaccaagatctgttcttcactctgtctcttactctgtgtagagacttaaggaacattatttcgaatttcatacaatacactgaatgtgtgaatctgtggagctttgtcatacatgtttaagacacttcagttgaaataaaatgaagaggcaaacagaaagttaaaaacagaaataaatgcagatctgtaggaaaaataattccaagagtgaaaccctacattgcaaattctggcagagaggatgttaagaaaatcaacatgaaaatatcattgaatttggtgatgagaatgtgattagtgacctttcagacaaccgtgtgagtatattcaaatgcagcaaagtagcagaaaaatagcatttctagaatttatatctgtaccagcaaaatttatctcttctatatatgctcattcatgttttatatggcatatcagtatcattaaccttttgtcctcatttaattagagaaactgaggcatggagtcaagatacagtttacaaatattagaytaaaggacagaatttaaaatttggcatactattccttggatatcaaactaaatgtccttcatttattgccactgtgacaagcacttcttctttatgatgtgaacagctc

SEQ ID NO: 74346 - DNA, 1880 bp, Homo sapiens
gcattaagaaaatgtctatttatttgtcacatatttttagtactccctgattaaaacttctttatatcctgtctgctgagatcacaaatatatttggccataaatagtagcaatctctttcataattagcctcatctttggtgatttattcagtaataaaataagtcagatcctgggactttgatcacttcttagggagtgaaatctggcatcaccaaaagcttgagactaaatttaaaaagacaatattcctatgattctgatgctgcagatatyacagctagagtcagaagggattttctaatttagttataaaactaagacatcacagcaatgattatagcaatttttgctggcccacaatgtatttaaaatagactctttatgataaagttctgtaactattgctttttcaatactgaacataagggacttatgtaaataaaaactgcccacaagacacatgtctggaaacaataagacagccaacttcttttggaaagtaaaagattggccaagtgttggtttgttcactgaggaaagtatgtttggggtcagacagagtgcaatcttctaatccgttggggagcaacacgcctactgagtgagaaacaagcagaaatgctagattatgttctacagaacctttcagaagtttcccacaacccttaactaccacttctaccaaaagattttcatatatttttgttatagaagatacaatttttttttttttgagacggagtctcgctcttcagcacagtccggctggagtgcagtggcgcgatctccgctcactgcaacctctgccttttggtgtaaagcaattctccagcctcagcctcccgagtagctgggattccaggcacccagcactacgccctcctaatttttgtatttttggtagagacgaggtttcaccatgttggccaggctgatctcaaacttgtgaccttgtgatccgcctgcctcggcctcccaaagtgcttgaattacatgcatgagccaccgcgcctggccctacaaatatttttattataatattgcattatatatattatatatatatatatatatatatatatatactgaaaaagttactttacctaaattttttacagtatgcctcaaaaattagtcatttctccactcactatatttttatcaaaaataaattacctgtgaccctcaaaaattttgattcctggaaaattggctgaattcagtgtctacccccaaaactcagtttttttttccattttttttttctaatttttgttatggaaaatgttgcagacataacaaagtagagaaactagtatagtgaactctgatgtatcagtttcacttttgtatggtctgttaagtgtaccccccgaatactcggatttttgcctaagtaagtttcagacagcacattattgcatccataaatatttgtatatataccactacataataactacttaaaagcataaacacaacattaaaaacagtattttaaaatttaaaaatgccgcttcctgtgtccatgtgttctcattgttcaattcccacctataagtgacaatatgcagtgtttggttttttgtccttgcgatagtttgctgagaatgatggtttccagcttcatccatgtccctacaaaggacatgaactcatcattttttatggctgcatagtattccatggtgtatatgtgtaccctaaaacttaaagtataataataataataataataaagattctgatattggagaaaaataaaaataaataaataaataaataaaatttaaaaatgcctagttggttttcatgggactttgatcgtgtttttctttaagcatttatttgtacaaatcagaaacaaagtaagaccc

SEQ ID NO: 74347 - DNA, 715 bp, Homo sapiens
tatccaaagtatttttcttataggaaatctacagcattcagttaggcctaaaaatgactttcttagctgttgaatatgcacaatggcaaacacaccctgctgaccaatactcagtatctctattttgttcctgccaaactgcagatagtagaagaggagacttacacttcacattcttgcatattgttatagcagaaatagagattatgtttcttttacaaatttactcttagaaatgaaagtttcctgatgactatgacttataaatccaataatctatcttactgaaaaaaattagtaaaaacataaactaaattttctgtgatcaattcaagaacatagaaatagttgctactttgaagattttgaggttgaaacaaatttattaatcatcttctatttctgagtcaaagtaatcaaggtgagaaatcttaatttctaaatargaatgtcaagaatgtttctgtttccaacaacatttccataatattttctaatttgtaaaattaagcaaatacaaatgtttcagtcttcaattgcatgtattaatccaggcatactaacaaatccttggatcattggatgattgttttaacatgtttgtacaactaatattacaaataactcgatagtcattaggtaccaaaaagttaaccaatttttttttaaactgacttttccttactgtttactttgtttcaaatcctgacatcag

SEQ ID NO: 74348 - DNA, 1958 bp, Homo sapiens
taagggacttacaagagacaccaggatggagcacagcatttttggtgcaaaggtgaagaggctggagaaagcctggatgtaatttagggaaggcgttttgaagaagtggaggaataaacatgtggatgggaggatggatgataaggggttagatttgttctgtgtcctcaaaggggaggaaaagtaggactaatgctgggtgggcatgaggagatggatttcagctcagtataatgagggacattccaagtgtcactcccaaagggggaaactctcctttcctggaggaattcaggcagggttggttcagtcacttggcagggatgttggcaagaatcactctagagtgtgggtggggcagattggattaagtccatagttttcacacttttttcaagacaaatctcttccttcaaatcaaattggtctgattgaacagggggtggaggggccctccgattccatcaacttgctgctccttaccttcaggtttgagattctgtaatgctaatgcagaagccttccatttgcaggttttgatctcctcttgcttttttttctccacatcatcccttgagaagagagcatagaacacgtgagaaacytaggccattatacaggcaatatttgctgagaaccttctatgtagcagccactactctaggtgctgagaataaatcagaaaaaaaaaacagatggactttgctctcttggagttatcagtctggaggggtaggcagagtcataaacatatttaggcacattgtgataagtagtggtgggcagagggcctagggggagcacttaccaccctactggaagcatctggtctaaggccctccaatccccaggatgcttctctctcctcattaccaagctgtgttcagaagggagtgaagacagtgactcctccctggatgtgagcatgggagcagaagggctgtcagaaaatgagtgtccccagctgtcaggtctccaagtcaggcacagaagggactgaggagggcttctagactctgctgcctaagctctcagcctgagacagttcctggaaacatcctcataccctcgagtgggagcccttaaaaccctgcacccagagcggagcccccaggcccttaaagcaggagtctgcaacaggcaggttgggggcacaaccatagccaggctgtgaggggagggctgaaatccaacactggcagctctatatcttcctgctctgcactggggaaggggctggggaggtgcagccagtggggcagatatgattcaagctacttttcgtactgcattattttgagcaactctgtcatttgtgtgactttggactagtctcttctccatattacacctcggtttcttcacttatgaaaagggagagtaggtgactgctagtcttcccagcttccccagatcctaattctgtgagtcttctttctgctgaaaggacaggggtcagaggatcttgatctggactctggtttttggaaggccaaaccccactggttataacctaggaaagggactttatagccaaagggcaggaagatggcagaggagtccctgaactgagcacttggatctggggcagcttgaagggggagctgcagcagtagccctgaggcagctagggccaggcctggtagtaggctttgcagagagaagcagatacttgtgctgggcccagctctcagctacccaccagaaaggacagctggccctcaaagcttaaaatcagaatcttcagacccccaggctctctggacccagagcacagactcctcctggtagtcacggagtcttttagctgcagagcccggactggagctcatttcttcactctgccattctgttgagaccagggtgggcatagggctaagctctcagactcccacttgtgtgagcactcccgttgattagggtggcaggtctgttaagagagatccaattgctctctt

SEQ ID NO: 74349 - DNA, 1958 bp, Homo sapiens
taagggacttacaagagacaccaggatggagcacagcatttttggtgcaaaggtgaagaggctggagaaagcctggatgtaatttagggaaggcgttttgaagaagtggaggaataaacatgtggatgggaggatggatgataaggggttagatttgttctgtgtcctcaaaggggaggaaaagtaggactaatgctgggtgggcatgaggagatggatttcagctcagtataatgagggacattccaagtgtcactcccaaagggggaaactctcctttcctggaggaattcaggcagggttggttcagtcacttggcagggatgttggcaagaatcactctagagtgtgggtggggcagattggattaagtccatagttttcacacttttttcaagacaaatctcttccttcaaatcaaattggtctgattgaacagggggtggaggggccctccgattccatcaacttgctgctccttaccttcaggtttgagattctgtaatgctaatgcagaagccttccatttgcaggttttgatctcctcttgcttttttttctccacatcatcccttgagaagagagcatagaacacgtgagaaacttaggccattatacaggcaatatttgctgagaaccttctatgtagcagccactactctaggtgctgagaataaatcagaaaaaaaaaacagatggactttgctctcttggagttatcagtctggaggggtaggcagagtcataaacatatttaggcacattgtgataagtagtggtgggcagagggcctagggggagcacttaccaccctactggaagcatctggtctaaggccctccaatccccaggatgcttctctctcctcattaccaagctgtgttcagaagggagtgaagacagtgactcctccctggatgtgagcatgggagcagaagggctgtcagaaaatgagtgtccccagctgtcaggtctccaagtcaggcacagaagggactgaggagggcttctagactctgctgcctaagctctcagcctgagacagttcctggaaacatcctcataccctcgagtgggagcccttaaaaccctgcacccagagcggagcccccaggcccttaaagcaggagtctgcaacaggcaggttgggggcacaaccatagccaggctgtgaggggagggctgaaatccaacactggcagctctatatcttcctgctctgcactggggaaggggctggggaggtgcagccagtggggcagatatgattcaagctacttttcgtactgcattattttgagcaactctgtcatttgtgtgactttggactagtctcttctccatattacacctcggtttcttcacttatgaaaagggagagtaggtgactgctagtcttcccagcttccccagatcctaattctgtgagtcttctttctgctgaaaggacaggggtcagaggaycttgatctggactctggtttttggaaggccaaaccccactggttataacctaggaaagggactttatagccaaagggcaggaagatggcagaggagtccctgaactgagcacttggatctggggcagcttgaagggggagctgcagcagtagccctgaggcagctagggccaggcctggtagtaggctttgcagagagaagcagatacttgtgctgggcccagctctcagctacccaccagaaaggacagctggccctcaaagcttaaaatcagaatcttcagacccccaggctctctggacccagagcacagactcctcctggtagtcacggagtcttttagctgcagagcccggactggagctcatttcttcactctgccattctgttgagaccagggtgggcatagggctaagctctcagactcccacttgtgtgagcactcccgttgattagggtggcaggtctgttaagagagatccaattgctctctt

SEQ ID NO: 74350 - DNA, 844 bp, Homo sapiens
aaagtggttgtaggtggaattttattttatttttacattttttcttttttgagacagggtctcactctcactcaggctggagtgcagtgctcaagccatggctcactgcagcctcaacttcctgcgctccagcaatccacctacatcagcctcccaagtagctggggccacagatgtaggccaccacatctggctaatttttctattttttgtagagatgggggtttcgtcatgttgctcagactggtctcgaactcctgggctcaagcaatccgcctgccctggcccctcaaagtgctgggattacaagcatgagccaccatccccagccctggaattttaaatcttcaaaatattctaaaatatcaatctcttgttaaagagctttgaattcccygggctactacaaaccctaagaattctgtgtttctctataccttttattcaccttgcacaaagaattccatttcctattattaagtttgaaacttgactgtgaggttcagagcacttacataatgaggtaagttaaacttcaactcagaatgactggttttcggacaaagaatgcaaccgctaatagcatgtatcatttttagatgagatttagaaacaatgctaatgtttcatgtgctgctctcggtcccatgcacccatctctcaggcggtataacatgaacccaagcgcccctgtaaaccagagaccttcaatagaccagatacccctggagacaaagggctggagcaatttcactgtgtttgtggatatagacagtttgcagtctgtcaggtcacaaatctctgttttaaataacccctaattacagatttacgtctccagtgc

SEQ ID NO: 74351 - DNA, 844 bp, Homo sapiens
aaagtggttgtaggtggaattttattttatttttacattttttcttttttgagacagggtctcactctcactcaggctggagtgcagtgctcaagccatggctcactgcagcctcaacttcctgcgctccagcaatccacctacatcagcctcccaagtagctggggccacagatgtaggccaccacatctggctaatttttctattttttgtagagatgggggtttcgtcatgttgctcagactggtctcgaactcctgggctcaagcaatccgcctgccctggcccctcaaagtgctgggattacaagcatgagccaccatccccagccctggaattttaaatcttcaaaatattctaaaatatcaatctcttgttaaagagctttgaattccctgggctactacaaaccytaagaattctgtgtttctctataccttttattcaccttgcacaaagaattccatttcctattattaagtttgaaacttgactgtgaggttcagagcacttacataatgaggtaagttaaacttcaactcagaatgactggttttcggacaaagaatgcaaccgctaatagcatgtatcatttttagatgagatttagaaacaatgctaatgtttcatgtgctgctctcggtcccatgcacccatctctcaggcggtataacatgaacccaagcgcccctgtaaaccagagaccttcaatagaccagatacccctggagacaaagggctggagcaatttcactgtgtttgtggatatagacagtttgcagtctgtcaggtcacaaatctctgttttaaataacccctaattacagatttacgtctccagtgc

SEQ ID NO: 74352 - DNA, 844 bp, Homo sapiens
aaagtggttgtaggtggaattttattttatttttacattttttcttttttgagacagggtctcactctcactcaggctggagtgcagtgctcaagccatggctcactgcagcctcaacttcctgcgctccagcaatccacctacatcagcctcccaagtagctggggccacagatgtaggccaccacatctggctaatttttctattttttgtagagatgggggtttcgtcatgttgctcagactggtctcgaactcctgggctcaagcaatccgcctgccctggcccctcaaagtgctgggattacaagcatgagccaccatccccagccctggaattttaaatcttcaaaatattctaaaatatcaatctcttgttaaagagctttgaattccctgggctactacaaaccctaagaattctgtgtttctctataccttttattcaccttgcacaaagaattccatttcctattattaagtttgaaacttgactgtgaggttcagagcacttacataatgaggtaagttaaacttcaactcagaatgactggttttcggacaaagaatgcaaccgctaatagcatgtatcatttttagatgagatttagaaacaatgctaatgtttcatgtgcygctctcggtcccatgcacccatctctcaggcggtataacatgaacccaagcgcccctgtaaaccagagaccttcaatagaccagatacccctggagacaaagggctggagcaatttcactgtgtttgtggatatagacagtttgcagtctgtcaggtcacaaatctctgttttaaataacccctaattacagatttacgtctccagtgc

SEQ ID NO: 74353 - DNA, 696 bp, Homo sapiens
cttgagccaaggaatttgaggttacagtgagttgatggcaccactgcactccagcctgggtgacagagtgagactctgtctcaaaaacaaaaattatcttttaattacttattatagaaaattggaatgtcataattaaaatcacccataatccttccacttacaagtaactgcagttaagaattgggttattcgtgggtactgaacctgagtattattaagattatatggccgggcacagtggcccacacttctaatcccagtactttgggaggctgaggcaggcagatcacttgaagtcaggagttcaagaccagcctggccaacaygacaaaacgctgtctctactaaatatacaaaaattagccaggcttggtggggcatgcctgtaatcccaactacttggaagctgaggcacgagaattgcttgaacccgggaggcggaggctgcagtgagttgagatagcgccactgcactccagcctgggcaacagaacgggactctgtctcaaagaaaaaaaaagattatatgctacatataacttttatccctccaccctttgtttcacatctaaattatgtgataataacttacttttaggaaacatcaatttaaatgcattattagaagtaatagtaatttctttattcggacagctacttgtggcatgtctttcatggattatttttcttttt

SEQ ID NO: 74354 - DNA, 553 bp, Homo sapiens
gctgaaatttgactttcctagcataagcccacagaatagtctgtccttgggcatttgastagaacagaaaacaattatctacaatattttttttcctctgaaactctaaagcttaattccatgttcgtacttgtgagtactgattataacttcagaattcttttttttttcttttgagtcagagtctcgctctcttgctgaggatggagtgcaatggcacgatcttggctcactgcagcctccacctcccaggttcaagcaatccttgagcctcagcctcccaagtagctgagattacaggtgtgccaccaggcctggctaatttttgtatttttagtagagatggggtttcaccatgttggccaggctggtctcaaactcatgacctcaggtgatccacccccctcggcctctcaaagtgctgggattacaggcatgagccactgctcccggccagaattctttgtataataaaattatgtttatctcccatatatatagttaagtgaaaaaggcagggtaaaaagagtatgtagtaagtagtatgctacca

SEQ ID NO: 74355 - DNA, 783 bp, Homo sapiens
gagattcctaatgaatttgattttatttctaacacacttagattgtaaaacttagtagaaagcacacaaaaaatagataaaacgtaagctgcctcgctcttttataagcagttgctcaggtaacagttctggcttttttttaacagaactataarttgtgtcatatatttgctatgtggtgagtagggaaattaatgctaaatgaaattcattggccttttacaaggctttcagagagctttgcaaaagtttttgttcgggaatagaaaatgtgagcacgtagacttttgaagagttatgtttagaagtttatttttccaacaattagatttctaaacttcccttaatttatttatgttaaataaaaagtcagtgatttcttttgatgtttcacaacaaaacgtttaagaatctacacacataattcaatatgctatcaatttgggtgaatgttaatgctagacaataatattcatttttaagggaacaaaaccatctaaaaacgttttgtttcaaactcagtgaatataatttaaaatggtcattccagatttcatgactattacacaactgaagaagcaacggagaaagagggtaagtctatgagtggctttctaattctctctatatattttttgaaaaatgttttaagacgttaaaagacagcaagagttttttctgaagaattctggaaatgaaaaaaaatgaattctggatatggacataggtcagacagggattctgagactaaaaagccctataaaactccaaaattatgagcag

SEQ ID NO: 74356 - DNA, 603 bp, Homo sapiens
aaagagaggtcagagcttaaatagtgggccacrtatgtagcccttataggaattttggctcttactttgattgaaatagggagccactagggttctagacagaaatttaataacctttctagagagaaatttaataaggtgaaacatgagatttgaaaacattcatattcattgctctagtaattatattttatataattcaccctgaagacataattagatatgcagcaatgatttatgtccaatgataccataacagcagtgaatttattataacaaacaattgaaaacaacttactgtttcgatgatagggtggattaaataaagtgtggaatactctgcaagccttataaaaatattgcttttatcaaaaacaaaacaaaaaaatttttatagaataaaagctggtaaaaatggaagtggacctgtgtaaatatgcctttttaaaataaaaggctaattaacataaacaaatgaattaatacatgaagggaacaagaggaaaattctagcatagtagaagggaatgtcttggggtgctggtattacagatttttaaaaattttttctttagacatatttacaaatttatttttggtaag

SEQ ID NO: 74357 - DNA, 618 bp, Homo sapiens
caattgttgatcatacttatatggcccttgccagtggttggctttgtgaagctagaattctgctttgtagaagtgtaaagcacccagaaagcacatatgtccagatgtcatttcttacaaagtccagtctacagctgcattatcctcttcattactatttaaaattacatagaagtgacttctagaggatgaagtccatctcaaaaacatagctcctttcttattcacagcctcaaattaattgttcttagactaagtggtactaataacccacagtcagtttaatggcctctgtatctatgtgacaggaatgccgtctcatagcccagctgtgtagagagagcagggcatcttcacggggttgttggagcctattgtctaagyagtatctttatagcctctcagcaaacaggaagagctacatcccctagacagctgtggtttttgatagtcttggggagggggtcatgctgggaaagacaggaaggagaagagaagcatgcaaattgagtcctacataacttttacatccaatatgagccaggattcatatgtgctcatattgagtgtccctgggtcctctaccctctcctgattatggatttgtgtagcatatgt

SEQ ID NO: 74358 - DNA, 618 bp, Homo sapiens
caattgttgatcatacttatatggcccttgccagtggttggctttgtgaagctagaattctgctttgtagaagtgtaaagcacccagaaagcacatatgtccagatgtcatttcttacaaagtccagtctacagctgcattatcctcttcattactatttaaaattacatagaagtgacttctagaggatgaagtccatctcaaaaacatagctcctttcttattcacagcctcaaattaattgttcttagactaagtggtactaataacccacagtcagtttaatggcctctgtatctatgtgacaggaatgccgtctcatagcccagctgtgtagagagagcagggcatcttcacggggttgttggagcctattgtctaagtagtatctttatagcctctcagcaaacaggaagagctacatcccctagacagctgyggtttttgatagtcttggggagggggtcatgctgggaaagacaggaaggagaagagaagcatgcaaattgagtcctacataacttttacatccaatatgagccaggattcatatgtgctcatattgagtgtccctgggtcctctaccctctcctgattatggatttgtgtagcatatgt

SEQ ID NO: 74359 - DNA, 927 bp, Homo sapiens
tgcatgtttctactttcaaggagctctgttgagctagtgtcaaaaagttgattgtccactaattacattagataatcagatccagaagcagctaccagtgatacgagttcttgtgtcaacattgaactctgagctttcagtggacttgacagagatgagtgtccaagtgccgtgggaagagcctgtactaagcaggtgtcagcatgtaggcttccaaatgccctctattcctggatgactgggagacctgatttgggctctgccagctgctctcctactttatgtggctcctcctcagtgctcactttctactgctttaattactatgattgttctcctccccagttacacccaattagcactttatttcttttctcacctcctatcctatgcaccacttcatgtgttcaattgagtctatcagttatcctgtgacctggccagtgcgctccctatgtaatagtgaagagactaagactagtttttaattatatagatatgcagtggccgagttgagctttgagctccaatgtcagtgcccattttatggtttctggagggtkcagacccttcctacatatcattgtcacctgtcatgctcagggcatgtggtaaatacttctcattaggtaaaagtcagtaaagaaattcagatgttcgaaacaagagagaatggtctttctactttatgttaatccatttaatgtggtttcttaaagactgtgtataggtatattaagcaccacctgcaaccacagccaaataattaaccaacagaaagagcaaagagtgaaagggtgtaaggctttaccttaaccaatggtaaggactgttgaccttccagagaagtgacagcacagaaaaacaagaatggagtgtgacaaggaggctggaaacaaataattgggtatttttcactttacatct

SEQ ID NO: 74360 - DNA, 678 bp, Homo sapiens
ccgctcacgtcacttccctctgcctgtgggtttctgggaatagaccactctgggtggccggcagcaggaggcgcccagtggtgcccacctcctagacatacctgggaagcacagctgcggcagggtgaggaggtccacgccgcccgggacggcgacatcctcaggctctggcgctctggggggccccgggaggccctyccactgctctggtctgggcttctctctcttctttctcaaggagcgcatccgggttttaccgagagtgccgcagttggcaccggccgtttgactgtcctctttactgataaaaggaggcacgaaaatggacaggacctctggatcaagaagagcagaaagatgtttgactccctttttataagcaacctaaaaaagggaaaaataagagttactgccacagcctcagctcttgttcgagggtatcctttctgtctgagcttcactgcttgtttttctcctcccctcggtgcccataaacactggcgcctcaggctcctaacagtaaagggctcctgggaagcttcttttaggaacctgccaggccctatgttcagggaagccacgtagactcgcagagcctggctcttcagctgtggacatggacagcaggacctcacctccttcctataaagcactgccgtccaggctgcggactgggat

SEQ ID NO: 74361 - DNA, 746 bp, Homo sapiens
attaagagcttctgcggaaacgatgtgagcaagagtgctttagaaagtgccagtgtgttagccaggcatggtggcgggtgcctggggtcccagctactcgggaggctgaggcaggagaatcacttgaatccaggagttggaggwtgcagtgagccaagattcaccactgcactccagcctgggtgacagagcaagactccgtctcaaaaaaagaaagagctagcgtgaccgtcgactgctctagaaggtgagggacggcagccctggggcgggagctcaagtgctggccccaattccatctcccgtgggctctctggctccagtcaccgtgaggctgagtccgtggagcggtcgtgccagctgcacacctgtcactcagcacttcacctcagaaagcaacaggcaccttgtccccacttatcccgtgacactggctcccctttcacttcagggctgaccctgaacccaaacctaagcgcatcagattggctgaaaactggcagcgaggcgcgggcagaggggccttacctggagtgtagagcagcacgtccaccgcttgtgggaacgcctcccccgccgaggggttgattttatgcttcagtgtttccagggttgtctccggaagcgtcatgggcactgaaagacaagacacttggagtgttactgttgcagcctcaaggaaacagacgcgatgcaacggcctcacgcactctgatttctgcagaatatcagcttgcaggtaaaac

SEQ ID NO: 74362 - DNA, 756 bp, Homo sapiens
agtcacttgtctcttctaacatctgttcaactgtttttctaggacgtctctcgtactgcagagactggaaagtgaaaatctgtaacatgttttccagactcccttgtagctagcgctcctggtctgattcagaaccaccaatcatatggactcaccaaagacttgagtttagaatgaagtttggtggggagatgaggcatccaacttggtgttagctcacagcagatgagatgtggcttgacaaagagcaggaggagggattgtttcctgcatctgggccatggttaaggtggtgtgatcctgaagccaracatcagaaggtggctttctttttttctttttctttttccttttttttttttgagatgtaatctcgctctgtcacgagactggagtgcagtggcgcgatctcatctcactgcaacctccacctcccaggtttaatcgattctcctgtctcagcctcctgagaagcttggactacaggtgaacaccaccacatccgggtaattttcatatttttagtagagatggggtttcaccattttggctaggatggtctcgatctcttgaccttgtgatctgcccaccttggcctcccaaagtgatgggattacaggcgtgagccactgcgcctggcccagaaggtggctttctgctggcccttcttcctctttctctgatgggcaagttctgagatgctgctctggaagtcgttcctagaggacagcctagatcctgctcctccagccctca

SEQ ID NO: 74363 - DNA, 756 bp, Homo sapiens
agtcacttgtctcttctaacatctgttcaactgtttttctaggacgtctctcgtactgcagagactggaaagtgaaaatctgtaacatgttttccagactcccttgtagctagcgctcctggtctgattcagaaccaccaatcatatggactcaccaaagacttgagtttagaatgaagtttggtggggagatgaggcatccaacttggtgttagctcacagcagatgagatgtggcttgacaaagagcaggaggagggattgtttcctgcatctgggccatggttaaggtggtgtgatcctgaagccagacatcagaaggtggctttctttttttctttttctttttccttttttttttttgagatgtaatctcgctctgtcacgagactggagtgcagtggcgcgatctcatctcactgcaacctccacctcccaggtttaatcgattctcctgtctcagcctcctgagaagcttggactacaggtgaacaccaccacatcygggtaattttcatatttttagtagagatggggtttcaccattttggctaggatggtctcgatctcttgaccttgtgatctgcccaccttggcctcccaaagtgatgggattacaggcgtgagccactgcgcctggcccagaaggtggctttctgctggcccttcttcctctttctctgatgggcaagttctgagatgctgctctggaagtcgttcctagaggacagcctagatcctgctcctccagccctca

SEQ ID NO: 74364 - DNA, 756 bp, Homo sapiens
agtcacttgtctcttctaacatctgttcaactgtttttctaggacgtctctcgtactgcagagactggaaagtgaaaatctgtaacatgttttccagactcccttgtagctagcgctcctggtctgattcagaaccaccaatcatatggactcaccaaagacttgagtttagaatgaagtttggtggggagatgaggcatccaacttggtgttagctcacagcagatgagatgtggcttgacaaagagcaggaggagggattgtttcctgcatctgggccatggttaaggtggtgtgatcctgaagccagacatcagaaggtggctttctttttttctttttctttttccttttttttttttgagatgtaatctcgctctgtcacgagactggagtgcagtggcgcgatctcatctcactgcaacctccacctcccaggtttaatcgattctcctgtctcagcctcctgagaagcttggactacaggtgaacaccaccacatccgggtaattttcatatttttagtagagatggggtttcaccattttggctaggrtggtctcgatctcttgaccttgtgatctgcccaccttggcctcccaaagtgatgggattacaggcgtgagccactgcgcctggcccagaaggtggctttctgctggcccttcttcctctttctctgatgggcaagttctgagatgctgctctggaagtcgttcctagaggacagcctagatcctgctcctccagccctca

SEQ ID NO: 74365 - DNA, 1515 bp, Homo sapiens
ctggtgtattttattttcacagatatttatgaacattatacagcaacctactgctgacccaagtctctgctcttctatattcatttatctcttggtaacatgggcagttctttcagatgagccatggacctaatgggagaacttggaatgagattttttttttttactagagtgagtcctaccaagtccttagtcacttaaaagtgtcagtgagaagggactctgacaggcagctctgtcaacgtgaacagagagttttagatcaagcccaggaacattactgtcaaaaattacaacctcagcgttgacataaatgttgacagcaccattttcactgatagtggtatcagagtagattatgattcacaaaggactgtccaacaaacaatgatttagatgaaatgctcccaataagtaaagaaagaggaaagggagaagcaaaatatgaggactgcaggttacaaaattttatcaagacagcatcatgccatgacaatatacatctctccttcctggtaatgagggtttgtctgcaactatatacaaagagaaacacraaactggaaattcagactctcttctgagtctagtctacctcctaattcagccctgttatacacagatttctgtaaaatatttgaaggaacgatgatggcgtataattacagaacaaataactaacttttcctgtgtgccagcaaaatgttttagaaatcaaaactatgtagacaaacaaaatggcatttggcaaagaaatgcatatagagatcgagacatgacacgtttactttttccacatacagaaatactattaatttaccaaagctcatctcaactttccccagtactctctgcaactctgtttcactatctctgatattgtgacactcaaagatatcctattaagcagcacagtatgtcttcaatttcagaattacttccatgtaatgttctagcccaatttaaattgtaaatgcttttctactttttttttttccctcacagcgctgagcaaggatttgagcatgtaagtggtaggagatacattgaaatatgtaaattaagagcaattgccttgtggaaactaagaaatacctgtgaaatattcaaatacagccacatgttacctaacgacagggatatgtcctgaaagaaatgtgtcatcaggcaattttatcgttgtgcaaacatcatagggtatacttacgtaaaccaagatggtgtagcctactatacgtcaaggctattgctcctaggcaacaaacatgtacggcatgttactatactgaataagcaattttaatacaacggtaaatatttgtggaaacatgtctaaacatagaaaaggtacagtagaaatacagcatcaaagataaacagtggtacacctgtttagggcacgtaccgcgagtggagcttgcaggactggaagttgctctatgtgagtcactaagtgagtggtgagtcaatctgaaggtcgagaacattactgggcactactgtagactttgccaa

SEQ ID NO: 74366 - DNA, 712 bp, Homo sapiens
atttatgtcattaaataaacacatgagaataagtctatttgtaagcacagaagtgtgctggaaagaatgtgatctatagagacacaaactgatgggaaattacaaagtctatggaagagtattgatgttttctctctcagtgaattctctttagtagttggtcatcaatgtactgaartgccttgagaaatttcctgaaacttctctttgtagagttctgtctgattagctccagacacttggaccattactgcaagatagttctctagttattcatgctgaccatggcatgcatgaatcatgtggtgagggacagaagttattattaagtgatagctttggaagataacagaaagataaaatgttacatcttggattatcctgggtccaggaactaccttcttcccattctctatctcagagcctgcatgatatgggggtagggatggaggtgggagcagaaacacctaataaggtgaagaagtaaaaaagataatggcaatattacttcatgtacaagcaaatgacaattcaacccaatccctcatcctcagttccttcactttctcctttctgctctgtattttttcttccttccaggaatcctaggttgaatctagtgcttttcaccttaatttcactgttctttaacttgtacaaagtatccaatttcaaaccctcccagggtattgaattttgataggtcaattct

SEQ ID NO: 74367 - DNA, 969 bp, Homo sapiens
cccatcacagtgactccagtgttcagtatttatgagtaattcttctggtctttacaggctagaagcagtaagtgcccaatatcccttgtcattctaccatgacctcatagattttaaagaatcaggaaaaactagttatttattttcattccttagtagtacaaggccagaggctagaaactacattatctttcacaataatttcacactagttatttttaacttataatatttttagaaagtatatttgttttaaacacataaacttggctgtttgtcaaagttgaagggtaaatttagtgacagcttagatctggaaatcctgaatgtgatttgataaagataaatataataagacaaaaagtgggagagaaccctttggaattacagtgagcatcctaattagagaatgtgtcccacccattattatagatcttaagactgagttatcacctcactttatgaccatgctttcaatggttagacctttagattgtgactgcaaagcaattagacctttgattcttcttttygaagccgcagtgaaacacctataaacaaaatggtccttaggcatttaaccttgcagcccccatgggggtatatttaaagtgataagaccttctttatgaaggtgagattgatggtggaggaaagtcaaaagacattgaaattgcacctgccaaataaagtgattctacttttcataaactaactccagaagccatttttttgtctcttaggaaagttagaagatagtggaaaatgtctatttacttgtaatgaagaatcatgaatatcccaactcatctcctatcagaacttacacccactaaggaaaacgcacttctgttccaaccttttctacacaatttaaaatatcaattaattaactgagtcaacaaatatttattaggagtgtctgattttctaggcaatattgtgggaatacgagtgagaacaaaaatt

SEQ ID NO: 74368 - DNA, 1868 bp, Homo sapiens
atagttctaggaataccacaattaatgagagaaattaaaaaaataaaacttaacctyattcagaaaacacggaagtgacatcactagcgctattgctcaatatgccctttctgaactaaaaatgaataataaaagggtatataagaatttctgatcctgtaatcttcagttttcagcctaatgactgaaagtctaaagtcttctccgtagaagtagctgctcagcagagattcacttaagtcttggatattagaggctttatctgtttatttgatgattggaattttctgcccattattgatccctgccactcttatgaacaacttaagtgtctgacacaagtgagttgataaaatagactgtattttttatccattaactggcacttcatatattgtccaaaatctgtcatgagctttgcaacatttccacagcaatagcacctgcctattcagggatcatatatcaaggtgcattcagttcatctgccacaacaggaattggctgctgctgtttatattttcccccccaactcttatcatgaagttaccccttacccttacttttgaaaaaaaatgggacatacttccaggattattttcttcaatatttctctatctaacaaagttatgtgttttataatttttgatatctgttaggttacatacatttacctgcttgaggaaatatatgagaagaaatattcaaacttgatagatgtcagtaatgctacctaaacattttcaaggcatgtaaaatcaacccctatctctaaaatattggagagagaggatccaggttttttttgtttggggtttttttgtcagtttgtttgtttttgacagagtctcaatctgttgcccaggctggagtgcagtggcgcagtatctgctcactgcaacctctgcctcctgggttccagcgattctgctgcctcaacccctcgaggagccgggactacaagcgcgcgccatcacaccaggctaattttttgtatttctagtagaaacagggtttcaacatgttggccaggctggtctcaaactcctgacctcaggtgatctgcccacttcagcctcccaaagtgctgttgattacaggcgtgagccacctcagctggcccagatctagtttttaaatgccaatgcaataccagatgttttctacatgcattatttcatttaacactcacagaaatactgtgtggagcccttgattttgatttttactgttgaagaaacatcaaagttcgctggtgttatattcagtggtttgcaagaccaggataagaagttaattcatggatctctaacacccagtctatttcaattataccaatgacattgcaaaatcacagcatatatgtgctcagaagtatataataatactgacagcaatagcataataaccaaactacatttggttaatagctaaattaaccaaagccaatatttattgatatttaccatgtcataggtaatttttagttataacctcattgaatcattaaaacagctctttggaaaaagaaaagtttagctattcttattttaaaaataaaaaacttgccttaagaccaggagttctctaccagactggggaacatgacaagactctgtctgtacgcataataataataataaaagactgagcctggcagcacattcctgtagttccggtgacttagaaggctaaggcaggagcattacctgagcccagaagttcaaggctgcagtgaactatgatcacatgactgcactacagtctagatgacagagcaagacactgtctcaaaaaataatataaattaaaaatcaaggcaaagaaaaggaatgtaatttgctcaagtttgcataaaaggtagttat

SEQ ID NO: 74369 - DNA, 567 bp, Homo sapiens
ctccaaaaaagccatagataacatcaattctgttgtcagaacaggccaacttcatgacatcctggtggagacagtaggaatgggataattggtttttcttgcaatatctcaagtttcttaaagtgaaagggaagggaagaaccaggagcatgctcttaaaggagaatactatccctatttgggcaactctgacagttgtcaggattgaggtgtatctcagagggttgtggatggctaggaatctatcaaatgacatgatcaggaggactgaggactccagtactgagaatccatgaatgaagaattcctgggcaaagcaggcattggatgaaatttcaggagcattgaacaggaagatgcttaacacagtgggcagagatgataaagacaaacccaagtytgacatagccaacatggaaagaaaatagtacatgggctcatgcaaggagggctctgtcttgatgataaaaagaatggtgcaatttcctagaatagcaataagatacatgctgcagatggggatagagatccagatgtgtgcatattctagccctggcatcccaacca

SEQ ID NO: 74370 - DNA, 567 bp, Homo sapiens
ctccaaaaaagccatagataacatcaattctgttgtcagaacaggccaacttcatgacatcctggtggagacagtaggaatgggataattggtttttcttgcaatatctcaagtttcttaaagtgaaagggaagggaagaaccaggagcatgctcttaaaggagaatactatccctatttgggcaactctgacagttgtcaggattgaggtgtatctcagagggttgtggatggctaggaatctatcaaatgacatgatcaggaggactgaggactccagtactgagaatccatgaatgaagaattcctgggcaaagcaggcattggatgaaatttcaggagcattgaacaggaagatgcttaacacagtgggcagagatgataaagacaaacccaagtctgacatagccaacrtggaaagaaaatagtacatgggctcatgcaaggagggctctgtcttgatgataaaaagaatggtgcaatttcctagaatagcaataagatacatgctgcagatggggatagagatccagatgtgtgcatattctagccctggcatcccaacca

SEQ ID NO: 74371 - DNA, 952 bp, Homo sapiens
ggtacccctgaagctgggggactgtccccacgacaatttgagggtgatatacaggggcaagtgacagaaagacttcggctcaaacagaatatacaaaacagcttggaaagtctgggacaggcaaagggggacagagatataggtggaccccrgatataggtggttttgaatttttaccatactctacatacaagtatttgttttgagcaaacctatatcttattctctggcaggatggtcaagattccagtttaaatctagacttataaagtctgagccctatttctcccagtctgttataaatcttgagagatttatcagtgtgctgtattcaggagacccatctcacgtgcagagacacacataggctcaaaataaagggatggaggaagatttaccaagcaaatggaaaaccaaaaaaggcagagattgcaatcctagtctctgataaaacagactttaaaccaacaaagatcaaaagagacaaagaagcccattacataatggtaaagggatcaattcaacaagaagagctaactatcctaaatatatatgcacccaatacaggagcacccagattcataaagcaagtccgtagagacctacaaagagacttagactcccacacaataataacgggagactttaacaccccactgtcaatattagacagaccaacgagacagaaagttaacaaggatacccaggaattgaactcagctctgcaccaagcggacctaacagacatctacagaactctccaccgcaaatcaacagaatatacactcttctcagcaccacatcgcacttattccaaaatcgaccacatagttggaattaaagcactcctcagcaaatgtaagagaaatttaggaaaagacaaggcctttgggggatcttgaagaaattcttttcaggaattttttttttctagtgaatgagacatgtatta

SEQ ID NO: 74372 - DNA, 952 bp, Homo sapiens
ggtacccctgaagctgggggactgtccccacgacaatttgagggtgatatacaggggcaagtgacagaaagacttcggctcaaacagaatatacaaaacagcttggaaagtctgggacaggcaaagggggacagagatataggtggaccccagatataggtggttttgaatttttaccatactctacatacaagtatttgttttgagcaaacctatatcttattctctggcaggatggtcaagattccagtttaaatctagacttataaagtctgagccctatttctcccagtctgttataaatcttgagagatttatcagtgtgctgtattcaggagacccatctcacgtgcagagacacacataggctcaaaataaagggatggaggaagatttaccaagcaaatggaaaaccaaaaaaggcagagattgcaatcctagtctctgataaaacagactttaaaccaacaaagatcaaaagagacaaagaagcccattacataatggtaaagggatcaattcaacaagaagagctaactatcctaaatatatatgcacccaatacaggagcacccagattcataaagcaagtccgtagagacctacaaagagacttagactcccacacaataataacgggagactttaacaccccactgtcaayattagacagaccaacgagacagaaagttaacaaggatacccaggaattgaactcagctctgcaccaagcggacctaacagacatctacagaactctccaccgcaaatcaacagaatatacactcttctcagcaccacatcgcacttattccaaaatcgaccacatagttggaattaaagcactcctcagcaaatgtaagagaaatttaggaaaagacaaggcctttgggggatcttgaagaaattcttttcaggaattttttttttctagtgaatgagacatgtatta

SEQ ID NO: 74373 - DNA, 952 bp, Homo sapiens
ggtacccctgaagctgggggactgtccccacgacaatttgagggtgatatacaggggcaagtgacagaaagacttcggctcaaacagaatatacaaaacagcttggaaagtctgggacaggcaaagggggacagagatataggtggaccccagatataggtggttttgaatttttaccatactctacatacaagtatttgttttgagcaaacctatatcttattctctggcaggatggtcaagattccagtttaaatctagacttataaagtctgagccctatttctcccagtctgttataaatcttgagagatttatcagtgtgctgtattcaggagacccatctcacgtgcagagacacacataggctcaaaataaagggatggaggaagatttaccaagcaaatggaaaaccaaaaaaggcagagattgcaatcctagtctctgataaaacagactttaaaccaacaaagatcaaaagagacaaagaagcccattacataatggtaaagggatcaattcaacaagaagagctaactatcctaaatatatatgcacccaatacaggagcacccagattcataaagcaagtccgtagagacctacaaagagacttagactcccacacaataataacgggagactttaacaccccactgtcaatattagacagaccaacgagacagaaagttaacaaggatacccaggaattgaactcagctctgcaccaagcggacctaacagacatctacagaactctccaccgcaaatcaacagaatatacactcttctcagcaccacatcgcacttattccaaaatcgaccacatagttggaattaaagcactcctcagcaaatgtaagagaaatttaggaaaagayaaggcctttgggggatcttgaagaaattcttttcaggaattttttttttctagtgaatgagacatgtatta

SEQ ID NO: 74374 - DNA, 821 bp, Homo sapiens
caataacatgctttcactaatttctctcaagaaaatttttgttttggcctaagttttattctagacccgggggtacatggataaataccatgttgctgagctttggtgcacaaaatatcttaaatctttaatatttacagcaatctttatggcctacaattaaatttaccttaagaatgcaaatatgccacctaccataaactactatcaaactggtcaagacatataagctcattgttttcaagtagcggaccaaaggaaaggcaggtggtaattcataagcgaaagggaacacgtgaaatgagttgagaccctcattcaccaaggctctctgactgggggtactttcattacagtgatgcagggaggtaaagcccaggcacggcagcaatcttgctgagctgaagcaacagacaacaccgttcatggctgctgaagcagctggggtttgctgggtaaagcaccagagaagggaagaggccccaamattctgaatggggtttctttactggtttctggctgaggctgggctgggaatgcataggacaagactctgtgaaggacgttttatagcagagaccacctgctattgggaaaaatactgaatgaagatgtctcatatcacaaagtgctgggaggtgctggatttctggtcaagtcaagagcgaagaggcctgagtgcctcaggcccttcagtaggccatgtggtaggtagggctgagaaacatactctaaggtaagggcaacaacttaagattaaagacaaaaccaaaaaagaacagccttaacgatgaatacaatcaaacctgacataatctaaa

SEQ ID NO: 74375 - DNA, 969 bp, Homo sapiens
tgcatatcatataagcaaggtttgcagaaaggccgggagaagaagaaaaatgacatttctactcttcaagagcttatactctaacaagagagactgacttctaaacagctatgtgtgtatacacacacacctataaaaaggtatatatatacactcccatacatatatatatatatccgcatgtgtgtgtatgtgtgtggaggtattggtatgtggcagtagactatggtgctcttacctcctctttagccacaagtcttggccacaagcaatgagatcgtcctccgaggctaaaactgttaagatcacagagttagtcagctcaggcgactataacaaaataccacttactaggtggcttaaacaacagaaacccacttcctgccttgcagatgactccattctcactgtgtcctcacatggtggggaatgagagacctctggtgtctctttctcttgtataaggacaccagttccattggatcagggctccatgcttctgacctcacttatccttaatcrcctcctaaaggccatatcttcaatacagtcatgtaaaggttagagattcaacataagaacttggtctgggggacacaattcaatccaagcaatgactctttatccgtcagcacccagacatacaaagtcacctaaaggacacaatatggatgccaggccaccatgataagatatcagccttacaattaatgaagtgataacatacaattaatgaaataatgtgtcaatcagaaaaagggagaggtcacgccaggaagcctcaataaaagtttggacttgttcagaaggagggactttaaaatccaggcttcctggactaagtgggctcacagagatggataaaggtggccctagtagacaaagtgtgagtatgtcaagttctaatttgtggctcagtacccattgtgagatggatggtgtatgaaatgccattcagcatggagccca

SEQ ID NO: 74376 - DNA, 606 bp, Homo sapiens
agccgtgaatagtagagcttaaagtatcaagaagagcggttcaactctggtggaagtggaggtgttctgctttcgatgggtgacaaggagaagagcagtacaggccatagatacatggacactagccatttgaggttacagtctagaactggataaccctgcaagaactaatgataacagagtcagaaatatctacttcaaaaacctaattttttttwaaaaaaaattcttatttccctctttttctttcatagtatttttaaattattttaagactttaaccttctttggctgtgccaagaaggaaaaaacaaatagtttatgtttgggatagaatttttgaagaacaatgaggaatgcacccctgggaactggcattgatagtcaaagtaatttatgtgatgtgaatggttgaggaaatagatttaggatccttgatcagctactccatgcttcttggcaatctcttggagcttctgagtggattttaatgagaaagcatttcgcaaagcattaaccagattattgtgaactcaggtgagggaagagccaaaatatcaaatccaacaaaaactgaataactactatgagtcaggcattatggaa

SEQ ID NO: 74377 - DNA, 915 bp, Homo sapiens
gaaagactgtctttaaaacatttggtagatatatttttacatgcatagaactacatgtctcattaagaaattagtttttaaaaattatctgagttgcttccaaaatagagttaaaaatcatataaaagtgcaaatgaaaataggctgtcagtcaaagggtgacaccaaagacataaacctaattgcctttgcatatatttgtgattatagcagatgccctattttttaaagctactagacttattggaagtgagttaatggtatatttttacaaacttaatactgaaaatcagttttcctcttgctgtcaggtgatgaaattttgttcttctgtgctgatctttctgttgatgtattatgacatagtctgtcaacatgaacagatatgtgaaaggagattgggygactgagaaatacaacctgcatagagctcttcttgaattttaagcgtgttatcatgtttgggtacaacaagtaagattgtgcttgctttaaaatgctgttatttttatataatttaagcccaagtaaaacaggtggaccatgagaaggttctaaagtggaatgagtgagccaattccaaaacatgtatttcagaatatcttttataaagcttttcacatcataagttgattcctttaaaaaaatcatttgcaaaatgtaaaagtttcttgacaaagaggagaaatcaattcatgtacatgtgattattaaacatagccattttctcccaaattaaacaattccacaactgttacatgcttttattgtcgcagatgtttttattgtttggtgttagatatctggattatatcaagtacacgattctgaggttaggtaaaacagccaagcctgatagtgtttacttggaaccaagctaacaaatgttattagaaaagcaagtacatttatcta

SEQ ID NO: 74378 - DNA, 1147 bp, Homo sapiens
cctaatttttttttagaaacaagatctcactctgtcacccagactaacgttcagtggtgcaatcatggctcactgcagcctcaaactcctgggctcaagtgatcctcccaccttggcctctcaagtagctgggactataggtgcttgccaccacagcaagctaatttgtttattttttagtttcttttagagatgggggattacactatgttgcccagtcttgtcttgaacttctgggctcaagtgatcctccttcctcagcctcctgagttgttgggaatacgggtgtgagccactacatccagctatatctttatctttctatatctgcatctatatcatctatctatatctataaatatctatatctatagagctaaaatctgttttttccacctagtcagcagaattttatattagttatctttagccacaggtgagattagaatatagaaaaaaaaaatccgagacaattttgtagcttcaactttcagatatgccatatatggacaaatacagtaattccctgagaaactgcttgcttctctgccttcagccacccaaggaacatcccaggctcagcactatgggtttccaaatttatccattcagccatacttgtggctcttgtggttggtctgtggcctgaagcttaacttgcccagtagttctatttcccaaaataggctcaggaagtttgtgaccatgtttggtttgtttcaaagggtttctacatatttaatgaggttgtgaacatatactaagatttgtatattgttcatcaaataaaacatatcttcaaccctcttttcacttcagtgcgtggtttggagctgttttacaagcacatgtgtttatcatatgactttatttggggacaaacaccaccccttacatttgggatacagtttctgagtagctgaacactcaatttcatccctccctattcaagaacaaatgttaagccgggtagctcttttctcttatttttggcaggtttctctgaatgctaaggtgtcttactkcatccaaatgttccctttatcataggagggtaagaaaatagcctgtaccctggagatctttttcacccagaaaggcatttaactagtgtctttctgtgtgctggggggagtagggagcctct

SEQ ID NO: 74379 - DNA, 1110 bp, Homo sapiens
tttttaagaattcttaaacttaggggaaataatctaaattcagatacttcagacttatgtgttagatattctgtttaataattaaataaggctgtcttcatatatatatttggagaggatgtcatgaagttagcaagatttttattcctctgcttgtggccagagagttgggatgagttacctgaataagagggaaggaaaacaactggaaatggctcctgtcctggtggtcagtgagcccgggttaccccgcaagacgttgaaaaatagggatgactatttgggcccctttggagagactggccactgtattctgggaaagttgcttatcatagtgtaattttaatttcccctttaattcttgtagcttcttttcccctaaacttcagtcaagtcttaaaaatattacagttctgtattagctgtgcttagagccataaatggagatatttatatcagcactttgagggaaagaacacagaggagcgtcaaagcagtgttgatagcatctatgagaaatctgaggtaatggacagagaaacctgaagcaatgacttggagaaaaagctgctgaacggcaatgaagatggatttgtgcaaggtttcagtactcctgcttgaggaagggactagactgcttgcagttatgyagatgagggctcagtacaataatttggttctataatttatatccacatgagtgataagccccacctgcctttggagtctggggagagaatttactcatactcattctttctgttttctggcttctaaccagttaagtgtggatccaaggatcctcatgaagatagaaatacagcatttgctttattactgacaaatctagtttggagtatacaggagaattctgttcttttaaaccttggaacctgcaggattctggcaaggactattaagttgcagcaggatgaagtagaaatgaatataaagccattttcaggtatctgcaatagacaccgttttagtttatttcctcgtgacctaattgctcttagtgggctccacctcccaatattgttgcattggtgattaggtttccaacacataaattttgggagacacacacaaatcatagcagatactgat

SEQ ID NO: 74380 - DNA, 1110 bp, Homo sapiens
tttttaagaattcttaaacttaggggaaataatctaaattcagatacttcagacttatgtgttagatattctgtttaataattaaataaggctgtcttcatatatatatttggagaggatgtcatgaagttagcaagatttttattcctctgcttgtggccagagagttgggatgagttacctgaataagagggaaggaaaacaactggaaatggctcctgtcctggtggtcagtgagcccgggttaccccgcaagacgttgaaaaatagggatgactatttgggcccctttggagagactggccactgtattctgggaaagttgcttatcatagtgtaattttaatttcccctttaattcttgtagcttcttttcccctaaacttcagtcaagtcttaaaaatattacagttctgtattagctgtgcttagagccataaatggagatatttatatcagcactttgagggaaagaacacagaggagcgtcaaagcagtgttgatagcatctatgagaaatctgaggtaatggacagagaaacctgaagcaatgacttggagaaaaagctgctgaacggcaatgaagatggatttgtgcaaggtttcagtactcctgcttgaggaagggactagactgcttgcagttatgtagatgagggctcagtacaataatttggttctataatttatatccacatgagtgataagccccacctgcctttggagtctggggagagaatttactcatactcattctttctgttttctggcttctaaccagttaagtgtggatccaaggatcctcatgaagatagaaatacagcatttgctttattactgrcaaatctagtttggagtatacaggagaattctgttcttttaaaccttggaacctgcaggattctggcaaggactattaagttgcagcaggatgaagtagaaatgaatataaagccattttcaggtatctgcaatagacaccgttttagtttatttcctcgtgacctaattgctcttagtgggctccacctcccaatattgttgcattggtgattaggtttccaacacataaattttgggagacacacacaaatcatagcagatactgat

SEQ ID NO: 74381 - DNA, 658 bp, Homo sapiens
ggccactggctatgaaaatttagcccctcatcttgctcctagtcttaccctttcttgcacacgctgttctcttgacctggaagggcctcccttggtttcccatctggcaaacacctattcatctctcaagatccagctctagactttcaaattctgtgatattttcctgggttctctaggaagcattaattatttccttctccccacagctttttatttgcgtctttgctatagccattcttacaggggatcaggctttgctggttccacacgttacccagagtatgcttggagctccagggagtagaggcttcgcattactgtcaatggacrtgcagcacccggagaagaaacagcctaaggaatgtgtttcacgaatgcttgggaatcagtgaaagaatgagagcaacatctcagggctgattctctgagccatgtgtataggcaagccttcattctctacacagttcaccccacttactcattctcctttctttttctcattcttctttgccctcaaccagaagcctgagcctttcatctggtgttcagggagcccacttctcacctagggcccagcggctgaatcatcattaccaattagaatacataggtattgtcatttagcataagttttcacaaggcagcgtcctgtcca

SEQ ID NO: 74382 - DNA, 658 bp, Homo sapiens
ggccactggctatgaaaatttagcccctcatcttgctcctagtcttaccctttcttgcacacgctgttctcttgacctggaagggcctcccttggtttcccatctggcaaacacctattcatctctcaagatccagctctagactttcaaattctgtgatattttcctgggttctctaggaagcattaattatttccttctccccacagctttttatttgcgtctttgctatagccattcttacaggggatcaggctttgctggttccacacgttacccagagtatgcttggagctccagggagtagaggcttcgcattactgtcaatggacatgcagcacccggagaagaaacagcctaaggaatgtgtttcacgaatgcttgggaatcagtgaaagaatgagagcaacatctcagggctgawtctctgagccatgtgtataggcaagccttcattctctacacagttcaccccacttactcattctcctttctttttctcattcttctttgccctcaaccagaagcctgagcctttcatctggtgttcagggagcccacttctcacctagggcccagcggctgaatcatcattaccaattagaatacataggtattgtcatttagcataagttttcacaaggcagcgtcctgtcca

SEQ ID NO: 74383 - DNA, 999 bp, Homo sapiens
gaaaagtctccaaacagtgggtaaactggctttttcaaaactcgaagatataatcatcaggtaccatgaaagagaaaatgaatagccagtgagaaaatattcctaaaatatatatttccaaaggatttatttctaagatatataaagaaatacaactactcaataataaaagattgacaactgtattttttgttgggggcggggggcagagtctccctctgtcaccaggctggagtgcagtggtgcaatctcggctcactgcaacttctgcctcctgggttcaagcaattctcctgcctcagcctcccaagtagctgggattacaggcgcacaccaccatcctcagctaatttttgtatttttaataragatggggtttcaacatgttgccaggatggtctccatctcctgacctcgtgttccgcctgccctgggctcccaaagtgctgggattccagacttgaggcaccgcacctggccgaaaactgtatttttaaaaggtagctacataaaaggcccccaaatatactagattaatattcatagtaatatgtacattaaaaccacaatgcaatattattacctaccagaagggttgcagtgataacgacttcaagtatgtgaagaaaagccatcaaaggatactagtaggagtgtaaaatggtacaactatttagaacatgagcctgacaatttcttatgaattgaaatacacacttacataccagcaattccacctgtagaaagagaaagttgtacactcattatacatgaatgtttataaaagctttattcataatgccaaacaacccagaattttgtgcatgtgtgtatgtgtttgtgtgtgtcttacaatgttctttatattgacccaactttttgcttcaaaacttccctgtaattaccagttttcccctaattggaggatgctgcactagtattaaaatgggattatataaatggtgagtagcatcagcaggcactccttaattcattaat

SEQ ID NO: 74384 - DNA, 664 bp, Homo sapiens
gttcagactctagatcagaataaaatatttgttatagtagaaactaacacaatatagaattacaatcactcctgtaggacatgagaaaataaaaatatttaaaaccaaataagtagcagggaactgcttcagtttttcgaaccaaacctaactaagtttgaataatcttagctaaaatatcgcagctgtttattgatgacccttttgcctttaacatattcagaaataatgtgtatactttttctcaaaagtcaacaaaataagcaaaaagttaacatattgtcttgtgttttagaggatatatagcatattaacatgtcatagtaatattttattgctatcattattaaaattttcaatgaaactttgagttctgaccaagrtgaagtaacagagactggatgtatcccatctaaaatgaaaaaagatggacaaaatatatgcaaagaaatggttcttaaaagttttgacataaggcaatgaacagaaatctttgagaaaaaaaaaaagaaaagagtgtccaggatgtgattcgggaaagggggactcaggtggaacctagcagtatctgtgagttgaaaacatagagctgggtgtgtacaggaaggccaaggtgtctacactttgcaggacagagtaccaaataaaagaaatctatatgcag

SEQ ID NO: 74385 - DNA, 664 bp, Homo sapiens
gttcagactctagatcagaataaaatatttgttatagtagaaactaacacaatatagaattacaatcactcctgtaggacatgagaaaataaaaatatttaaaaccaaataagtagcagggaactgcttcagtttttcgaaccaaacctaactaagtttgaataatcttagctaaaatatcgcagctgtttattgatgacccttttgcctttaacatattcagaaataatgtgtatactttttctcaaaagtcaacaaaataagcaaaaagttaacatattgtcttgtgttttagaggatatatagcatattaacatgtcatagtaatattttattgctatcattattaaaattttcaatgaaactttgagttctgaccaagatgaagtaacagagactggatgtatcccatctaaaatgaaaaaagatggacaaaatatatgcaaagaaatggttcttaaaagttttgacataaggcaatgaacagaaatctttgagaaaaaaaaaaagaaaagagtgtccaggatgtgattcgggaaagggggactcaggtggaacctagcagtatctgtgagttgaaaacatagagctgggtgtgtacaggaaggccaaggtgtctacactttgcaggacagartaccaaataaaagaaatctatatgcag

SEQ ID NO: 74386 - DNA, 654 bp, Homo sapiens
gcaacatgagttcaaaccgcatgggtctatttatacatggattttttaaatgaacacagttggccctccactagatgggttccatatccgyaaccaaatgcagatcaaagatacagtattcaggtgttgtgaaacccacctacatgcagggccaactttttgtatccacaggctttgcagggacagatgagtaaaataggattttggtacatgtgaggagttctggaaccaatcccctgtggataccaagacacaactgtacatgtaatatgtacaatttaagctcttgtgggtggatataacagataatatcatcttgatggtcatgtgtcttgttttttttaaaagtttgaaatcactatccaatgtcctgcctgtatactgtatattagtacttcacaagcacagacttctcaatgtttgtgaaataaataagcatatggatggatgaatggatgggctactggaatgatgaacagatggataaaattgaattcctgattctcttcccacgaatatctcttgtacttggtgcttaaagctgtgggctttgaggtggacattttttgttgatatgtagaaccattatcacttttctgagttcttctctgtccagtataggcataaagactggaaacagaattcctcagttgt

SEQ ID NO: 74387 - DNA, 654 bp, Homo sapiens
gcaacatgagttcaaaccgcatgggtctatttatacatggattttttaaatgaacacagttggccctccactagatgggttccatatccgtaaccaaatgcagatcaaagatacagtattcaggtgttgtgaaacccacctacatgcagggccaactttttgtatccacaggctttgcagggacagatgagtawaataggattttggtacatgtgaggagttctggaaccaatcccctgtggataccaagacacaactgtacatgtaatatgtacaatttaagctcttgtgggtggatataacagataatatcatcttgatggtcatgtgtcttgttttttttaaaagtttgaaatcactatccaatgtcctgcctgtatactgtatattagtacttcacaagcacagacttctcaatgtttgtgaaataaataagcatatggatggatgaatggatgggctactggaatgatgaacagatggataaaattgaattcctgattctcttcccacgaatatctcttgtacttggtgcttaaagctgtgggctttgaggtggacattttttgttgatatgtagaaccattatcacttttctgagttcttctctgtccagtataggcataaagactggaaacagaattcctcagttgt

SEQ ID NO: 74388 - DNA, 1364 bp, Homo sapiens
acaaagtgtaaaatatttactatcttgctctttggaaaagaagtttgccaaactctgctttagagtttaaattattctaatctgctgcaggacactstcttctttagagcactttacttcaacattaaggcttgaacggggagtacatgtaaaagatgtgacaaaatgcccccaaaagttgttctgaacctaataaaattacagaaataagatgacacaatcaagtcctattatgaactcttgagctaaaatgggaaaagaacttttctaactgaaattctgaaaatggaatcaatatgaaagatgtgggacccatcaagggaggctggatagagacaagagggacaaatggagaaacagagcactaagagttgtaatgaaactggctcttctgtgcatagttcattcagtggaaagttcagatgagagaggctgagccctccaactgggggaaggatctaccccatcaatgctatgggatgaacgattgttcttggccctacaattagctggtggcaaggccaattccccaattgtcacattttctccacatcacccacagatgggtaatatgcttcatcaacaactaagaacagccttaattagataccattctctaaggggtagctgtgtatttttttcttatattgggcataaaattattgacccaaactctaatggtgtctatttgtttacagagtttgaaggaagccttttactcaaggactaaaagtaacaataagaaggatgaagtgagactagctagatctatctgtacatagtgtgaagttgggtagtcctagacctttaacttaaatgtgcaataggtgctatgtggaagaaggacctcacacataatctatagatatcattcttggtcatgactacaaccccctcctaagggctgaaaatatcaaaccaggatctccagcctagtcctttctctccagttctagattcttagatcttccttgtattagttgagctttttgggaagcaggcaccaagatggagttagaaataggagaattaggagaaatagtcagaattaggagaaatgccatgaaatccaaagggggaaagaagcagaattaggcagagagcaccttcagtccataggtctgagacctgtgaaagggagggggaagaacacagagttttcgctaggaaaggccccatactgcagcaaagctctgagaaagtcccagccaacccaatgggaagctccagtgcaaagattgcctatagaggattcccacattggacagatgtgggcctagtactcccacaggatcggatactcctgcggtcattgactgatattgcttagagaaacggcctagccttggctcaaaaacctcagt

SEQ ID NO: 74389 - DNA, 701 bp, Homo sapiens
atgcggagcctgacatgccacagtttgctgggcagcctctctcccagccttagtgagcctctacagggaaagaaagatgtctggttcatctctttaatgctgggccatgcaaggggtttggcaaggaaaagctcctcagtagctatttactgaacacaggattccaaaatctgaccctgtcccagaagagaaggcacagccccacctcatggaactttcagtctgtctgggtggcactggtggaccagtcactgtattctccatttctgccttactaggtgactccacttttatttagggcagcaacaggcagctcttaaagaaaaaaaaaaacacatattccagagctttgggaggccaagcaagagaactgcttgagaccaggggtttgagaccagcctgggcaacatagcgagaccctgtctctatgaaaaatttaaaacaattagccaggtgtgttggtgaatgcgtctagtcccagctactgagaaggctgaggcaggagratcgattgagtccaggagttcaagactgcagtgagctatgattgtgccactgcactccaacctgggcaacagagagagaccccatctctaaaatgaacgaacaaacaaactctgtttcccaaattctcctaaagctatgggtgtccatgtgatgtggtctcaccagtgagctataagcagatgtctcctagatgg

SEQ ID NO: 74390 - DNA, 674 bp, Homo sapiens
ctgagtggaaattgcttagtgggaagggcatctgaagtggagggaacagcacgaaaaggccaagaggccagactgaatgatgggccataggtagtgggacaatgaggacacctggctggagtgtggagaaagaggagggagggactggtcagctggaggaggttcccaaggtgactgtatctgaaagtcagttatgggccagaygctgtgctaagtgcttttttgaacatcactttttatcttcccaacaatcctgtggcagccccattttgcagatgagagcattgaggctcagaatggataaaggacttgctcaagaccacatagcaccagccaaagccttgcacaataggtgctcaatatatatgtctgaaggggctggctgactgcatgaatgaatgagtgaatgaatcaatcaatgaatgagtaatagaattcaagcccaagcacccctggcttttagcttgagctctgtcctgtcctataccttgttgcctgaattctctccacctcaaaaacaactataattctaatggtaagaagagtgaataacatagcttccccctgagcctgaagtgcttggggctttgagcaaagccctcacattcctccaagccaggagctcatgaccacatgcttccccccttctggaatcttccctaactcctcctggg

SEQ ID NO: 74391 - DNA, 847 bp, Homo sapiens
tcccgcatcctcacttgccctgcctcccgcatcctcacttgccctggctcccgcatcctcacttgccctgcctcccaccatggcctccacattttgttcttggctttaacttgaacactgattgtggattctgacattagttgatcaaagcagacagaccaaccttaggagggctttctataatactayctattcattcattcttttatgcattaggtcacttgttctgctcccagcgaattaaggccctgatggaggctggggaaggggtggggaggaatgagttaccaatcccaagacaatggagggtgggcagggaggcactggagaacactggagctgcccacaaatcctgaccaacacccacaattatagtaaatgtacagtgttaagtaaaagcagggtgtttgctatgtaaaatttctttatccccacccccccgcaagtgccttgccataccagcatgccacctatgtggaggtttaggggctaccattgtacagcagaattcactcacctgcagcctggtgagcacctactgtgtgctgggcactgccatcctgccttgggtacactggtgaaagagaaaatgtctctctgtgtgtggagcctactctccgtgccatccctctggtcctctgtctgagtaggagacgggaataagctagtaaaccaatcatcaaacaaaatagcaaaaacattgagtcctaagcaatgtctgattagagcagaggaaggagttgggtgaattcagatggcaggatccgatgtagtgcccagcgaaggcgattcttcagttagacttggaagtgtgagaccttagagacatgagaaaggatattgcatc

SEQ ID NO: 74392 - DNA, 679 bp, Homo sapiens
atttcattgatctgagcccttgcggcaaactaacctttagcaaaaatgccttctctaggctccaatttgagatccagggaaaacaggtttggaagagttaacgatcttggggaaattaccattgctgtagaatgaagattattacttgttctttcttcataggctagacacactattttttaaagctagttgtttatactgtttataaagaaataaatattcctcataggaaatttagaaaacaaaagtttttaatgataaaaagaatatatgatctcatcccatctcttagacaataacactttttaatcttttttaagacaagatgtagctctgttgcccaggctagagtgcactggcattatcatagctcactgyaacctccaacttttgggctcaagcgatcctccctcctcagcctcccaagtcactaggactgcaggtgcacaccactgtaccaggctaaattttttattttttatttcttgtagagacgagggcttactattactatgttgcccaggctggtcttgaactcctgcataagggattcttccacctcagcctcacaaattgctggggttacaggcatgagccactgtgacctgcctctaacatctgaattgacatcctgcatgtagagatatgcacatatagatgacagctgtacacccatgca

SEQ ID NO: 74393 - DNA, 1036 bp, Homo sapiens
agcctcaggcctgcacggacggtgttggttggggtgagtctcgccaaaagccttaccgctgtccgtgatctcgwggacgggtcggcctgcgtgctcctgggctgctctctcacccgagggtcgttctcctccagagcagaaccccggatcctcaggggttgcctcagggttctcagggttcaatgcctctgctgtatgactctgcgtgtgtgtgcgtgtgtgtctgtgtgtgtgtctcccattctctcttctctctctgtctctcactctctgtgtgtttctttcccactctctgtgggtttgtaccagccgaagttgcgtcagggctaccaggtcgttggaggattgggggtgttgcgaaattggcagaaacctctttgctcctctggtaggcatttgaaaacgtggcttgggtcaggcacaggaggcccccctaccccacggttcccaggtgttgtttgtttttccttggcgttgacggaaatgtcacccgtttcccccttccaccggcatatgcctggaccccacccttcgtttcgccgtcgccccgtatgcctccggtgacacacattaacaccaactgctgtgggattggccagtgccacgcgtggtcacatggtctccccctgtgtttcgcctctgttcctctttgcagttgtcctgtaaagcgcgttcggctttccggaacccctgggcttttacaagcggggcaggccaatccactttcaaaggaggagggaggcagagggctgatggatgagtgagtttgctctgacactaggacttgagacctatggggtcattgtgtgctgcagcgaggccctgccggcctgaccacatgtggtgagcccatcctatgtcactcggagggggccagaatgggatctcaacgggagtctagagaacacagcaggcgtcctgaagctccccctcccttggtggaagtcggctcaagcaggtcctgaggacaggagccctgggggtttgggcctgggacaggacgagacacccgcggtcccctctcccatgccgcccc

SEQ ID NO: 74394 - DNA, 1036 bp, Homo sapiens
agcctcaggcctgcacggacggtgttggttggggtgagtctcgccaaaagccttaccgctgtccgtgatctcgtggacgggtcggcctgcgtgctcctgggctgctctctcacccgagggtcgttctcctccagagcagaaccccggatcctcaggggttgcctcagggttctcagggttcaatgcctctgctgtatgactctgcgtgtgtgtgcgtgtgtgtctgtgtgtgtgtctcccattctctcttctctctctgtctctcactctctgtgtgtttctttcccactctctgtgggtttgtaccagccgaagttgcktcagggctaccaggtcgttggaggattgggggtgttgcgaaattggcagaaacctctttgctcctctggtaggcatttgaaaacgtggcttgggtcaggcacaggaggcccccctaccccacggttcccaggtgttgtttgtttttccttggcgttgacggaaatgtcacccgtttcccccttccaccggcatatgcctggaccccacccttcgtttcgccgtcgccccgtatgcctccggtgacacacattaacaccaactgctgtgggattggccagtgccacgcgtggtcacatggtctccccctgtgtttcgcctctgttcctctttgcagttgtcctgtaaagcgcgttcggctttccggaacccctgggcttttacaagcggggcaggccaatccactttcaaaggaggagggaggcagagggctgatggatgagtgagtttgctctgacactaggacttgagacctatggggtcattgtgtgctgcagcgaggccctgccggcctgaccacatgtggtgagcccatcctatgtcactcggagggggccagaatgggatctcaacgggagtctagagaacacagcaggcgtcctgaagctccccctcccttggtggaagtcggctcaagcaggtcctgaggacaggagccctgggggtttgggcctgggacaggacgagacacccgcggtcccctctcccatgccgcccc

SEQ ID NO: 74395 - DNA, 1036 bp, Homo sapiens
agcctcaggcctgcacggacggtgttggttggggtgagtctcgccaaaagccttaccgctgtccgtgatctcgtggacgggtcggcctgcgtgctcctgggctgctctctcacccgagggtcgttctcctccagagcagaaccccggatcctcaggggttgcctcagggttctcagggttcaatgcctctgctgtatgactctgcgtgtgtgtgcgtgtgtgtctgtgtgtgtgtctcccattctctcttctctctctgtctctcactctctgtgtgtttctttcccactctctgtgggtttgtaccagccgaagttgcgtcagggctaccaggtcgktggaggattgggggtgttgcgaaattggcagaaacctctttgctcctctggtaggcatttgaaaacgtggcttgggtcaggcacaggaggcccccctaccccacggttcccaggtgttgtttgtttttccttggcgttgacggaaatgtcacccgtttcccccttccaccggcatatgcctggaccccacccttcgtttcgccgtcgccccgtatgcctccggtgacacacattaacaccaactgctgtgggattggccagtgccacgcgtggtcacatggtctccccctgtgtttcgcctctgttcctctttgcagttgtcctgtaaagcgcgttcggctttccggaacccctgggcttttacaagcggggcaggccaatccactttcaaaggaggagggaggcagagggctgatggatgagtgagtttgctctgacactaggacttgagacctatggggtcattgtgtgctgcagcgaggccctgccggcctgaccacatgtggtgagcccatcctatgtcactcggagggggccagaatgggatctcaacgggagtctagagaacacagcaggcgtcctgaagctccccctcccttggtggaagtcggctcaagcaggtcctgaggacaggagccctgggggtttgggcctgggacaggacgagacacccgcggtcccctctcccatgccgcccc

SEQ ID NO: 74396 - DNA, 1036 bp, Homo sapiens
agcctcaggcctgcacggacggtgttggttggggtgagtctcgccaaaagccttaccgctgtccgtgatctcgtggacgggtcggcctgcgtgctcctgggctgctctctcacccgagggtcgttctcctccagagcagaaccccggatcctcaggggttgcctcagggttctcagggttcaatgcctctgctgtatgactctgcgtgtgtgtgcgtgtgtgtctgtgtgtgtgtctcccattctctcttctctctctgtctctcactctctgtgtgtttctttcccactctctgtgggtttgtaccagccgaagttgcgtcagggctaccaggtcgttggaggattgggggtgttgcgaaattggcagaaacctctttgctcctctggtaggcatttgaaaacgtggcttgggtcaggcacaggaggcccccctaccccacggttcccaggtgttgtttgwttttccttggcgttgacggaaatgtcacccgtttcccccttccaccggcatatgcctggaccccacccttcgtttcgccgtcgccccgtatgcctccggtgacacacattaacaccaactgctgtgggattggccagtgccacgcgtggtcacatggtctccccctgtgtttcgcctctgttcctctttgcagttgtcctgtaaagcgcgttcggctttccggaacccctgggcttttacaagcggggcaggccaatccactttcaaaggaggagggaggcagagggctgatggatgagtgagtttgctctgacactaggacttgagacctatggggtcattgtgtgctgcagcgaggccctgccggcctgaccacatgtggtgagcccatcctatgtcactcggagggggccagaatgggatctcaacgggagtctagagaacacagcaggcgtcctgaagctccccctcccttggtggaagtcggctcaagcaggtcctgaggacaggagccctgggggtttgggcctgggacaggacgagacacccgcggtcccctctcccatgccgcccc

SEQ ID NO: 74397 - DNA, 730 bp, Homo sapiens
cttgagcccaggagttcaagacaagcctgagtaacagggagagcctcatctctatagaaaatttaaaaatttaattagcctatcatggtggctcacacctgtaatcccagatacttgggaggcttttttgaggttatagtgagttatgatccagctactgtactccagcctggtgacagaacggcatcttctctctataaaaataaaaataaaaataaaatctatgacatttaactgattacttatttaatcaattaattggaataaatgatatcctgattatgacatttcaatagacatattattatttattttaatatttgaatagagtaaataaagacctatttttctttcaatttgtcatttattttatgttgctttgaatagaaaactaatrctgcaattgtgtacaccattaaatcattaggttctaatttccttgatctattacgaaaagtgattttcaatttgaatatcaagggcattatttgcagaatattgttattctgcaaatatattctgcaaatacattctgtaatatttaaatatcataatcaagcaaactcttaaatgtgacacctgaaacaattataggcaaagaaaatactagtaatatagctcacagataaagcttatttagtataaagtatgcaaggaacttcggattcagaaaatatggcacagatccatgtttttcccgcctctttttgttatgcacaactatatattt

SEQ ID NO: 74398 - DNA, 1076 bp, Homo sapiens
ccttcacttctgaacttagatgaaacagtaaaccatgagaatttcagagcacaatgacacaacctgaaagtagagggatgtcctttcttcacagtggtaactttgactaatgaaaaacagaaaatggaaaggcttcatactgatgaccccctccaccccactgttttctttctccaaaacgatgccatgttttgtttctttcttaaaactctcctgaccccagcactttgggaggctgaggcgggtggatcatgaggtcaggagatcgagacaatcctggctaacatggtgaaaccccgtctctactaaaaaaataaaaaaaagtagccgggcgtggtggcgggcacctgtagtcccagctactctggaggctgaggaaggagaatggtgtgaacccggraggcggagtttgcagtgagccgagatcgcaccactgcactccaccttgggcaacagaacgagactctatctcaaaaaaataaaggcctcctgaaagagtttctgtctctgagaaaaacatactgtgctcctctgagctctctgagaaacaggggccaacactataaattattgcatttaattttccccgtttgttcacttctgtttattcttcagccttgcaactcagagggcttgcaattcacaaataaaatgtcagcattttgatccatatgtcagattctaccatttatgtacacggataacttgtacattctacaaatgcctgaaaattgtgtttcctggtgagctctgccacactgtcttcagactttctgcaccttgaaaattgggctgcagacattctgttgatcttttttgtacttgactacgctaagtttttccttgccccagtcctagagcaaaagttaccctttttgctcaggtgccctttcttcacatgccttgctccttatctgcctatgggcttaaatgtcactttttggaagaaactgacttactgtgtaattagattgttgactctgctattgttttctacagcatcctgtacatttctttaattagatttttgactatgttgagcaaatctgcagcatcttgtgtatttctttatgcat

SEQ ID NO: 74399 - DNA, 662 bp, Homo sapiens
gatccccgcttaggttttatatgttgaaatcacagtgttagtaggctgcattctcattttgagcttgatatcctttctcaagtgcattcatattcttggaaaaatttaattcctgtggttgatggactcatatccctgcttgctwgctggctgctggcttagggcctttcttgtatcctaaagcctgctgttaggttctacccacatgaagatttagaacatggcagcttacttactcatagccagcaagagaatctttcttcaatccactaaaactgaattctatataacataaacaggagagtgactacccaatcaccttttgcatatttcctaacctaatctagggagcaattctcccatcatattcacaagtctcattaaagggaatagaattattggaccatctatatcattgggcagaatttgagggccatcaaataattctgtgtaccatgctatgctatcactatcacaattagtattgcattgccacatcacctattcttagaaaccttattgccaagagaattattaacacattttaaaagattaacataatgggccatatcagaagagtgaattagaggaagacatttaacaaagactttcaagtagcaaaatgacttgtataataaaatctaagaagatagatttttata

SEQ ID NO: 74400 - DNA, 662 bp, Homo sapiens
gatccccgcttaggttttatatgttgaaatcacagtgttagtaggctgcattctcattttgagcttgatatcctttctcaagtgcattcatattcttggaaaaatttaattcctgtggttgatggactcatatccctgcttgctagctggctgctggcttagggcctttcttgtatcctaaagcctgctgttaggttctasccacatgaagatttagaacatggcagcttacttactcatagccagcaagagaatctttcttcaatccactaaaactgaattctatataacataaacaggagagtgactacccaatcaccttttgcatatttcctaacctaatctagggagcaattctcccatcatattcacaagtctcattaaagggaatagaattattggaccatctatatcattgggcagaatttgagggccatcaaataattctgtgtaccatgctatgctatcactatcacaattagtattgcattgccacatcacctattcttagaaaccttattgccaagagaattattaacacattttaaaagattaacataatgggccatatcagaagagtgaattagaggaagacatttaacaaagactttcaagtagcaaaatgacttgtataataaaatctaagaagatagatttttata

SEQ ID NO: 74401 - DNA, 637 bp, Homo sapiens
caaagtgggtggatcacctaaggtcaggagtttgagaccagcctggccaatatggtgaaaccccgtctctactaataatacaaaaaaaattagctgggcatggtggtgcatgcctgtaatcacagctactcaggaggctgaggcaggagaatcgcttgaacccgggaggcagaggttgcagtgaaccaagatcacgccagcagtgcactccagcctgggagaaaagagcgaaactccatcttcaaaaaaaaaaaaaaaaagaaagaaagaaagaaaccctatttcccaggtatcatgccaaatgttttacgttttacatgcaatgtattacttcggcagatattagctgagcatttactgtacaccaggccctacgcaaatcttggggaatacagacatgaacaaggattcaagacactcaagatcactgaattctcacaataaccctaaggtgagtgttgttattcccattttacaaatgaggaattgaggctcagagaggtgaaattaccagtccaagattacacagctaatgagctgcagagtmcagatatggccaggcctgatgtcttcaaagcctgtgctcattcctctaaccaaggagcaagagtggaggcagttgagcagcctggggcta

SEQ ID NO: 74402 - DNA, 1280 bp, Homo sapiens
tgcatggtgtttttaagcaggagcgggcccctgggaggagatgcagaaagaaatcaagtcagggaagagtgcctttttcaacacttactgcacagtccacaggccaggcatgcacgtctgttaacaagctccgcactacacacacacacacacacacacacacacacagagagagagagagagagagagagagagagtaagtttaatatttatacataaggaagtgaaggtcaaagagaggaaggtcactcaccccactggccttctgggcagccaacaccatctctaagccatccccttgcctaaacccctccatggcttcctgttatctttaggatagagtcctccagttgttagcagacccaaaaggccctctgtatctggccccagtccccttttcaccctttttgcccctccatatgtccctttccttttccgttccacccttgcagagttcttttgacttcctccaaagaggcaggctctcccagttaggtctgggtcttccacaggctgggcatccatctccactccccttccccagctaatgactgctgcttcaccctttcaggtttcagctcaaatgctaagagccttccaggtcccctagacaggtgggggccacctgaaagttctcaggccaccttgttccttcccatctcttggctcacggtatctggcttccccactagccaatgagctccactgatgcagaaactgcatctgccttgttctctgccaatttctaatgtctagtatagcacctrgcacacagtaaatgtccaaagcccgtttgtgttatttcattatttttctctcttctttgtttgtagtttttgttttgtttttaatttcttttggcaaggggtgaggacagaaccacacagtggtggtgggggaagggccagggagatgagagagctggggaagagaaaagaaaatgcaagaaacagggagtgcagctgggtgcaggggctcacgcctgtaatcccagaactttggaaggcggacgcaggaggattgtttgagtccaggagtttgagaccagcctggacaacataatgagactctgtccctacaaaaaaatacaaaaattagctgggtgtggtggcatgtgcctgccgtctcaactactcaggaggctgaggtgggaggatcacttgagcccaggaggttgaggctacaatgagctgtgatcacgccactgcattccagcctgagtgacaaagtgataccctgtctcaaaaaaaaaaaaaaatcgggatggcgatcaacatgca

SEQ ID NO: 74403 - DNA, 1089 bp, Homo sapiens
caatttgtaacaaaaatttctaagtggaatagtcctaaaattcgaaattttaggccacaygcagtggctcacagttgtaatcccagcactaaggctggtggatcccctgaggtcaagagttcgagaccagcctggccaacatggtgaaaccccatctctactaaaaatacaaaaaattagctgggcatggtggtgggtgcctgtaatcccagcgactcaggaggctgaggaaggagaatcacttgaaccctggagacagaggtcacagtgagctgagatcacaccattgcactccagcctgggcaacaagagtgaaactccatctcaaaaataaaaaagtaatttaaaaaatgaaataataaaataaaatgtgaaattttaagacatttattctgggcatggtggcatatgcctgtaaacccaatgctttgggaggtcaagccaggagcatcacttgaggctaggagtttgagaccagcctgggcaacaaagcaagacctcatctctacaaatagtttaaaaaattagccagtgtaatagggcatgcctttagtcctagctacttgggaggctaagccaggtagatagcttgaacccaggagcttgaggctgtaatgagctgtgattgcttcactgcactccagcctgggtgacaaagtgagaccatttctctgaaataaataaataaataaaataaaaattttaaggtattcaaataaaacatgtaattgaagaaaagacaaggttttttttttttaggaaagaatttttatcaagacctagactgtggtataagatttatgttgaattttctgttccttttttagagaccaatattttaaaagaagtaaatttaggaaaagtatattgatttatctccctgttgtaccttttttttttttttagcccattcttggtactgtcagtaatagctaccaatgtctaagagatgtagatttttaaattttgatattgctcttttttgtgctgtctagaaatgggtaaacagagagatatcaaattttgactacctcattcaaataaatacaatggcaggacgaacctataatgaccttgcacagtatcctg

SEQ ID NO: 74404 - DNA, 1089 bp, Homo sapiens
caatttgtaacaaaaatttctaagtggaatagtcctaaaattcgaaattttaggccacatgcagtggctcacagttgtaatcccagcactaaggctggtggatcccctgaggtcaagagttcgagaccagcctggccaacatggtgaaaccccatctctactaaaaatacaaaaaattagctgggcatggtggtgggtgcctgtaatcccagcgactcaggaggctgaggaaggagaatcacttgaaccctggagacagaggtcacagtgagctgagatcacaccattgcactccagcctgggcaacaagagtgaaactccatctcaaaaataaaaaagtaatttaaaaaatgaaataataaaataaaatgtgaaattttaagacatttattctgggcatggtggcayatgcctgtaaacccaatgctttgggaggtcaagccaggagcatcacttgaggctaggagtttgagaccagcctgggcaacaaagcaagacctcatctctacaaatagtttaaaaaattagccagtgtaatagggcatgcctttagtcctagctacttgggaggctaagccaggtagatagcttgaacccaggagcttgaggctgtaatgagctgtgattgcttcactgcactccagcctgggtgacaaagtgagaccatttctctgaaataaataaataaataaaataaaaattttaaggtattcaaataaaacatgtaattgaagaaaagacaaggttttttttttttaggaaagaatttttatcaagacctagactgtggtataagatttatgttgaattttctgttccttttttagagaccaatattttaaaagaagtaaatttaggaaaagtatattgatttatctccctgttgtaccttttttttttttttagcccattcttggtactgtcagtaatagctaccaatgtctaagagatgtagatttttaaattttgatattgctcttttttgtgctgtctagaaatgggtaaacagagagatatcaaattttgactacctcattcaaataaatacaatggcaggacgaacctataatgaccttgcacagtatcctg

SEQ ID NO: 74405 - DNA, 574 bp, Homo sapiens
tggcccaaaagatgaatgaaaaaaaaaatctattttccaaaatactgcaggtacaactttttcctctctttgattatattaatataaatccaaatcttcatcataacttagagattttcaggcaaaaaatatagtcaatttgaccttttggtatggagatctttttttttaaggcaagggaagattttgagcctctacaaagatagacagaatgggattaaacagggaaatgcactctgatccaacttcagtgcgggtgaagcaccgttgcaggaaatggcatcaccagaacctggggggtgttcacagtggcttctttgactgggttgaaaaagggagcagcagtgtccacatgtcatttagcagggaacatgtgaaagcccagcaaagagaacagaacatccccatctctctcatcaccttcttctccctctgcctatgtcctyaaccccagccctgggctttctcctccaaatcctgacaccacctcacagccccgttatttggaagatgctcttgaatcttctctaatttaatgattttggccttatgaatgacctcaaatctatatgct

SEQ ID NO: 74406 - DNA, 1519 bp, Homo sapiens
aattcacctagattttcctgaagaaatttcattcctttttttcacgtattttcaaagtagagaggaatctaacataattttcttttggttgcatacccagttacagtactggcatcattaactaaatagttaattcttttcctactggaagtttctcacacattctgaagaaagctgggttcagaaataggacaggcagaatcccaaccaatcccgtacattctatggtgacttctcatctaacttttgctccacatcttctttgagaattgatagggaggctactgagattcagccagagatggggtcagcaaagctcttgtaggtgttcgtgaaagaacccaggggctgttgttaggggtagggctggggctggggcttacctgatcttaaactcagatcaaaagtccacactgagctcttttgtcaggagggccctgggaggttgaagggccatgagacacccagtgggatctcataatgttgtggtttctacctactaattcaagactctgcagatgtagcaagggatatttaaaatgtgttatccgggacttcttaagttccataaaactctacaattacacttaatacccacttacccacttggccaaactctaaacatgcacaaaagagcttccctcctcccccacttccccttgctaaagacctgaaaacagaagatttttaccacccaggtagtatctgcttgggaagggagagaggtcggggctggggcagaagggggcaggggagtctgtttattttgcagttagcaaagggccttgggatcctcttggaaattttggtttgagaggtggtaaaatgtctgattgtgacaactgtaaggttagattcgtcaccaccacagacataaatgagctcacagacattttggtggctgcagagaaactgattaacagcatcamatctgaaatctggccctgaaaatccttctcacactgacaattatgtaaagagtgactcataacgtagtcgtttcttaaaatgatacatgttagcacaagcataggccacataaccacatttcagttaatgacagaccacatatacaacggcggtctcaaaagattataacggagctgccctatacaggtgtaccatttcttatcttctatacaataattttactgtactttttctatgtttagctatgttgagatacacaaatacttgctattgtgttacagttgcctaaggtattcagtacagtaacatgttgtgcaggtttgttgcccaggagcaataggctatagcatagagcataggtgtgaggtaggctctgccatctaggtttgtgtaattccactctatgatgttcacgcaatgataaaattgcttagtgatgcatttctcagaggtatccctgtcgttaactgacacatgactgtacttaagacaaagaaaatgtgtctgaggcgctggtattcttcctaggaatagagaaggaactcacctatttcagttgttcagacttttagggcatctcagatttgct

SEQ ID NO: 74407 - DNA, 1519 bp, Homo sapiens
aattcacctagattttcctgaagaaatttcattcctttttttcacgtattttcaaagtagagaggaatctaacataattttcttttggttgcatacccagttacagtactggcatcattaactaaatagttaattcttttcctactggaagtttctcacacattctgaagaaagctgggttcagaaataggacaggcagaatcccaaccaatcccgtacattctatggtgacttctcatctaacttttgctccacatcttctttgagaattgatagggaggctactgagattcagccagagatggggtcagcaaagctcttgtaggtgttcgtgaaagaacccaggggctgttgttaggggtagggctggggctggggcttacctgatcttaaactcagatcaaaagtccacactgagctcttttgtcaggagggccctgggaggttgaagggccatgagacacccagtgggatctcataatgttgtggtttctacctactaattcaagactctgcagatgtagcaagggatatttaaaatgtgttatccgggacttcttaagttccataaaactctacaattacacttaatacccacttacccacttggccaaactctaaacatgcacaaaagagcttccctcctcccccacttccccttgctaaagacctgaaaacagaagatttttaccacccaggtagtatctgcttgggaagggagagaggtcggggctggggcagaagggggcaggggagtctgtttattttgcagttagcaaagggccttgggatcctcttggaaattttggtttgagaggtggtaaaatgtctgattgtgacaactgtaaggttagattcgtcaccaccacagacataaatgagctcacagacattttggtggctgcagagaaactgattaacagcatcaaatctgaaatctggcyctgaaaatccttctcacactgacaattatgtaaagagtgactcataacgtagtcgtttcttaaaatgatacatgttagcacaagcataggccacataaccacatttcagttaatgacagaccacatatacaacggcggtctcaaaagattataacggagctgccctatacaggtgtaccatttcttatcttctatacaataattttactgtactttttctatgtttagctatgttgagatacacaaatacttgctattgtgttacagttgcctaaggtattcagtacagtaacatgttgtgcaggtttgttgcccaggagcaataggctatagcatagagcataggtgtgaggtaggctctgccatctaggtttgtgtaattccactctatgatgttcacgcaatgataaaattgcttagtgatgcatttctcagaggtatccctgtcgttaactgacacatgactgtacttaagacaaagaaaatgtgtctgaggcgctggtattcttcctaggaatagagaaggaactcacctatttcagttgttcagacttttagggcatctcagatttgct

SEQ ID NO: 74408 - DNA, 481 bp, Homo sapiens
tggaaagggcacacacactaaagactctagtacttttaattcagtcaatgaagaaactgaacaaacaaaaacactttgatttaataaattattaatcaaaatgccagyaaactttgaatatattgtaatgaaaggaaatcctttatagggtacaaagcattgtcttagacttttacgcatgttttattttgtattttataggcaactccaatgaaatagacatcgtgcatcatgtagacactgaggccaatatagctacggaggtttgcctcactattctggacctgttatccctcttcacacagactcatcaggtgaatatgatgataacattttctgcaaaaaatgatgaaatatgaggtagaaaaaccatgtgaagtcaaaaacatggttttttttaattatttatgaaatcaattaaccttatataaatcaacctaagtgtgagtggaaaacatgttaaagatgagattttgatttt

SEQ ID NO: 74409 - DNA, 577 bp, Homo sapiens
atctttggccaggctagtccaggaactaggctgagagacctgcacagagcatgtgggctattctcccagggtgggcctacagagcctaatgtgagtacatttcctcaagagagcaagccacagatggcactttatagtgtgaatgccacctgtccatgctgactgttaggcaaggggtcctatccttctgcagagttaaataagatcacaagatttgttaggtgaataaagaactccagacacaagattagtcctcatccttagggctgtttcttgtgaaagttgtcagaatcaaaatggagtcactaatctaaaaaaaaaaacctgacaaatagagctgggtttgaagagaggccatgaagagagggctctcatgcttatatgcctgataaaaactatcacaaagactgcaaaaccgcaaccttgcgcaaaggctatggctaccttacacacacaaaactatttcctcccacaaggacatctgctcagaaactgcctgtctaaytccatgctgttattgatctttgtagccaaggaaaattatttcaaaataatcatgtaatcctcatttttccct

SEQ ID NO: 74410 - DNA, 530 bp, Homo sapiens
agcactagagctaaatcatgaagttgaattgtaggaatttaccaccgtagtgtatctgaatcataaactagattatcatagttatctagtttatgagtcataagctagatttgattcttcaaagaagaaaagtcagtgagcaaatttaaaccagaactaagcattatattttctttttttttttttgagacagagtctcgctctgtcgcccaggctggagtgcagtggcacgatctcggcggctcactacaacctctgcctcccaggttcaaatgattctcctgcctcagcctcccgagtagctgggattacaggtgcataacacacctgggtaayttttatagagatggggtttcaccatgttggccaggctggtctcaaactcctgacctcaggtgatctgcctgcctcggcctcccaaagtgctgggattacaggcgtgagacaccacacccagccataactaagcattatgttttctaaaacttctaagatcctccctaaacccgtctggagacatgggttttagc

SEQ ID NO: 74411 - DNA, 757 bp, Homo sapiens
ggctggatcctgaataacatttctgaaacaattttatccgtcaacatgttatttttgtattttgtttgttcaacttatcagatgttcactcatcttgatccttggttgtaattatggagcaactgtgctgttttttctttaactttattttcactaacttattttctaatatttcttttgttctatcttgttttggtttactttaataactctgtaatacttaatttgactgcttggctcagataccttttagtgttcttgttttctaataggaacactttaaggctatgcattttcctctagtactattttggctgtatctcataagttttgggatatgggctttttattgttattcatttccaaatagtctaatttcaattaagtttcctcttcaacacaggttagttagaagaaactggtttttgattcatgagtttttaatttccaattagwgaatttggcttttttgattcctacttttgggaatgtttttaaaattattttcttttttgttcttgttggaaccaggatttgagccaaaggctctgtctccacagcccaggtgcctgacactgacactgagttaggccacaccttacacaggtctcagcttggccactaatgagggctggccaaccatcttcacctcgctgggcctcaggatgatcaagacaagggaattgtactagtctctcagattctttccagctgtaaaaaacaaaccaacaaaaaatctaaaaccaaaataactgag

SEQ ID NO: 74412 - DNA, 587 bp, Homo sapiens
ttttgtgaataactagagaggttgccaaagaaatgaaagaaaaaaacttcagctattaactcactgactgctaatgagaattgctggggaatgtgcttgcataaagtagacacgtggagtttgaggatgaccacaggatcagttctgtaattatggttgtacaaagttttgttggtgtgtgtgtgtgtrtatatatgtgtgtgtgtgtgtgtgtgtgtatatatatatgttgtctaaagtgatttacttctaatgtcattgtatgtctgtgctaaggagacataagatatatgtcctcaaaatagaaaccctgtgcatgtccctgatgccaaattatctaccttttgcttagttttgtttctgacttaaacaattttagagccatgttgaattggccacttttctatgtgaatctatcaaattttgtcatgagagtacattgtagggtgagagagggtggtagtgggaaaaaagggaaaaatgccaagaggaaagatgaggagaaagaagacaaaatgtcatggtttttgttgttgttgttgttgccacacctactaggttctgcccattgatttttttgtttgata

SEQ ID NO: 74413 - DNA, 587 bp, Homo sapiens
ttttgtgaataactagagaggttgccaaagaaatgaaagaaaaaaacttcagctattaactcactgactgctaatgagaattgctggggaatgtgcttgcataaagtagacacgtggagtttgaggatgaccacaggatcagttctgtaattatggttgtacaaagttttgttggtgtgtgtgtgtgtgtatrtatgtgtgtgtgtgtgtgtgtgtgtatatatatatgttgtctaaagtgatttacttctaatgtcattgtatgtctgtgctaaggagacataagatatatgtcctcaaaatagaaaccctgtgcatgtccctgatgccaaattatctaccttttgcttagttttgtttctgacttaaacaattttagagccatgttgaattggccacttttctatgtgaatctatcaaattttgtcatgagagtacattgtagggtgagagagggtggtagtgggaaaaaagggaaaaatgccaagaggaaagatgaggagaaagaagacaaaatgtcatggtttttgttgttgttgttgttgccacacctactaggttctgcccattgatttttttgtttgata

SEQ ID NO: 74414 - DNA, 587 bp, Homo sapiens
ttttgtgaataactagagaggttgccaaagaaatgaaagaaaaaaacttcagctattaactcactgactgctaatgagaattgctggggaatgtgcttgcataaagtagacacgtggagtttgaggatgaccacaggatcagttctgtaattatggttgtacaaagttttgttggtgtgtgtgtgtgtgtatatrtgtgtgtgtgtgtgtgtgtgtgtatatatatatgttgtctaaagtgatttacttctaatgtcattgtatgtctgtgctaaggagacataagatatatgtcctcaaaatagaaaccctgtgcatgtccctgatgccaaattatctaccttttgcttagttttgtttctgacttaaacaattttagagccatgttgaattggccacttttctatgtgaatctatcaaattttgtcatgagagtacattgtagggtgagagagggtggtagtgggaaaaaagggaaaaatgccaagaggaaagatgaggagaaagaagacaaaatgtcatggtttttgttgttgttgttgttgccacacctactaggttctgcccattgatttttttgtttgata

SEQ ID NO: 74415 - DNA, 587 bp, Homo sapiens
ttttgtgaataactagagaggttgccaaagaaatgaaagaaaaaaacttcagctattaactcactgactgctaatgagaattgctggggaatgtgcttgcataaagtagacacgtggagtttgaggatgaccacaggatcagttctgtaattatggttgtacaaagttttgttggtgtgtgtgtgtgtgtatatatgtgtgtgtgtgtgtgtgtgtrtatatatatatgttgtctaaagtgatttacttctaatgtcattgtatgtctgtgctaaggagacataagatatatgtcctcaaaatagaaaccctgtgcatgtccctgatgccaaattatctaccttttgcttagttttgtttctgacttaaacaattttagagccatgttgaattggccacttttctatgtgaatctatcaaattttgtcatgagagtacattgtagggtgagagagggtggtagtgggaaaaaagggaaaaatgccaagaggaaagatgaggagaaagaagacaaaatgtcatggtttttgttgttgttgttgttgccacacctactaggttctgcccattgatttttttgtttgata

SEQ ID NO: 74416 - DNA, 1102 bp, Homo sapiens
acacagttttcctctaaccctgctgtctccccctccttttttaagtctgtcttttcctggtagaaatacatttttccaggaatgttttatcttgaatactctgaccctacagagtaaagtaatttagcagaatttctcacagagggattaaaatggatattaaagtatccacagaggatgaaagtgagtataaagaggaatcaggcatgaaagttcaggaatggaaatagatgaatgatgtttctattttatcatccttgtaaataaaacgaatatgcttttggctttcatttactatacaaattgattgttacaggataaaagctgagaaaattgaattataatttttgagaatcagtgaatcagcagcatcttttaagaagttagtggaggtgttccagacgcttccgctgagtttactttccactaatctctagggtgtgtgcaggatccctgtgaaaakaacgaagtgtcagcattttagaaatttatatacgtatgctctttcacatccgggtggtccctgttaagatggaacactttatctttgagcccattggtcttctctttccataggacattctgctgaaatgtcccgtgtctgtctccctcttttctattacacactccttccccatcttcccttgctccaccctcccctcccccatgtctcaagtccagcatttctgacaaaagtgggaagggttgtatcatttcatccacatttgattgtgaagccatttgggttaaggtctgctactcaccagctatgactgtaacatccgatattagttaaatatttattgatacttccaaagggccagattccacccaaaacttttttgcattttcccactgaatcacgaagtagaattttattacattttatagacaaagaaacaggttaaaacgtggccaaggatttacagtaaccagtaaccagcagcaaccagcagaaatgcaactcagtttggggttagggtaacatgaaaactatattcacacactacaccacactactgtgggcaggttttaaaaactttgtcttttgcaaaccatcaccatgcatagaataacaattgggaaagtttcctttccctgc

SEQ ID NO: 74417 - DNA, 1102 bp, Homo sapiens
acacagttttcctctaaccctgctgtctccccctccttttttaagtctgtcttttcctggtagaaatacatttttccaggaatgttttatcttgaatactctgaccctacagagtaaagtaatttagcagaatttctcacagagggattaaaatggatattaaagtatccacagaggatgaaagtgagtataaagaggaatcaggcatgaaagttcaggaatggaaatagatgaatgatgtttctattttatcatccttgtaaataaaacgaatatgcttttggctttcatttactatacaaattgattgttacaggataaaagctgagaaaattgaattataatttttgagaatcagtgaatcagcagcatcttttaagaagttagtggaggtgttccagacgcttccgctgagtttactttccactaatctctagggtgtgtgcaggatccctgtgaaaataacgaagtgtcagcattttagaaatttatatacgtatgctctttcacatccgggtggtccctgttaagatggaacactttatctttgagcccattggtcttctctttccataggacattctgctgaaatgtcccgtgtctgtctccctcttttctattacacactccttccccatcttcccttgctccaccctcccctcccccatgtctcaagtccagcatttctgacaaaagtgggaagggttgtatcatttcatccacatttgattgtgaagccatttgggttaaggtctgctactcaccagctatgactgtaacatccratattagttaaatatttattgatacttccaaagggccagattccacccaaaacttttttgcattttcccactgaatcacgaagtagaattttattacattttatagacaaagaaacaggttaaaacgtggccaaggatttacagtaaccagtaaccagcagcaaccagcagaaatgcaactcagtttggggttagggtaacatgaaaactatattcacacactacaccacactactgtgggcaggttttaaaaactttgtcttttgcaaaccatcaccatgcatagaataacaattgggaaagtttcctttccctgc

SEQ ID NO: 74418 - DNA, 1102 bp, Homo sapiens
acacagttttcctctaaccctgctgtctccccctccttttttaagtctgtcttttcctggtagaaatacatttttccaggaatgttttatcttgaatactctgaccctacagagtaaagtaatttagcagaatttctcacagagggattaaaatggatattaaagtatccacagaggatgaaagtgagtataaagaggaatcaggcatgaaagttcaggaatggaaatagatgaatgatgtttctattttatcatccttgtaaataaaacgaatatgcttttggctttcatttactatacaaattgattgttacaggataaaagctgagaaaattgaattataatttttgagaatcagtgaatcagcagcatcttttaagaagttagtggaggtgttccagacgcttccgctgagtttactttccactaatctctagggtgtgtgcaggatccctgtgaaaataacgaagtgtcagcattttagaaatttatatacgtatgctctttcacatccgggtggtccctgttaagatggaacactttatctttgagcccattggtcttctctttccataggacattctgctgaaatgtcccgtgtctgtctccctcttttctattacacactccttccccatcttcccttgctccaccctcccctcccccatgtctcaagtccagcatttctgacaaaagtgggaagggttgtatcatttcatccacatttgattgtgaagccatttgggttaaggtctgctactcaccagctatgactgtaacatccgatattagttaaatwtttattgatacttccaaagggccagattccacccaaaacttttttgcattttcccactgaatcacgaagtagaattttattacattttatagacaaagaaacaggttaaaacgtggccaaggatttacagtaaccagtaaccagcagcaaccagcagaaatgcaactcagtttggggttagggtaacatgaaaactatattcacacactacaccacactactgtgggcaggttttaaaaactttgtcttttgcaaaccatcaccatgcatagaataacaattgggaaagtttcctttccctgc

SEQ ID NO: 74419 - DNA, 689 bp, Homo sapiens
ggacagagaaaagagatataagaattggaagagagggcaaggaaagatagtcagccttttaggcccataagaaattagatcatttttgtactaacttgtgaaataaagtaatagaccatgagaattgtattttcaaagcatttggtactaaatcccactgtaatcctcaagatatattccctcttttgccatttttctgctttgctggccttcacatgtttgtcacaaccattcacctaggaggatgagaaagtttatagccatcattcacttactaattcatgagctgtaacacacacacacacatacacacacacaattttagataaaatgtcgtatctttgtcacataaagtgtcatttctctatctcgacatttcaagtagtttgattagacggatttcacaccacttaaaatttaggaggagagaaatgtacagtatgtacaaattgttatttttaaaatccttctccattcagcacccaaatggcttcattttgcacttaaataatttcttggttttctttctgaatgtaatgattgagtctactttaaaaaatcccttgtgctaaggaagataaacaataagacaagtagaattgtttctttcccaaaamatttgaccatacctccttccctcccaaaggctgcaaagaaagatttttcttttcccaaaaacaatacagaaa

SEQ ID NO: 74420 - DNA, 702 bp, Homo sapiens
gtcttgaattccaggcctcaagcaattctcccacctcagcctcccaaaatgctatgattacaggtgtgagccaccatgcacggctatttttggattgtggcagtgtttacacagctatatacattttcaaaactcaaattatacattaaaagttggtcaatttcaccagacacagtggctcacacctgtaaatctcggcactttgggtggctgagggaggaggattacttgagcccggagtttgagactagcctggaaaacagagtgagatctcgtttctacaaaaaataaaaaattagctggtgtagcagcgtatgcctgtggtctcagctactcggggggcacaagtgggaagatcatttgagcccaaaaagttgaggttgcaacaagctatattcacaccaccatattccagtctgagcaacagagtgagamcccaacatgtgtgcgcgcgcacacacacacacacacacacacacaaaattaatacatttactattatgtaagtaatatctcaataatgctgattttcaataaatataagagggtaatgaacacacaagtcagaatagtggcttctttggataaagggaggcaaagaaactgaatgggaggaagtagcccatcagtagatatcaattattgttaatattctcaggttggttgtttcatttattatattactaaaacagacacaagaaa

SEQ ID NO: 74421 - DNA, 1036 bp, Homo sapiens
gcctctgcctccgcctccgcctcctcctcccctcccccgtgcgggcggacagaagcagccccgcgaaaagatggggctggggccgcgccccccaagaccaccacccctccaagaccaccaccgtacacaggcacgcaggggcgccagagagatgggaggaagagctaggagcccccggacccacggttccctgggagactgtgccttgggttcccagagttttaatgacacaaccaaaatgaagtccctaaartcacgtttttttcagtgagggattttcccaacctttctttttctcttttctttttaatttttatttattttagaaacaccatcttgctctgtctcccaggctggaatgcaggggtaccatcataactcactgtaggctcaacctcctggactaaagggatcccccccacctggcttcagtatccccagtagccagactacaggcctgcgccaccacgcctagctaatttatttgttgttgggggggggggttgtttgtttttgtttttgtttgttctcgctatgttgcccaggctggcctggaactcctggcctcaaaggagcctcctgtctcagcaaagcactaggattacatataagagccactgctcaggcaacttttgctttttttatcccaagaagacctgggacctccccctgaaccaagcttggaaatttctagcttgagcaggcccccagtgggctccaagcccaagatagaaccccaggtcagaaagaaatctgagtgagtttccacatcttttaagggtttggggggtggagtacacaggtaccaacttcacaggctgtaaaagacagaagcctctgtaaagggctcagtcctgtcctcctggctcagggagacccagggccagaggaggcaggggtacctgtgaagaagcaatgggaccttcccagccttggtgagggggttgtcaggagcagctgggcacagcagttaaaaacacagaactgggctgggtttggtggctgacacctgtaattccagcactttgggaggcca

SEQ ID NO: 74422 - DNA, 1036 bp, Homo sapiens
gcctctgcctccgcctccgcctcctcctcccctcccccgtgcgggcggacagaagcagccccgcgaaaagatggggctggggccgcgccccccaagaccaccacccctccaagaccaccaccgtacacaggcacgcaggggcgccagagagatgggaggaagagctaggagcccccggacccacggttccctgggagactgtgccttgggttcccagagttttaatgacacaaccaaaatgaagtccctaaagtcacgtttttttcagtgagggattttcccaacctttctttttctcttttmtttttaatttttatttattttagaaacaccatcttgctctgtctcccaggctggaatgcaggggtaccatcataactcactgtaggctcaacctcctggactaaagggatcccccccacctggcttcagtatccccagtagccagactacaggcctgcgccaccacgcctagctaatttatttgttgttgggggggggggttgtttgtttttgtttttgtttgttctcgctatgttgcccaggctggcctggaactcctggcctcaaaggagcctcctgtctcagcaaagcactaggattacatataagagccactgctcaggcaacttttgctttttttatcccaagaagacctgggacctccccctgaaccaagcttggaaatttctagcttgagcaggcccccagtgggctccaagcccaagatagaaccccaggtcagaaagaaatctgagtgagtttccacatcttttaagggtttggggggtggagtacacaggtaccaacttcacaggctgtaaaagacagaagcctctgtaaagggctcagtcctgtcctcctggctcagggagacccagggccagaggaggcaggggtacctgtgaagaagcaatgggaccttcccagccttggtgagggggttgtcaggagcagctgggcacagcagttaaaaacacagaactgggctgggtttggtggctgacacctgtaattccagcactttgggaggcca

SEQ ID NO: 74423 - DNA, 1504 bp, Homo sapiens
gagcaaagatgaattgctgcagggtaaacaaaacaatctaagttaggagttgaagctcwaagcaaagaggtatcagatttagccggggcacagtacggtggtatacatctgtaatcctagctacttaggaggctgaggtgggaggactgcttgcacccaggaattccaggccagagtgagcagcatagcaaaaccctgtctcaatttaaaaaaaaagaaaagaaaaaagcatcaggatatcatgtaaggacacggagccttacatgttctttctgagattgaaagccactaaaggctctaagcagaggagtagaagagtgacatatatgaattcaactttaaatgaatcattataggtgcccccttgtcaagaaggggttgtagaggacaagaaagaaagcaaggaggccagctaagaacttacaataatccaggcaacatgatggtgtcatggaccaggctggtagcagcggagataatgagaagcagggaaattctggaggttaatccaaaagaatctgctaatgtgagataccagtgaaggaggcatcaaggatacctccaagatttttagtcttcttaacaaatatctgagtatctactatggtccaggctctgtactacagttcacatctttccatttaattcaatcaattttttcaaagtaggggttatcagcccctatctaaaagagaagttcagagagactttaaaactagcctttaggccgggcatggtggctcacacctgtaatcccagcactgtgggaggccaaggcaggtggatcccttgaggtcaggagtttgagaccagactggccaacatggtgaaaccccgtctctactaacaatacaaaaattagctgggtgtggttgcgcctgcatgtaaatcccagctactggggacgcagaggtgagagaatcacttgaactcgggagatgaaggttgcagtcagcagcgatcgcgtcactgcactccagccttggggaaagagtgagaccccgtctctgaatgaatgaatgaatgaaagaaacttgcctttagtcaaataagggacaaaacaaattttaactaatccatgttctttttctctacaccatccccccaaccactctagccactgcttcttaatttcttggctggattcctatcctgtctacaccttaaatgttaatattccttatagtttttattttttaatttttttttttttttagagactgtctatgttgcccaggctggaatgcaatggctattcataggcgcaactgtgcacaatgcaacctcaaattcctgggctcaagcaatcctcctgcctccagtctcccagtagctgggactacaggcacccaccaccatgcccagcttccttagcttttggaggtcttctcactccatgctcattgaagccactatgacttcaagtagttttatttctcaagactagattctactccttacctcccagacataacatacaaatgtctactggacacgttaactt

SEQ ID NO: 74424 - DNA, 2287 bp, Homo sapiens
caaaactcattgatgtgaacacttcaagatctgtgcattttattatatagaaattctacatcaataaaggctaattccttttgctcaggagtactgagtctgaatcaggtcctaagtatttcagatgtaagtaaaagaacactttaggggttagaaacaacttttggattgataagtttacataacatttacttgatctgtgtattacataatggcattggagatagacagacctgtgatggaatcccaccccgtcatatgctgactgactctgtactactaacctcttgataccttttttcctcatctagataattaggctgaccagttcatagggttgtaatggattaaatgtaaggaataagtggtaaatgtattgaagagcaggtagataatgagcagccaaaaattacagatatcacttgttgtaccttatagctaaagtgagagggagaaagcaaaactataaattaatgaattagacttctttcaccacagttctgttgggaagactatgtaactgttagctcaatgaggggtttctctgaaaccttagcacgcatcagaatcaccaggagggattattaaaacaaatctgggccccacccatggagtttctgattcagtagggctgggctaggcctgagaatgtgcaggcctaacgctcccaggtgatgacagtgcttgttgggtccgggtactacacttggagaactgctggtttaatgagtcttaagtgcatctgactgttgaggagtgttagttaaacctagtatcctggtggtgagacccatctgtgtaaaatgcaaatacttctctgacagcccaacacattaattcttctgcctgccccacccccgcccaaaaaaactggatcctcttatctaaaccatcagtatcattaatataagtggaaccttcatccgtcgttccccaataaatctagtttggcctcgagctgtggttttggcactgattgttgggaggatcagatgtctgtagtgaaaaaccttagaagcaaatggaagaggaggattccaatgtgctctccctaaacatactaaacttttatcaaagacccatggaaccaaaccactcagctatgtcaagcagtattcctatatcacagccacctttctttctagtgttttcctagcagagaaggaatgctctcaggttcctcacccgcattctccgatctgttggcttttggttccccttgccaggtgattggcatgcactacttctctcccgtggacaagatgcagctgctggagattatcacgaccgagaaaacttccaaagacaccagtgcttcagctgtagcagttggtctcaagcaggggaaggtcatcattgtggttaaggtaaggggctgtataacagagctgcagagtttttgaaaagttctaataagactccttttacctccaggcttgtttataaatattctggggcaaatgaccagactttgatatgattttcccctgggttgtctccaggatggacggtggtattgactgtcccactgagtcaaggtgggagtggggagtatctaggatgtggcagggttctcccagccatcccagaccttgaaggtgaccatgaaactatctgctgtactgtttgattcaagccaggctacccctagtacggcttcccctgcaatttcatttttaaggattctgattgagattttaagtcaccttaagttttacagtgactttcaaatgactttgaagtgaccctgggaaaggtagagtgtttcagactcagtcccagcagcagggccagggagctcatgttctcttccttggcaggatggacctggcttctatactaccaggtgtcttgcgcccatgatgtctgaagtcatccgaatcctccaggttggtattgctctccagagtgtttgcggcatcttccactccttcagtcactctaaaactcatgatgtcaagataaggaccaagcttccttctgatacaccaactcctgctcttgtctaggaaggtccctggtgccctctctctgcacagcagtcggaagttgggcttatactgcactgaaaggggcagagctttccctctgccccacagcctcctcactgttccagcaagctaaaggcaccccaccccccagcatgtcttctatgctgtttctgcacctctctgaggcagggaccatccagaacagggcccgcttggttcaactggtgctgcatctgtttccrcagcacacagacctctccagtagccatcgaggtcattctggcaggaaaggagag

SEQ ID NO: 74425 - DNA, 811 bp, Homo sapiens
taaatgcctgtatgttttttttaaaatatctcctcagagattttcctagggaattataaaattacatatattttattgttagttagatgtttattcttggattcttaccattagaatttaagtgttatttaaaactctgatacagttacagacactttacattttattatgaggtgttgattttagtggtatttctcctcagcaaagcattcctaataatggctaatacaccatcaaatgaaaaactgctgatgagagtgtaagagaaagcgctaacgtttccactagatggcgcaatattttatttatccaaaactcctcccttgcatctgagtttttatgttatgtgtacagtctgcattagcttagaatggaatttcattctcaggtaaattttcgaatccatcaccagatctaagcattctgcttcaacaataccctctctattcctctcattcccattttaaatccataggtggcttgccctgcggcagtaaaatcttccccttgatattgattctttttctgctcattcatcttgatgttctttttctgcatcctgagatacatgtcgttaattttaataagaatcctattgacttcctcacgggagtctgttctcctatggttgataaagctttaaatactatttaaagtggttctggtctgtacttactagcacttccctgaacagtctcaaaatagcctaaacataagaaaacaatcctgcaaagtaaaggtttttacaagcagagatgaaggaaagggagcagcagctgaccatcagatrtggtatcaggtagctggaaga

SEQ ID NO: 74426 - DNA, 1965 bp, Homo sapiens
cataaaatgctctttttgggtgcatgcttttggagaatatttttggatagttctaaattatttatgtgagactttatgctacacagaactgctcaaatatgataatcaaatatggcaagtaaacttgttccctattctttctagggattataagttaatttctaaatattgatactttgcattgatcttgatattttacatgctacttccagatttttgttggcctgtctggtataaaaaacaaatttttcactctgatcaattgccattgtaatatttgtgtggagtatagatatcctgataaagattccttttgaaggctgatttttaattagacyattacatagcctttccaaaaaatgcctatttgtgagtgaaagtctggagaaatttataatgttgtgtattctttctgcacatatctgacagttttttctcacttttctccccacccagtgcattctcttttgaagtctgcatttaatagcatagctatagagaaggagaagctgaagcagatggtttccgagcaggatcacagtaaaggccacagcacgcagatggcacggctccgacagtcactgtctcaggtaggcaaagagtgtgtgtttgcatgtacatgacacactcccaaccctgtaagatgaaagatcaaaagatggggggctggcagggaggtggctagtcatggggatagtacagtttgcagaatttcccccaaaagactgcagtgtcagtattagattttactacttttcttccccaaaatttcaaggtaagagtgaaaataaaccaaacttgcttgtaagcgtataatggtaattttggccaattgaacacttaatgcttctctaaggtcatttataaggtagcccctcattttaaaaaaagaattatgcatttatttgacctatacatctgaaatgtgttccaggatatattcagtccaatagtgaatattttttaaaaatgtactagatcttccacacttaatatttttcccacttacatcttaatctgtttaaaattactgattactatcactcatttttttcttttctgatttgcactcttgaggttttcttcctaagttatgctccctgaactagacttttatatttcaatatatattatagagttgatcttattaatactaatcaaatccctatgtatctatatcaaagttgaaatttctgataaaaatcctttagagctgtgcttatgcttttttcaactgagtagttccttagaagtaagtattttctttagtctataaatgcactgacttaactcctttaagaattcaatgtcgttatgtgattttgtgagaactcggtgtctatataaaatattattcacttcctggtgccttggatcagagtgaaggagcaagcaaatcctgggtaagtggttctccgcgtggagcagatcctgcttgaacagtttccctcggtccctaaaaagtagacttacaccgtgtcaccgtgttttacgtccctgaactgtcggcgtattttcagtgttaagtttcatgtcatggatgttgttatatgggccacactttctgcattatccataaaacactgtcagctgaggggcatatgctgcttccagtataaagccaggggtctcaggagcatgagcgtgaaaatccgctacgattctgccagtcttcagagggctttatttagaagaacattttaatggctttccctggacccttctcatgtcatggatcggtcgaacactcagttgacgttaattggtcttccaaatcattattctgaaagtatcgtgaatcagaaagatcaaaatattggtcaagtaaacattcaaatgtcatcttgtaaacatataaaatacattcttgtccccctaagtgttgcaatgattccttcagatgtatttaatgatggaggcttagagttagaagtcaagctttactaagaaaaacaagaaaatgca

SEQ ID NO: 74427 - DNA, 1965 bp, Homo sapiens
cataaaatgctctttttgggtgcatgcttttggagaatatttttggatagttctaaattatttatgtgagactttatgctacacagaactgctcaaatatgataatcaaatatggcaagtaaacttgttccctattctttctagggattataagttaatttctaaatattgatactttgcattgatcttgatattttacatgctacttccagatttttgttggcctgtctggtataaaaaacaaatttttcactctgatcaattgccattgtaatatttgtgtggagtatagatatcctgataaagattccttttgaaggctgatttttaattagactattacatagcctttccaaaaaatgcctatttgtgagtgaaagtctggagaaatttataatgttgtgtattctttctgcacatatctgacagttttttctcacttttctccccacccagtgcattctcttttgaagtctgcatttaatagcatagctatagagaaggagaagctgaagcagatggtttccgagcaggatcacagtaaaggccacagcacgcagatggcacggctccgacagtcactgtctcaggtaggcaaagagtgtgtgtttgcatgtacatgacacactcccaaccctgtaagatgaaagatcaaaagatggggggctggcagggaggtggctagtcatggggatagtacagtttgcagaatttcccccaaaagactgcagtgtcagtattagattttactacttttcttccccaaaatttcaaggtaagagtgaaaataaaccaaacttgcttgtaagcgtataatggtaattttggccaattgaacacttaatgcttctctaaggtcatttataaggtagcccctcattttaaaaaaagaattatgcatttatttgacctatacatctgaaatgtgttccaggatatattcagtccaatagtgaatattttttaaaaatgtactagatcttccacacttaatatttttcccacttacatcttaatctgtttaaaattactgattactatcactcatttttttcttttctgatttgcactcttgaggttttcttcctaagttatgctccctgaactagacttttatatttcaatatatattatagagttgatcttattaatactaatcaaatccctatgtatctatatcaaagttgaaatttctgataaaaatcctttagagctgtgcttatgcttttttcaactgagtagttccttagaagtaagtattttctttagtctataaatgcactgacttaactcctttaagaattcaatgtcgttatgtgattttgtgagaactcrgtgtctatataaaatattattcacttcctggtgccttggatcagagtgaaggagcaagcaaatcctgggtaagtggttctccgcgtggagcagatcctgcttgaacagtttccctcggtccctaaaaagtagacttacaccgtgtcaccgtgttttacgtccctgaactgtcggcgtattttcagtgttaagtttcatgtcatggatgttgttatatgggccacactttctgcattatccataaaacactgtcagctgaggggcatatgctgcttccagtataaagccaggggtctcaggagcatgagcgtgaaaatccgctacgattctgccagtcttcagagggctttatttagaagaacattttaatggctttccctggacccttctcatgtcatggatcggtcgaacactcagttgacgttaattggtcttccaaatcattattctgaaagtatcgtgaatcagaaagatcaaaatattggtcaagtaaacattcaaatgtcatcttgtaaacatataaaatacattcttgtccccctaagtgttgcaatgattccttcagatgtatttaatgatggaggcttagagttagaagtcaagctttactaagaaaaacaagaaaatgca

SEQ ID NO: 74428 - DNA, 681 bp, Homo sapiens
cctctgttctgatgttttgttttttcttgttgttgtttgttttgttttaaattattggttttcatcaagtcatcatctttgttacctacatataagcaataaagttgttaagagttctttctctgtttttcccatatatgctttcaacaaatatggatttaggtgttacgatgttccagtatctatgttttgtgataacatgtttttttagaaacactcattggtttcattttaaagtagttgaaaatgtgatcagcattatctttacctgttttttgcaggtgtgccatgtttgaataagattaaccatgatgttggcagcagaggatgggggcacttcagtacaactgaagcagtcatacaccacttctgattactggggcgataacttgaacacttaagcaattgctagagcagatgtacgtttacaggcctctgctgttgtaaccactgctctggattccagtgatttgaraccagtctccctccctttgtaacctctctaaaggcaggcagtgtctcattggtcccagggctctcattgcctacgacggtgccaagcagagagaagatactttgtccatgtttgataaacacatgagggttcgatggctgtaatgagaggaaacccagcagttagagtttcctattcaaaagttccttccaattgccatatgtgtt

SEQ ID NO: 74429 - DNA, 1022 bp, Homo sapiens
ttttcacacataatagctacaactgcatatcatcttttgtctaaatgcgtaattatcctttatctaattacataaattatccaacatatactgatagttcatgttttttatatttctccctgtattacagaattcttagaaaagatgagagaaggccgggtgttgtggctcacacctgtaatcccagcacttcgagaggctgaggcgggcagatcatttgaggtcaggagtttgacaccagtctggccaacagggtgaaaccccatctctactaaacaaaaattagccagttgtggtggtgggcacctgtaatcccagctactcaggaggctgagacaggagtatcgcttgagtctgggaggcgtaggttgcagtaagcagagatcataccattgyactgcagtctaggcgacagagtgagattctgtctcaaaaaaaaaaaaaaaaaaaaaaggaaaagaaaaaaatgaaaaagaaaaagaaaaaaaaggatgagaaaaagggcaaaaatttccaatcctcttaaccagtttgttcccttttcatgataaccgacacctgcctaacaacctttttcacatgtattttccatgaagtacagatcttaaaggattctgaaaaacggatcttgtagagcaatgcagaaactaaaacatgtttttagagaggaaagcaacattagtgagggaaactgaccacaggttcccaaagccttagccagttctgcaactcaaactgtgcatcccgattgagctcacacacttacagagactgtgaaggaaaatacataacagaatcttaaaacggtaattcagtcaacaatgtccaacttcagaacattttatcattttgattattttgtagagtctgtaaggcaatgtaatacttgaaaaccacttacaggtctggtcagctcattttcaaagcaaggtgggaaaatatcttcatttgagacaaaacaaacttaaatgttaaatgaatggccaaggtggacaacaccacagaagttacaaggtcaccac

SEQ ID NO: 74430 - DNA, 1473 bp, Homo sapiens
ccgtcgttaagtgatgctaactatasttacgagtacattgtgatgagtcattatttacaggtcattttaaacccaaacagtgatttacagggactctatctcctagaacttttgaatttcctacagacagtcacaagaaaaacattaagatgaacttagagaacaagctgagtgctttctccttgcatttcataacaaaaggcaatgttcatagggggatttcagatagtgtgttgatttagggagaaaaatcacattgcttgaagaattcaaatcaaactataggttcaaatactctactacctaatcagagatttctatttacacccaaataggaacggtcaaacctgaattattattattatttatcataaacctaaagtcccggcttgagtaattcataggcacaaagtgtggcagctacagtcgcctatatgtcccgccagtcactaaaacaggcacagttcttcatccacacgccatttcctctctgcccttctttgtaccaaagatcactgtgtccaagaaaagcattctcaggaggcccgaaactgtgctgtgggcagaaaatcagctttctgaaaccctgaagctactacatgtttgctcttggttgaaactgtgctctgaaacctccccgtaaaagcttccactgggcctgggccctagagaaggtgataacatgtggaggactgaggcttcttcagatgaggggaaacagagtctgtgcaggtagacgacatctgcttctccctaaggcgctgggttctaactcactctcccttcagtttaacccagaatgagtcccaggagcgaagcccttgctccagtcatcttaacaccaagatgacagggggaagatcagaggtgggagagacagtcaggagccctgtccaagaagtgcccttggtagagggtcctgcagaccttggaccacccgggcatgacaccagtcagcgccccacaggcagctctaaaggcctgtgttctctcttgggatgggctgaaactcgttgcactgtcactttgcacacaggtccaagctttatgctacaaagcagcatgcagaccaagcctgcctcaagttcacgtgaaagtccctcagattcatgaatacatcaaccctgtctaggccattgcttcagggacactgagaacagatgaaaccagggggtagagattaaaagacaccaaattccaaccttcatcttcgtctctgagtctgtcacttaggcccagaaagttaaattctctgttgcccacaaacaaaatactgagtaccacttcctccccaggattaagatgagaaacgctttaagggaatccccgtaaagcacaaagcaaatccattttattttaagagagaaattcctagccgggtgagtccaggtttttgagcctcacggcgacaaaggcacatggcaattgctttctccacgtttctcctcccaccttgcagatgccaagcgtggg

SEQ ID NO: 74431 - DNA, 1473 bp, Homo sapiens
ccgtcgttaagtgatgctaactatacttacgagtacattgtgatgagtcattatttacaggtcattttaaacccaaacagtgatttacagggactctatctcctagaacttttgaatttcctacagacagtcacaagaaaaacattaagatgaacttagagaacaagctgagtgctttctccttgcatttcataacaaaaggcaatgttcatagggggatttcagatagtgtgttgatttagggagaaaaatcacattgcttgaagaattcaaatcaaactataggttcaaatactctactacctaatcagagatttctatttacacccaaataggaacggtcaaacctgaattattattattatttatcataaacctaaagtcccggcttgagtaattcrtaggcacaaagtgtggcagctacagtcgcctatatgtcccgccagtcactaaaacaggcacagttcttcatccacacgccatttcctctctgcccttctttgtaccaaagatcactgtgtccaagaaaagcattctcaggaggcccgaaactgtgctgtgggcagaaaatcagctttctgaaaccctgaagctactacatgtttgctcttggttgaaactgtgctctgaaacctccccgtaaaagcttccactgggcctgggccctagagaaggtgataacatgtggaggactgaggcttcttcagatgaggggaaacagagtctgtgcaggtagacgacatctgcttctccctaaggcgctgggttctaactcactctcccttcagtttaacccagaatgagtcccaggagcgaagcccttgctccagtcatcttaacaccaagatgacagggggaagatcagaggtgggagagacagtcaggagccctgtccaagaagtgcccttggtagagggtcctgcagaccttggaccacccgggcatgacaccagtcagcgccccacaggcagctctaaaggcctgtgttctctcttgggatgggctgaaactcgttgcactgtcactttgcacacaggtccaagctttatgctacaaagcagcatgcagaccaagcctgcctcaagttcacgtgaaagtccctcagattcatgaatacatcaaccctgtctaggccattgcttcagggacactgagaacagatgaaaccagggggtagagattaaaagacaccaaattccaaccttcatcttcgtctctgagtctgtcacttaggcccagaaagttaaattctctgttgcccacaaacaaaatactgagtaccacttcctccccaggattaagatgagaaacgctttaagggaatccccgtaaagcacaaagcaaatccattttattttaagagagaaattcctagccgggtgagtccaggtttttgagcctcacggcgacaaaggcacatggcaattgctttctccacgtttctcctcccaccttgcagatgccaagcgtggg

SEQ ID NO: 74432 - DNA, 1473 bp, Homo sapiens
ccgtcgttaagtgatgctaactatacttacgagtacattgtgatgagtcattatttacaggtcattttaaacccaaacagtgatttacagggactctatctcctagaacttttgaatttcctacagacagtcacaagaaaaacattaagatgaacttagagaacaagctgagtgctttctccttgcatttcataacaaaaggcaatgttcatagggggatttcagatagtgtgttgatttagggagaaaaatcacattgcttgaagaattcaaatcaaactataggttcaaatactctactacctaatcagagatttctatttacacccaaataggaacggtcaaacctgaattattattattatttatcataaacctaaagtcccggcttgagtaattcataggcacaaagtgtggcagctacagtcgcctatatgtcccgccagtcactaaarcaggcacagttcttcatccacacgccatttcctctctgcccttctttgtaccaaagatcactgtgtccaagaaaagcattctcaggaggcccgaaactgtgctgtgggcagaaaatcagctttctgaaaccctgaagctactacatgtttgctcttggttgaaactgtgctctgaaacctccccgtaaaagcttccactgggcctgggccctagagaaggtgataacatgtggaggactgaggcttcttcagatgaggggaaacagagtctgtgcaggtagacgacatctgcttctccctaaggcgctgggttctaactcactctcccttcagtttaacccagaatgagtcccaggagcgaagcccttgctccagtcatcttaacaccaagatgacagggggaagatcagaggtgggagagacagtcaggagccctgtccaagaagtgcccttggtagagggtcctgcagaccttggaccacccgggcatgacaccagtcagcgccccacaggcagctctaaaggcctgtgttctctcttgggatgggctgaaactcgttgcactgtcactttgcacacaggtccaagctttatgctacaaagcagcatgcagaccaagcctgcctcaagttcacgtgaaagtccctcagattcatgaatacatcaaccctgtctaggccattgcttcagggacactgagaacagatgaaaccagggggtagagattaaaagacaccaaattccaaccttcatcttcgtctctgagtctgtcacttaggcccagaaagttaaattctctgttgcccacaaacaaaatactgagtaccacttcctccccaggattaagatgagaaacgctttaagggaatccccgtaaagcacaaagcaaatccattttattttaagagagaaattcctagccgggtgagtccaggtttttgagcctcacggcgacaaaggcacatggcaattgctttctccacgtttctcctcccaccttgcagatgccaagcgtggg

SEQ ID NO: 74433 - DNA, 1473 bp, Homo sapiens
ccgtcgttaagtgatgctaactatacttacgagtacattgtgatgagtcattatttacaggtcattttaaacccaaacagtgatttacagggactctatctcctagaacttttgaatttcctacagacagtcacaagaaaaacattaagatgaacttagagaacaagctgagtgctttctccttgcatttcataacaaaaggcaatgttcatagggggatttcagatagtgtgttgatttagggagaaaaatcacattgcttgaagaattcaaatcaaactataggttcaaatactctactacctaatcagagatttctatttacacccaaataggaacggtcaaacctgaattattattattatttatcataaacctaaagtcccggcttgagtaattcataggcacaaagtgtggcagctacagtcgcctatatgtcccgccagtcactaaaacaggcacagttcttcatccacacgccatttcctctctgcccttctttgtaccaaagatcactgtgtccaagaaaagcattctcaggaggcccgaaactgtgctgtgggcagaaaatcagctttctgaaaccctgaagctactacatgtttgctcttggttgaaactgtgctctgaaacctccccgtaaaagcttccactgggcctgggccctagagaaggtgataacatgtggaggactgaggcttcttcagatgaggggaaacagagtctgtgcaggtagacgacatctgcttctccctaaggcgctgggttctaactcactctcccttcagtttaacccagaatgagtcccaggagcgaagcccttgctccagtcatcttaacaccaagatgacagggggaagatcagaggtgggagagacagtcaggagccctgtccaagaagtgcccttggtagagggtcctgcagaccttggaccacccgggcatgacaccagtcagcgccccacaggcagctctaaaggcctgtgttctctcttgggatgggctgaaactcgttgcactgtcactttgcacacaggtccaagctttatgctacaaagcagcatgcagaccaagcctgcctcaagttcacgtgaaagtccctcagattcatgaatacatcaaccctgtctaggccattgcttcagggacactgagaacagatgaaaccagggggtagagattaaaagacaccaaattccaaccttcatcttcgtctctgagyctgtcacttaggcccagaaagttaaattctctgttgcccacaaacaaaatactgagtaccacttcctccccaggattaagatgagaaacgctttaagggaatccccgtaaagcacaaagcaaatccattttattttaagagagaaattcctagccgggtgagtccaggtttttgagcctcacggcgacaaaggcacatggcaattgctttctccacgtttctcctcccaccttgcagatgccaagcgtggg

SEQ ID NO: 74434 - DNA, 852 bp, Homo sapiens
tatccatcgatcattagcccgatactgaacattactccaaaataattagtaggaacaaagatgtctgatgttaataaaacaagactctttttctccataagtataattcacatggctatagatttttaagttttacttttccaaaacagaaagccttgaagagactccaarccctattttaaaacaagaaaactgatgatgatgatgatactgatgatgatgatacagcaaataaagctaaaattaaaatgtatcttggaaaaatatgagaatcagctcatccctaactggtaaggagcattgacggtaagtatcacgtcaagagtgggcggcacctggagccacactggctgggcccagaccctggctctgccactcagtagctgtgtgactttgggcaattccttagcatctctgtgtctcactttctcatttgtgaattgagaataatagtaactattttatgcagttgtcatgaagatcaaattaggtcttagaacattgtcagatacacagtgtgttcaaacacggcaagccattttattataacaaatacatacaatactttagtaagtatccaaaatgagtacaggataaagaataactgataaaataaatattcaacacaaaatgttgaatttgggggttcagttgaatataaatcatcccgagcccattaatactgatagagatacaactccacataaccacgccatatattaaaatctctttcattaaacctaagcaagacaccatcaactacaggagttttaggaaccattaagaaaaaaaaatgttgtcatagattttattgactgcaagacatattctaatttctaacaagtcagaata

SEQ ID NO: 74435 - DNA, 1691 bp, Homo sapiens
tggtttcccaatctgtagaatggggatgactttataccacagcataaagccttcaactcgtgttcaccactgagacagacactgggtatttagactagagcttgggacccatatacaagggctgctagggcggagctcaggactgaagcactacttacgtgagaaggcgagaggccctggagcgttcacctggttgtgcctggtccctgaagcattcaggtttcgggtaaagccctgggcacagctctgcggccctcacattggggggtccctgatatggagggctggtagctcacgctgcatgtcactgcgagccagctaggaggctgttggaagatggccggagggagagaataagttggagaccgaggggacagccatggtctgaggaccactgctgaaggagatccaactactttgcagagtggaagaaggacccagcagccattttgtgccgtcgggacaggaggatggggtggccgtgctgccgcggtggccacaggttacatcctacctggcatctttctaagatgaagagctgcagtggaggaggggcccccacgtgggtgaaagttcctctcccctgcaggcctgggaggagggaggggaggaagctggagtgctgcccccttggctgtctggagctcatctgctctgcccccggtcggggaggtgaccagggagccgagggggccttgggctcaaacgcgaagtcccgttttgaacggtgccacttgcactccagatgtgaaactccagatgtgctccagacctcactttttcttactttaaagcaaatgtgtttagactgggactgtgtttgacctctcaaattccaggttttaggtttgctgcaaacctgtcctcaacgtggggctgttttcagatttgaaggtgagctatcttgacctggttcacaccttgtcttggtttgacatgagctgttctggctcctgaggcgtgacctgacccggaccccgttcgctgccctgtgaggccggcacgggccacctctggcagcgctcgtgcctggccatcaccctttgatttggtcccaccggccgccccatggctctagctgttcccccaccatgaatcacagcagccctcgcttcggatggctgccgtgagaagaaagtgaatcaacccagcccctttggctttgaatccactgctctgtctcctggctccaggcccctgtcctgcctcctggactggcttggggacctctttggctccctcagatctaccatggcctcccccaggggtcaaatgcgagttccacttttggaagaggccggtccagcccagctggacatcctgaaggggaatggagcatcccaggccaggcagcctctacagctgccagccctctcatggagcccagaatcttctcctgctcttccagccaagggggaggccccctgcttgggagctccygggggctgtggcttgatagcagcaatctcagaggtatctggtgttacttgggtgttgctgtgggaacctcaccactcatgggttaccctttacactggtgaccttttctttcgtgtctgagcaggatgacatctcaaatgtcaagaactttaattttcacttagcaacgtccctgtgaggtgatttccagccaacttggaagcggaaagttcaggcatttctgagtgggtcgaataataacaatttaaaaa

SEQ ID NO: 74436 - DNA, 1691 bp, Homo sapiens
tggtttcccaatctgtagaatggggatgactttataccacagcataaagccttcaactcgtgttcaccactgagacagacactgggtatttagactagagcttgggacccatatacaagggctgctagggcggagctcaggactgaagcactacttacgtgagaaggcgagaggccctggagcgttcacctggttgtgcctggtccctgaagcattcaggtttcgggtaaagccctgggcacagctctgcggccctcacattggggggtccctgatatggagggctggtagctcacgctgcatgtcactgcgagccagctaggaggctgttggaagatggccggagggagagaataagttggagaccgaggggacagccatggtctgaggaccactgctgaaggagatccaactactttgcagagtggaagaaggacccagcagccattttgtgccgtcgggacaggaggatggggtggccgtgctgccgcggtggccacaggttacatcctacctggcatctttctaagatgaagagctgcagtggaggaggggcccccacgtgggtgaaagttcctctcccctgcaggcctgggaggagggaggggaggaagctggagtgctgcccccttggctgtctggagctcatctgctctgcccccggtcggggaggtgaccagggagccgagggggccttgggctcaaacgcgaagtcccgttttgaacggtgccacttgcactccagatgtgaaactccagatgtgctccagacctcactttttcttactttaaagcaaatgtgtttagactgggactgtgtttgacctctcaaattccaggttttaggtttgctgcaaacctgtcctcaacgtggggctgttttcagatttgaaggtgagctatcttgacctggttcacaccttgtcttggtttgacatgagctgttctggctcctgaggcgtgacctgacccggaccccgttcgctgccctgtgaggccggcacgggccacctctggcagcgctcgtgcctggccatcaccctttgatttggtcccaccggccgccccatggctctagctgttcccccaccatgaatcacagcagccctcgcttcggatggctgccgtgagaagaaagtgaatcaacccagcccctttggctttgaatccactgctctgtctcctggctccaggcccctgtcctgcctcctggactggcttggggacctctttggctccctcagatctaccatggcctcccccaggggtcaaatgcgagttccacttttggaagaggccggtccagcccagctggacatcctgaaggggaatggagcatcccaggccaggcagcctctacagctgccagccctctcatggagcccagaatcttctcctgctcttccagccaagggggaggccccctgcttgggagctcctgggggctgtggcttgatagcagcaatctcagaggtatctggtgttacttgggtgttgctgtgggaacctcaccrctcatgggttaccctttacactggtgaccttttctttcgtgtctgagcaggatgacatctcaaatgtcaagaactttaattttcacttagcaacgtccctgtgaggtgatttccagccaacttggaagcggaaagttcaggcatttctgagtgggtcgaataataacaatttaaaaa

SEQ ID NO: 74437 - DNA, 872 bp, Homo sapiens
ttctctgttctcatatctgcatatttgtagcccagagtgagcagtgggagagccactggaaattgtttttttttcctccaagtttcaggtaattgtaaggttgcattttcctgtctccccaaaatactgaaagtattggttttgtgtggttaatttgctcttatggttgattttatggagagtcatttttagggtgggtgaaagaaaatgtttgattctatttgaaattaagcaacagccattgttctccaaacctggaacttcatcaaaagttattattattattattattattattattattgttttattttatttgagatggagtctcactctctcacccaggctggagtgcagtggcacgatctcagctgactgcaacttccacctcccaggctcaagcgattctcctgcctcagcctcccaagtagctgggactataggcatgtgccaccatgcccagctaatttttctgtatattgaatagagacggggattcaccatgttggctgtgttggtctcgaactcctgacctcaggtgatccacctagctcagccttccaaagttctgggattacagacatgagccacctygcttggccattactttcaatcttgagaatgaatcagtatggacttgaagtgggtagaactgtaatctcaaaaattatgaaatcctattggtcagatttgaaggtagtagatagaaaaagggaaatgaaaaagtgaaatgaaaaccgtattactattctttagggttttagattcctgcttagagatacaaagccaggtttaagaacaaaaaaagactaaagcacaaaaaaaattcagtgataaagtagatgaagctacataaattcattggttccttt

SEQ ID NO: 74438 - DNA, 872 bp, Homo sapiens
ttctctgttctcatatctgcatatttgtagcccagagtgagcagtgggagagccactggaaattgtttttttttcctccaagtttcaggtaattgtaaggttgcattttcctgtctccccaaaatactgaaagtattggttttgtgtggttaatttgctcttatggttgattttatggagagtcatttttagggtgggtgaaagaaaatgtttgattctatttgaaattaagcaacagccattgttctccaaacctggaacttcatcaaaagttattattattattattattattattattattgttttattttatttgagatggagtctcactctctcacccaggctggagtgcagtggcacgatctcagctgactgcaacttccacctcccaggctcaagcgattctcctgcctcagcctcccaagtagctgggactataggcatgtgccaccatgcccagctaatttttctgtatattgaatagagacggggattcaccatgttggctgtgttggtctcgaactcctgacctcaggtgatccacctagctcagccttccaaagttctgggattacagacatgagccaccttgcttggccattactttcaatcttgagaatgaatcagtrtggacttgaagtgggtagaactgtaatctcaaaaattatgaaatcctattggtcagatttgaaggtagtagatagaaaaagggaaatgaaaaagtgaaatgaaaaccgtattactattctttagggttttagattcctgcttagagatacaaagccaggtttaagaacaaaaaaagactaaagcacaaaaaaaattcagtgataaagtagatgaagctacataaattcattggttccttt

SEQ ID NO: 74439 - DNA, 872 bp, Homo sapiens
ttctctgttctcatatctgcatatttgtagcccagagtgagcagtgggagagccactggaaattgtttttttttcctccaagtttcaggtaattgtaaggttgcattttcctgtctccccaaaatactgaaagtattggttttgtgtggttaatttgctcttatggttgattttatggagagtcatttttagggtgggtgaaagaaaatgtttgattctatttgaaattaagcaacagccattgttctccaaacctggaacttcatcaaaagttattattattattattattattattattattgttttattttatttgagatggagtctcactctctcacccaggctggagtgcagtggcacgatctcagctgactgcaacttccacctcccaggctcaagcgattctcctgcctcagcctcccaagtagctgggactataggcatgtgccaccatgcccagctaatttttctgtatattgaatagagacggggattcaccatgttggctgtgttggtctcgaactcctgacctcaggtgatccacctagctcagccttccaaagttctgggattacagacatgagccaccttgcttggccattactttcaatcttgagaatgaatcagtatggacttgaagtgggtagaactgtaatctcaaaaattatgaaatcctattggtcagatttgaaggtagtagatagaaaaagggaaatgaaaaagtgaaatgaaaaccgtattactattctttagggttttagattcctgcttagagatacaaagccaggtttaagaacaaaaaaagactaaagcacaaaaaraattcagtgataaagtagatgaagctacataaattcattggttccttt

SEQ ID NO: 74440 - DNA, 1179 bp, Homo sapiens
tctcatttaatcctaacaactagtctcttgggtagacactagtctagtccctgtgttacagaagaggaatggaggctcagggagataacttcatcaaggccatttaatcaataagtgatagagtcaaggctcaacccaggtgtgacggattccaggtcccaagctccttactggtaccctctagtgaattacaataagctcttaatagatatcccaacatcttttttcccctccaaacttattcaaaatagcactacttctcatcttagtctcctgttcggtaatctgtcaaactgggctgcttacggtcttattgtactttagtactttctaatctctgagtaactgaagagagtatttcttttgcccatgtggctctgcatcttgaaatttattcaattctcaagtctctttttcaaatgctgtcatgttcttgaaggttttcttggttcctgacatactttgaatccctgtaacaatttatttgctcatttgatccacttatcactcttcttttctttatgggctagaagctccttgaagacaggacacatcttcagatgaagcttctagcttcatctctggaagttcatgttgcagagccttgactaagattcagtacatactggttgaatgaaaatgcagtaagaagaaaatggaaattattgtagggaaaagctgaaaaagaaactctgtcttagcaaggacttcatcataagacatgaactgtgttacttggagaatacataaaatatagcaaggtactttggattttgcataattatttaaattccagaacatatctcatgcacattagtttaggtakaaaaatcattttgaaattatctttcaatttctgctacttatccacaaataactgctataatattcatttttccttaagtatctcagttaattaagcatggaatcatttgaatcaaatagccaaagggaatgaaataatatatcatttaaatgaggttcatctaagatttcaaaccaaaattctataatttatgatgctaaataatttgacatttcaagatgtgaactttttacttaaaaataagaaagagttggaaccacatctcgcatgctaaggtagtcacagggacaggtaaccatgacagtgttggactacactaagctcagcaactgttaagtagggttccacatgca

SEQ ID NO: 74441 - DNA, 639 bp, Homo sapiens
ttggctttgcctccgacccacccctcagccgagtggtgatggtggtgatggtcccctccatcttctagggcgtgtgagagtttgtaggtgatgagatgcgagggaagcacctttgaaagcctccagcgcccgccgccgctacccgcggcctttccccgtcaccctcgtccagggctcccaccaggttcttgatctcctcggcgatgctccgactcaggtactgggaggcytttttcccactgtagtccctgatgtccacatcggcgtcgtaggcccccaccagcagcttcaccacctccacgtggccgtgcatggctgccaagtgcagggcggtgtaaccccgctcgtcctggcgtcgatgttcaccgggagctggtgtttgtttgggaagttgactagcatggccagaagctcctgcctgccgtgcttggcggcccagtgcaggcaagtgaagccgtcaatgaagtcccgcttgaccagcaggcgggctcgcaggtgagcataccctccaggctgtcccacttgccatcggaggcagagagcatccacgcgtgctccagggggtccagcgtcacggagcctccgccgctgctctcctcctccgcggacgacgaggccaccgatgcgctgtctgagtcg

SEQ ID NO: 74442 - DNA, 666 bp, Homo sapiens
ctcccacctcagcctcccagtaagctcgaccacaggcatgtgccaccatgcccagctaattttgtatttttactttttgtagagacaggatctcactatgttcaactacatttttaaagggccctgggtgctgtgtccctctgtctgatcttgaagaatgtttgtctatcaccgttatactcgaaggacagcttggcaaagtgcaaagttctcagaccaggctcacaggcaagttcttcctggtatactaacagcaccactttctgaatcgaatccgcagaggcagagggcaaacccttagcagagatggaaactatggcaactggccaggtgcggtggctcatgcttgtaatcccagcactttgggaggctgaggcaagtggatsgtctgaggtcaggagttggagaccagcctggccaacatagtgaaaccccgtctctactaaaagtacaaaaattagctgggtgtggtagcaggcgcctgtaatcccagctacttgggaggctgaggcaggagaatctcttgaacccaggaggcggaggttgcagtgagctgagatcccaccattgcactccagcctgggcaataagagtgaaactctgtctcaaaaaataagaaaaaagcaaaagacaaagaaaaaaagaaaccgtggcaacctcagttgt

SEQ ID NO: 74443 - DNA, 863 bp, Homo sapiens
ttttwaaacatcacttttaatgactccatggttttctattatatagatttaataaaaatttaagcaatgcaatattgtttcaaatatatgataatttataaatggcagttttccctgagctcaacatgaaagatatcaggtaccaaaatggattgtgaaatagatcattctttaagaattgcaagcagagtcaaaaagctgttaaatgctcttgaatccctcacccgcatcaaggataaatatggttgagaaattgctcatgggatggtttctttggacaaagctatgctctgggaacccaccccaaagggaagagatagaggtgcctctaactttacctcaagtggaaagaaaggggctccagtgggactacctggaaggcttcagttattttcctgaaataacccttacaaagtcttaaatccagagatgagttcactgaaagcataagcacagaagaaatggttgtgttgcaagcttagtatttcaagctgtgtcaagacaaaatgacagcatataggctgtgcccaaaagaggtaactggagtttacatcttgtccaagaggatcaaaggtaggggcactaagaccccggaaaagataatctagatggggtggactgatacgggaatggccaaacagacaaaaatgcaacacatcataaaaaaatacagattaatttcctcactagggccccctaggaactcatgaaggtactgaagagaaaatgtgaacttacacatctgccaggctcagatgtcaagtaatcttcacagtagtaccaatcaatttagaattttcttgcccctcatgttttctacactatggttctagatgaaattcaggaaaaaaggatcttttttt

SEQ ID NO: 74444 - DNA, 537 bp, Homo sapiens
gatagattttgtattgcttgggcgtgggaggtggcagcggaattgagaactggcaaaacgagcagctgtcagctggtaactctaatttgggtaagttctttcttagcacttgccaaatttgaaataccatctgcctcagggctatgtgtgctcccttgattagaagtgtgcggctactttagagctcatcctttcacttgcttgaggacagcagrttactttgttgggaaaccagtgaccatacaatgccctcatctcccaaacgtttgttgcacgctatggacttatctctattgactttcatctaaaattgcaaacttagatctctgctccttgttatccaatattctccaccctgcttatcttataccatttgggatttttttgtgacttaagaaacccaatgactttagccatagaatttttgttttgtttggggtattgtttgtgtaaataaaaatacagaagctaagctaattttatgtaatgattgatccactaccaagaacctagtatatctctacatctgctctgcct

SEQ ID NO: 74445 - DNA, 1309 bp, Homo sapiens
catctgtttctaatttatggataatagttagcatatagtagcctcagctcaatcccagtgtgactttattcaaatatgaaaagcacagaccacttagaattttgcttaaggtctggaaaactttttcaaccattagagtcaataaatcctcagtgtgattgattatttattattaggtcagaagtttaccttgtwtacctattgctgtgtccacagaacccgaagactcagttactatttcttccctacacacctcatatttgctgctttgtgcattatgatccccaggataaaagcagggacaatttatttagtttgggatttttaatttctcccatcaccggtttggcagagggctttgaaagagaacaacctcttagaatcgggaaaggagaattaatctataaaaattcaattaacctgtacaatgcttgttgagtcctcatggaacttaatcagagttttcttaacttattagccgcttcacctattttgcatcttgtagcctatgacgctggcactaaacaatcagaataatgctgacaggttaaacaaactaataaactaaatccaaggattagactcttccatcacttgcagaagacatccaaataaatctcacctgtgagttccaatagcaagactctgagagctggtgggctgtcaggacaggccatcacaccctgcctgactcaggaatccacaaagcaggttattgcctactccactcctgacttgctgtatccacttggggaaagctccagacgatactaaacctatgagttgaagcttggggaccccatttaatgaagtttatctcagacttagcattctcaataatgaaggagaatacttaatgatgataaattgttctaagctcttcaaatgaagagctaagagatctgaatggaattaggagctgtttggataagttattcagggattccaagctcagtgtcttctctaatcagataaaggctgaacagttaaaggctgtttagcaaccaactatgcatcagacacagatttgtggggaacatatttgaaagaaaagaaggtagatttagttttgaatatttagggcttgtgatgcctagagaatgttcaagtggaatgcccagcgggcagacagatttgcagctctggagagatttttgacttggggataagatttggggacatcagtgtctaagggggagttggacctttgggtataaaagagggattatgtatatagagaaaagaagagtgaattaaggaaagaacttaaggaatgtggaattgggaatttaattaaagaagagcagga

SEQ ID NO: 74446 - DNA, 802 bp, Homo sapiens
ctgcctcagcctcctgagtagctgggattataggcgcccgaccaccacacctggctaacttttgtatttttagtagagacggggttttgccattttggccaagctggtctcgaactcctggcctcaggttatccaccctccccggcctcccaaagtgctaggattacaggcgtgagccaccactcccggccagttcctccttcttgaaactctttactgttcttgattaaatgagcatctctttcttctgtttcctaatcacatgctgtgattatgcaactggctcttgatgaaatgggcatcgctttcttctgttttctaatcacatgctgtgattatgtaactgtttgtgtttctgcctcatttgtgagaatgtgaacaactctcacaaatgagggaccatgtcttaaagccacctctggtgaacactggtgccgagtgcataatcaacaagactttattaatcaataaatgacatagttattattcaagttgttattagcactggtacagcaacccatgtgagctgaaggtataacataaatgttaactcagtaaagtcacttctgmaaggggctgagataatatggcttaggtatttgacatgctgcttctataacttaccatggcaataacacttaaagtcacagaggaatcacttgctcattagacacactctctggaagaccagatgtctcaaggaagactttgataagtgctggactgcaattgattcatggctgaattctctgaggagcgtcacaatggtagataagctatatgttggggatgaaatagggat

SEQ ID NO: 74447 - DNA, 605 bp, Homo sapiens
gaatgtgatgaacctgactccgtcatgtagcatgcaaatcagtcactaacatcctcgacaatacataagccaggctcagcagagcactcccagattgtgaaaatttgggagaaaaaaggagtctctggggaaaaaaaataaaagactggaaaagtgattttcaaaactgtgtaaaaactaagcacataatgcaatgattataggagaaagcatgaggtcactaagaatgaattrtaatacactgattttttctttttttctttgttttttttgtttgtttgcttggtttttgaaacggagtctccctctgtcacccaggctggagtgcagtggcacgatctcggctctctgcaacctctgcctcccgggttcaagtgattctcctgcctcagcctcccgagtagccgggactataggcacgtgccaccaagcctggctaatttttttgtatttttagtagagacggggtttcaccatgttagccaggatggtctcgatctcctgacctcgtgatccacctgactcagcctccccaagtgctgggattacaggcatgagccatcacgcctggcctttctttctttcaatacactctttagcccaag

SEQ ID NO: 74448 - DNA, 523 bp, Homo sapiens
cattctactctgtgcttctatgagttcaactatttaagacataaaagtaaggttatacagtatatgtctttctgtgtctggattatttcacttagcatagagtcctctagcctcatccatgttgtcacaagtgggaggatttccttcttttttaatgataatattccattgtgtctgtgtgtatacacatattttctctacccattcttacactgttggaaatttaggttgtttccatatcacagttattgtgaataaagggcctataatatttatatgctctatactctttctccttcttccacatcttgttaaggwctaaccattccctctcgggctaatttgtaaaagaagcaattccaccaagcccttcttaaaattatataaaaacttcccagcctgtacgatgaggcctcaaattatacaacaatataagcttcctgagcatcttgggataaacgtgctttatagaattaagataccacttacttgattgtaatatatcttagggctacatagtcaa

SEQ ID NO: 74449 - DNA, 523 bp, Homo sapiens
cattctactctgtgcttctatgagttcaactatttaagacataaaagtaaggttatacagtatatgtctttctgtgtctggattatttcacttagcatagagtcctctagcctcatccatgttgtcacaagtgggaggatttccttcttttttaatgataatattccattgtgtctgtgtgtatacacatattttctctacccattcttacactgttggaaatttaggttgtttccatatcacagttattgtgaataaagggcctataatatttatatgctctatactctttctccttcttccacatcttgttaaggactaaccattccctctcrggctaatttgtaaaagaagcaattccaccaagcccttcttaaaattatataaaaacttcccagcctgtacgatgaggcctcaaattatacaacaatataagcttcctgagcatcttgggataaacgtgctttatagaattaagataccacttacttgattgtaatatatcttagggctacatagtcaa

SEQ ID NO: 74450 - DNA, 523 bp, Homo sapiens
cattctactctgtgcttctatgagttcaactatttaagacataaaagtaaggttatacagtatatgtctttctgtgtctggattatttcacttagcatagagtcctctagcctcatccatgttgtcacaagtgggaggatttccttcttttttaatgataatattccattgtgtctgtgtgtatacacatattttctctacccattcttacactgttggaaatttaggttgtttccatatcacagttattgtgaataaagggcctataatatttatatgctctatactctttctccttcttccacatcttgttaaggactaaccattccctctcgggctaatttgtaaaagaagcaattccaccaagcccttcttaaaattatataaaaacttcccagcctgtacgatgaggcctcaaattatacaacaatataagcttcctgagcatcttgsgataaacgtgctttatagaattaagataccacttacttgattgtaatatatcttagggctacatagtcaa

SEQ ID NO: 74451 - DNA, 724 bp, Homo sapiens
actccaaaattatgtacatctattatctatcaataaatttaaaaaacctccactttctattacagattataaactacaaaacaaataaatgatggaacagaaagagtgtgtgaccagaagtcagaagccctgggttctgggttggggtccacatagccatgtgatcataagcaagttacctcattttttaagcttcaatataatatttattattattaatatatatgattcgatatcatataatakgctctccctatcatatgtaaggttataatgagaaatgaatgaaataacatagggaatgattttggaaatgataaaacataaaagtaaaaagtactgtcatttctgtaaccatggggatatcaatattaattaaaatgcttattataaaacacaactgctaaagcggttacagaaaataaacaaggaaaaagaaacgtatatttctgtcttgagaaaatgcatgctgtcagttgttactcctgcaaatgacaggtgaaaacctttggtcaggagaaatgtgcaaagaattctgaaacacagtttaatgaaaactacaacacatttcttttgtcagaaccccatagcttcagcatagctaattctctgcttcattcttaagaaacattcttaaaagcttgaggctgtttgttagcaacagatgtagacatttataaacaaggaccatcttaacagaattatttctcacgaattaaataaa

SEQ ID NO: 74452 - DNA, 613 bp, Homo sapiens
tactgttgtcactatgcaatcattaatttcatctgactattcatgcctcagcataataaaccattaacaagtatgaagtctggctgttctgaatctggacagaagtcctctttatttacagctaagctataaatacggtgttttgttcatatatgtacgtaagacttctctatctaaattctactttttcttgagggcataaacggtgttactaggcacacaataaaagtgtttgtttcctgttgaaaatagcagctttcattactaatctacaaactgggcctggcatggtggttcaccagcacgttgggagactgaggtgtgaagatcacctgagcccaggagtttgagaccagcctgggcaacatggtaaaactccgtctaccacaattacaaaaattagccaggcrtggtgacacgcacctatagtcccagctacttgggaggctgaggtgtgaggatggtttgagcccaggaggtgtaggctgcagcgaggtgaggctgcaccactacactccagcctggggaacctgagcagaccctgtctcaattataataatcatcatcatcatctacaagtggattagattattttcaaagggaccaacagaga

SEQ ID NO: 74453 - DNA, 613 bp, Homo sapiens
tactgttgtcactatgcaatcattaatttcatctgactattcatgcctcagcataataaaccattaacaagtatgaagtctggctgttctgaatctggacagaagtcctctttatttacagctaagctataaatacggtgttttgttcatatatgtacgtaagacttctctatctaaattctactttttcttgagggcataaacggtgttactaggcacacaataaaagtgtttgtttcctgttgaaaatagcagctttcattactaatctacaaactgggcctggcatggtggttcaccagcacgttgggagactgaggtgtgaagatcacctgagcccaggagtttgagaccagcctgggcaacatggtaaaactccgtctaccacaattacaaaaattagccaggcgtggtgacacgcacctatagtcccagctacttgggaggctgaggtgtgaggatggtttgagcccaggaggtgtaggctgcagcgasgtgaggctgcaccactacactccagcctggggaacctgagcagaccctgtctcaattataataatcatcatcatcatctacaagtggattagattattttcaaagggaccaacagaga

SEQ ID NO: 74454 - DNA, 613 bp, Homo sapiens
tactgttgtcactatgcaatcattaatttcatctgactattcatgcctcagcataataaaccattaacaagtatgaagtctggctgttctgaatctggacagaagtcctctttatttacagctaagctataaatacggtgttttgttcatatatgtacgtaagacttctctatctaaattctactttttcttgagggcataaacggtgttactaggcacacaataaaagtgtttgtttcctgttgaaaatagcagctttcattactaatctacaaactgggcctggcatggtggttcaccagcacgttgggagactgaggtgtgaagatcacctgagcccaggagtttgagaccagcctgggcaacatggtaaaactccgtctaccacaattacaaaaattagccaggcgtggtgacacgcacctatagtcccagctacttgggaggctgaggtgtgaggatggtttgagcccaggaggtgtaggctgcagcgaggtgaggctgcaccactrcactccagcctggggaacctgagcagaccctgtctcaattataataatcatcatcatcatctacaagtggattagattattttcaaagggaccaacagaga

SEQ ID NO: 74455 - DNA, 705 bp, Homo sapiens
accagcctcagcctctcaaagtggtggaattacaggtgtgagccaccatgcctggcttgctgtgacaatttatatagtaaatgataccatttcattgctatcaaacaccatggccaaaagtaaattttggataaataaaagacttgtaaaatatgcaaagctagctggtaggaaagtgtcatgaccaataaacattgaaatttctctttcagaraaatgcacattgtaagtcaaaacatcactgggttagcaccccatgcccatttatttgggaaaactttagaagtctgaaaacatcagtaggcaaggatatgtagaaatggaaattctacattgtcagtgggagttttaatttctgtttcccagtaaacttgaagccaaaacacagcctgtgacccagcaatcccacttacatgtttcagtcctagaaaatcactaacatatgcgaaacgtggctcatataaagatttactctttagcactgtttctaaaaatgagaaagtcaaacaatttcaaggcccctcaggaggacaaatgaataaactgatttcttcaaacagtgaaataatatccagcagttaaaatgaagtcgatctgtgtgtgtgaacttggcggatgtgaaaaacaacataaaaaaatctaacatgtatggaaataacacacgccaaatttggatacctctgatgggggggagtcttcagttat

SEQ ID NO: 74456 - DNA, 625 bp, Homo sapiens
ctttttcccagctcttagctccacttctctggcttcatgccagtctcagatggctcttctgttggggaacaagttggccaccccagctccagcctcacaccctcccgtgtttgaatccaaagagcstgcttctctcagtagcctcagcatgaccctcatgctgtctccttggctctggttgggtcatttactcctctctgaacaaatcctgcctccagggaaatgatgtcctttggctggccaggccttagccacatgccccaacaaagcacagtgcgggaggaggcggggtgaattcccctggagcaaaatcacagtggctgccagaaaaagggcagtggccattggaggtatgcacggtgacctgcttcccagtcctccctagtggtcctaaactgcgctttcctccattccagaagccaaggccagaggcgaagtagggttctgtgtctcccttccctgagccacaggctcctgctcctctggtcctcagctgagctcctgcaggacactgtcctgtttctaaccggaattcacttctctaaggggctctgccatgcatgatgggtagccttttactatacatgggaatgtatctctctgcctggccctgtctctgtgctct

SEQ ID NO: 74457 - DNA, 625 bp, Homo sapiens
ctttttcccagctcttagctccacttctctggcttcatgccagtctcagatggctcttctgttggggaacaagttggccaccccagctccagcctcacaccctcccgtgtttgaatccaaagagcctgcttctctcagtagcctcagcatgaccctcatgctgtctccttggctctggttgggtcatttactcctctcygaacaaatcctgcctccagggaaatgatgtcctttggctggccaggccttagccacatgccccaacaaagcacagtgcgggaggaggcggggtgaattcccctggagcaaaatcacagtggctgccagaaaaagggcagtggccattggaggtatgcacggtgacctgcttcccagtcctccctagtggtcctaaactgcgctttcctccattccagaagccaaggccagaggcgaagtagggttctgtgtctcccttccctgagccacaggctcctgctcctctggtcctcagctgagctcctgcaggacactgtcctgtttctaaccggaattcacttctctaaggggctctgccatgcatgatgggtagccttttactatacatgggaatgtatctctctgcctggccctgtctctgtgctct

SEQ ID NO: 74458 - DNA, 397 bp, Homo sapiens
ggggcaaaaaaaaactcagaaattaaaaaaaaaaaaaaacccaaaaaaaaaaaaaaatgaaggacttggcagcagtccaaacccctggaggtgggggcaaaataaggattggatgaatctgtctaaccactcaaatcccagatccttttccctacactgcrcagttgggcaacagccctctctcatttgttcattctctagaaaaggtagcccagtctctgggatggcaggggtgtgttacactgaaagcagaggcccaaccctcaccctgctgggttctagaatgctggtagacggtctatcacccttcaggcacgatacaaattgattgagaatcagctaagaccttgacataatggcataaaaattccctaaccaatcatatgtcatacaaagt

SEQ ID NO: 74459 - DNA, 703 bp, Homo sapiens
aggagtccagggcagccactgggtggtctggatacagagatggggggatgccaagttgcttatcactaccccactcctctttcctgagctccagatgtgacatttgctgtctactggggatctccaccaaccactctcagaagaactgaaagcacaattcattccacttttattcattgtctttatcacttgcgcccagactgatctcctgcctttatcccacagaagagggtttctcagcctctgcactattgacattgtaggcttgataactcttcattctaggggactgtcctgtgatttatgggatatttaccagcctctacttcatccctggtctctacccatgagatgccagtaaaccctcaaccacctgagtkgcaatcatcaaaaatatctccaggtgtggtcaaatgtcccctgggagggaaatcacctggtttgggtaccattgccacagaggaatctcctggtaactgatccaaaatatgagcagcaacctatactcaccctccttcttcaacccccatccaattgggcctgtttatcctgcagtgcctcttcttctcacccttcttaaatctatctcaacctctccagttccagtattgaggctctagttcagggctttgctgtccagctggactatcagaacagttccctaataattccctctgctgttagtcttgctagcatcagatcc

SEQ ID NO: 74460 - DNA, 703 bp, Homo sapiens
aggagtccagggcagccactgggtggtctggatacagagatggggggatgccaagttgcttatcactaccccactcctctttcctgagctccagatgtgacatttgctgtctactggggatctccaccaaccactctcagaagaactgaaagcacaattcattccacttttattcattgtctttatcacttgcgcccagactgatctcctgcctttatcccacagaagagggtttctcagcctctgcactattgacattgtaggcttgataactcttcattctaggggactgtcctgtgatttatgggatatttaccagcctctacttcatccctggtctctacccatgagatgccagtaaaccctcaaccacctgagtggcaatcatcaaaaatatctccaggtgtggtcaaatgtcccctgggagggaaatcacctggtttgggtaccattgccacagaggaatctcctggtaactgatccaaaatatgagcagcaacctatactcaccctccttcttcaacccccatccaattgggcctgtttatcctgcagtgcctcttcttctcacccttcttaaatctatctcaacctctccagytccagtattgaggctctagttcagggctttgctgtccagctggactatcagaacagttccctaataattccctctgctgttagtcttgctagcatcagatcc

SEQ ID NO: 74461 - DNA, 795 bp, Homo sapiens
acattctcttcccctgttgctgtggcggaggagaagtgtgtttcacgtgaaacaatttcaagattatggggatctctgtcagtcacgttccctgaaggactacatggaagagatctctgcctttgaacctgtgaaaaacatakaagggataagaaataaacttttgctgagtcctgatatttgggggttgatttttttttttttaggagtttaggagtttaggagtggaggtttaatagggaaaagaaaaagaaagaaagagaaaggaaaacagctctctctttaatctgggggttgatttttactgcagaatatcttatcctcactaatacatagactgtatgaggctactcttcctttccttgccttcccttcctcccttccattctttctccctcccttcttcccttcctcccttaatttttcttattttctttatgtttttcttttaaattgaagaaaagaagcccaagctcactgtttgaaattattaaaagtcttgataattggaagaagaaaacctttggcatcaactcacccaatccccaacctcaacctctattttaaagtttcagacgtggactcccagacaaggacagaatgtcaaaacattaatgccagggttttgggtcttgaatttcattatctttccattccaccatgttacagcaaagataataagttatatgatgtttttttctttttctctttttaaaagcagaataaattatacttatttatatagaaacaaagacccaatggggtaagaagaagtttgaatttttagcactagga

SEQ ID NO: 74462 - DNA, 770 bp, Homo sapiens
tgcattcatctttgcttaactctggtgttctctgctggtttgatcacataattaactcttcccccatcccctctcctatttaatgcctgctgcaacattcttagtccttggcaggcacagtttaggaaaagctggactgtgtgaccatggcagcctyttctaattctactatcagcacctggtcattaacggattcaagctttggtgagctagagccatcctaaggcattcgcggaatctctggctgcccccttccagctcccagtctgctgcctttacaatgcgggagttaacgaccactgttacccctgctgctcctcttccatgaggatttagtgtctcatacccttctgtttatgacatgaactatccttctgatggttagggcgcccctgtccacccagttcaccctgcaagccactccaagtgtcctttaaaaggatgtgtataacaagaatggatatcggactcgtgtgttcaatgtaatttagttgtctctggggatcaaagagcaagaccacgtacttgtagctgatataggaataacagcccttcatcctagaaaatgcccaccctgaaataggaaaaaaggactctgtggtgagttgaattgtggcctcagaaaatataaatatgtccaagtcttgacccttggtacctgtgaatgtgaccttatttggaaatagagtctttgcagatgtaagtaagttaaggctcttgcgatgagatcatcctttatttagggtaggccctaaatccaataactgttg

SEQ ID NO: 74463 - DNA, 900 bp, Homo sapiens
tgcatcgaagctggggaccaaatggatctttaaataaatgaaactataaaatgtggatgaacatgtcttaattaagtaaattaacaaataaccattgcacccctgtttgaggtgctccaacaatatagacagcaatatccagttgagtgtagccattccaatagaatataaccagcggataataactcatggcatcacaacaggaatctttcaatttgcacttgcaggatggtagtgaggttctttattctataggcaagaacacaagacttacaacaggtgcagctcattataggaagtcttgggccactgcccatatttatttctgtgggttggatggccccaccttagactaaggctcctaggcatctggaatttgcctctacttcccagcaggcctccacatgctatctcctttaagatgtctcattctgttcatgatccaatttattttgtctggtttcaatgcttgtctctttcagggtgccactttaagaatatttacattctcaattataatgtgcagaaatccccgtggttttccaatcctgactacattccccaacattaactgcttctttacaggtaagagtgagtctgcagttgtcccagtggccaatacaatgcctcctcttctctcgtctgcccttccaccaagcctctggcactctcaggcactcttttctaaggaatcagtgacaagataggaagcaataaggtcaggttagagtagctgctgcaaatgatcaaacatgataaggacaatgaggtgaactgtggttgcttttctcatcctgctcttctgacacctcccactctgcacaccaatccactatggaaaccaataagccttctttcagacccatggcaaacatgctstaacagaaagcacagctacag

SEQ ID NO: 74464 - DNA, 1117 bp, Homo sapiens
attctgagatgaacaattgctgaattcttttcacttaacatgggagctaaacattgggtactcctggacataaaaatggcaacaatagacactgaggactgctagagggggaagggagaaaggggggcaagggttgaaaaactgtttggcactgtggtcagtacctgggtaactggatcatttgtaccccaaacctcagcatcatgcaatatgcccaggtaacaaacttgcatgtgtacccctgaatctaaagtgaaagttgaaaaagaaagaaaacccaaatgtgcagcaaatttttttaaaaaagcaaaataacaatgcaacaataaaaaataacataaatttwaaaaatagtaatggatactttacacattgatagattctgtcagtttgtctcccttcctccctcctcacaagaaaggttggtccaggatctgttcccactaatgatgcattcaagtccctgatatttcctttttttttttttttttttttgtaagttgggcactatctttgattacatgaaaccaaggcttctaaagttcaccaaagacttcaactttctctctaggagacactttttgagtccatgtcattcttccttggccaagagtcagactggtctggtagatgccccatgagacagagcacccaagacatccatctgaccacctggaggatttagggacattcctgttacaggaatggtcagtgctggatcaaaagcctaagagcagtccttaattttgtactcttgggctcctggaaggcagcacaaatactcttcacctaataggctgtgtaataatgatgacagcaaatacctactgcgtgtctactatgtgccaggcagtatacatatttcatccaacttcatcctcaccgcaaacctgaaatgacaatattatcctattcattttacagatgggggctctaagactcagagagatgaagagactttcccacaaaactactacgcggcagttccaggatttgtatccgttgtcgaaccccaaagtccaggttcctttcacgatccagggctctgtcaacagcggtaccttcagctcaggctttcattgggtcataatgggctactatagttctccgatggggg

SEQ ID NO: 74465 - DNA, 2235 bp, Homo sapiens
aagtcagataagggggtgcagtgatgttgaggtggggagaaagaaccattttaaaaacaatgattctagaggcctttctaaggaggtggcatttaagtagtgttcttgatgaggtgtaggaattgtatgtggagaaaagtgtacagataaagagacacaacaggtataaaaccccggggagagaaacagcttgacctgcttgaggaataaggctcacgtggttggaagtcaagtgagaggggaaggtgagaaggaagtctagagaggagtccaaggtaacatgtggtaagaccttgtaggtcgtaggaaggagtttggatttcactccatgtgtgatgagaagcagcctgtagggagctttaagcagggggatggtwggatctaatttcctgttttaagagattattctggttgctgtgtggagagtggtgtgtatgggagaagactgggtccttttgattcagtgttcattttatatgttaaaggaacaaacattcatattttataaaattagataagttaccagatcatatggatactgaattattttctgtcctgtagaatcgtgaaatacttcaaaaaattttctcatctgaatttaacttttgcaaatttagctatgaatagatcagaccaaaccatgcatttgatatagtcagaatgtagcaaactgatcatttattgctttagtgatttgagtgtttttttttttctcctgcagagacctatttgtattctgttgatttgagaagtttgtcatctttgtctaggtccactctagaaaccatcatatgtttttagttatgaaagccaccactctaggtaacaatgataatagtcattcgtaacacagtgttgctgcgtgccaggcacaattctaagcattttgactaaattaatttttgcaacagtcctctgagtttgatattattatagtctccatctcctcatgaggaacctgaggctcagagaggttgagaaacctgtccaagaatgtgtaactagccaggattgaaccctggcgggctaggtcagttttctatactgcccttccatatgaagaggaacaccactggccaaaccacagatgccaaactgcaggtcccatcacaaggttgtttcagaaatgtctttaccatgctcagactgcagtcagggtcctgctcctttactgggacttcagtctagccttgccgctccatggtttggaatagaagctgctttagctaccacatctacttccacctctctcccctgctatggcactacagcttccagccctgttcatagatctaaatacaagctaatttcctcttgccctcagcacagacaagctctgatccaggctgcttggaagggaggaggagaggtctggcctggctttgcgatgctggctcgcatgctctgggacagagacgagggacaggaaggtcccttcatgggactgctgagatgccagtggaagggatcctggtccctggtttgggtggttctatcaagttccgtctgatgctcgtggcctctactgtcatggtgatcattatggggttttcagcttcatgctggtctctgctgtcactgacgggcccctctcgagggcatccagtgttcttttgagttgcactcattgaacccccttctcaggttttaaaaaatcaatgtacacaattcattcaaagtgtacctgtaggtggctgaatatgacaaatcattatttcacgtattatttgcttagttactgtttcaagacaacaattactagtgtagtggcaattctttgtgtaattggctatgcacacacttggcccagtgctacccagggaagctccaaggctcctgacatgcccctcccaactcctgagctgtcgtgtgaaattgagggaactgcccctctgtactctctgaggggacagagaatgggggtgggatgggactatttccaatcaacagcgagatgcattgaaagcatctcttggtgcttctcttgtgtgtctctgctgagggagtaacctttcaccccaagcccatacaccccacagggtttgccttgcctttccctgtcctcttgtaacaaaggatgggctggaagttgtgggtggtcgttagtggtagagccaggtctgtcccagggcctcacagaatgctgtggagggatagttggttgtaacagctgaacatttttttagcacctgagatgcttgttgattttagtattcagctttgtgccttatttac

SEQ ID NO: 74466 - DNA, 754 bp, Homo sapiens
ccacagggtgcccagatatttggctaaacatttctgagtgtgtctctgagggtgtttctggatgagattaacattggaattggtagactgactacagtacatttcccctaacgtagctgggcatgatccaatccatcgaggcccagaaaataacagaaaggcagaagaagactttcctttctctagtggattgcttgagctgcaatattgggggacttaccatcagcacyctggttctcaggcttttgacttggactggaacatccctgactttcctgaatttccagcttgcatatggaagatcagggaattttcagcatccataattgtgagagccagttccttataataaatctgtgtgtgtgtgtgtgtgtatgtgtgtgtgtgtgtgtgtgtagtctcctattgtttctctggagaacactaatatgtcattccagtggggagttagctaggaaagtgatgagacctcttgtgtttcaaatcgtatagcttgccagtatagaactgtgaacaaagtcatttttttctcaaatctgtaggccaaaagaatgatatctggagtttgatacaactttaagagatcatctagggcaactttatcttcttatgaatgaagaagcaggtccagaggtcttgctaacattttaaagctagctggtgacagaatcaagtacaaacggtccctgacatgatggtcttatgatggttcaacttatgagttttccactttaccgctgtgcaaaggtgatac

SEQ ID NO: 74467 - DNA, 754 bp, Homo sapiens
ccacagggtgcccagatatttggctaaacatttctgagtgtgtctctgagggtgtttctggatgagattaacattggaattggtagactgactacagtacatttcccctaacgtagctgggcatgatccaatccatcgaggcccagaaaataacagaaaggcagaagaagactttcctttctctagtggattgcttgagctgcaatattgggggacttaccatcagcaccctggttctcaggcttttgacttggactggaacatccctgactttcctgaatttccagcttgcatatggaagatcagggaattttcagcatccataattgtgagagccagttccttataataaatctgtgtgtgtgtgtgtgtgtatgtgtgtgtgtgtgtgtgtgtagtctcctattgtttctctggagaacactaatatgtcattccagtggggagttagctaggaaagtgatgagacctcttgtgtttcaaatcgtatagcttgccagtrtagaactgtgaacaaagtcatttttttctcaaatctgtaggccaaaagaatgatatctggagtttgatacaactttaagagatcatctagggcaactttatcttcttatgaatgaagaagcaggtccagaggtcttgctaacattttaaagctagctggtgacagaatcaagtacaaacggtccctgacatgatggtcttatgatggttcaacttatgagttttccactttaccgctgtgcaaaggtgatac

SEQ ID NO: 74468 - DNA, 1243 bp, Homo sapiens
ctgcaaaacctttcagaattcagggatgcagtcaatctcaggaaggatatatcctcatgtttcatttatttatctattcaatgcatatttaatatcatttttattacaaggtcttacctaggttctgaaggcagataaatttataagccataacctttctcctggtagcccagccatgttaaaaaacaaaacaaaacaaaaaacactgtagttcagtgtactggtgtttactagggcagtaaagggaaaggttgtctaatgaactctgcctggggtggagtytgggggtcaagaaacggctcagagttggtggtggtacatagggtggtttgtctataacccttttctagcttcctttgaccttcaaggactttcaaattttgtttttggctagctttgcctaaaaccccagtgctaactatatgtacactgtgtagacatctgagacccaaaatgggacaagctttagactaaagggacatcggataacagtcacaccatcatcctttgcatcaggttggccccaggaatgcctccccataagaggagaaagttaacaaggcagggaacttcgacccagcccccagggcaattcaggttctcgggtggtgagcattacatacggcccacaggctataaaccaccttaacaggcataatgactttcatgcctccacctgaaggggctcattgcaataaggtaacagctcttgcagatgcctctaactttaactatgggaacacttgctttatagcaccacctgaatgatctatatcctgttctcgtcaatggcaatttcaggagtgatttggcttatgtcttttgtgcatgtgtgtctactcagcgccctgaaaacttgtggcattgagaacatgtgaagaagtgtgtgtcacagctgcagagctggagatagagatgggtcctgagctagctgtcattaagagataactctcaggagttcacactagtcagaaggacaggactaatctctattctgcatttattcaccaattcattcattcattcacaaacacttcctgagtcctccatttacaagcacaatactgcatcagtaccatggcttcatgtcagtcaggtttccttctgagatctgttgtcaaaggaatacactcaggcaagctgtgtctttactaggctgtggggcaaattctttcacagaatgatgagtggagctaatgagaccctgaatatatggtgagttaaatgtttggggacatttcct

SEQ ID NO: 74469 - DNA, 1243 bp, Homo sapiens
ctgcaaaacctttcagaattcagggatgcagtcaatctcaggaaggatatatcctcatgtttcatttatttatctattcaatgcatatttaatatcatttttattacaaggtcttacctaggttctgaaggcagataaatttataagccataacctttctcctggtagcccagccatgttaaaaaacaaaacaaaacaaaaaacactgtagttcagtgtactggtgtttactagggcagtaaagggaaaggttgtctaatgaactctgcctggggtggagtttgggggtcaagaaacggctcagagttggtggtggtacatagggtggtttgtctataacccttttctagcttcctttgaccttcaaggactttcaaattttgtttttggctagctttgcctaaaaccccagtgctaactatatgtacactgtgtagacatctgagacccaaaatgggacaagctttagactaaagggacatcggataacagtcacaccatcatcctttgcatcaggttggccccaggaatgcctccccataagaggagaaagttaacaaggcagggaacttcgacccagcccccagggcaattcaggttctcgggtggtgagcattacatacggcccacaggctataaaccaccttaacaggcataatgactttcatgcctccacctgaaggggctcattgcaataaggtaacagctcttgcagatgcctctaactttaactatgggaacacttgctttatagcaccacctgaatgatctatakcctgttctcgtcaatggcaatttcaggagtgatttggcttatgtcttttgtgcatgtgtgtctactcagcgccctgaaaacttgtggcattgagaacatgtgaagaagtgtgtgtcacagctgcagagctggagatagagatgggtcctgagctagctgtcattaagagataactctcaggagttcacactagtcagaaggacaggactaatctctattctgcatttattcaccaattcattcattcattcacaaacacttcctgagtcctccatttacaagcacaatactgcatcagtaccatggcttcatgtcagtcaggtttccttctgagatctgttgtcaaaggaatacactcaggcaagctgtgtctttactaggctgtggggcaaattctttcacagaatgatgagtggagctaatgagaccctgaatatatggtgagttaaatgtttggggacatttcct

SEQ ID NO: 74470 - DNA, 656 bp, Homo sapiens
aattttttttttttttttgtaaagacgaggtcttcctatgctgcccagtctgatcttgaactcctcaagtgatccttccgctttggcgtcccaaagtactgggattataggcatgagccacctcaaccagcctaggactacatatgttgagtagccaggtgggagactacagattgccatgatgaaaagctgggaggtgtgggctgtcggtaaagctcttctgacactcaccacctgtgyaaacttggccaaattgcttcatcttgaacctcaactttctttgacataaaccagaggtctctttgggcagctggtgccctgcacaactccccgacgggcacaccaatatgggctacaggtgaatggcatcctctagagttgtgtggtacacaacctcaccaaatgtatgcagagttcttgaaagggctggattagacagtggttgccaaccctggctgcacaataccatcatctgctaagatttaaaaatgtcgatacctgcccctgccccctgtgattctgacataattgtcctaggatgagacctgggccttggtactgttttcgtttttcctttttttcctggatagatagatggaaagaagggttgtttctttgctccccagagattatgagatgctgcttaaggtccgtcc

SEQ ID NO: 74471 - DNA, 774 bp, Homo sapiens
actggcctcaacacaacaactaccttgttaataagcaacagcagatttcaggggcttctgccagtgaaactccatggaagaaagagctcctgtttataagggcaggaagcactcccacagacctctcacacctgcgcaattagagatggatgtggccgggcacagaggcaagggctcagcctactataatatcacatcaacaagtcctggccaggaagagaagtcttcttctatgccatatggctctgggcagtccccatctgtgcaatgggatccaaatctttgtcccctgaccaccctccaaaggcaaagctgcctacactgagggctgaaggctttgctccaggttcggttcccacctgctcttgggatattttggaggctctctccagaygacaatgctttgagcagacactctgggccagagattgctgctttgaggcttgtgggcccttggttgctgaaagacaaagcttctgacagaggagcgagaggctcgaagagaaggttgcagctagtgctggccatggctgatgtatatacacacctgtcttagtcatctcgggctataacagaatagcatagaccagggatccccaatcaccagcccatggacctgtagcggtctgtggcttgttaggaactgggccacacagcaggaggtgagtgccatgcaagagagcattaccacattaccacctgagccctgcctgccgtcagatcagcggtggcattagattctcacaggagcatgcaccctattgtgaactatgc

SEQ ID NO: 74472 - DNA, 761 bp, Homo sapiens
aacacttacaattacatttgacacgattttcagaatgtcctgttggtagtgttagcagctctgttggaggagcagatgtctggcttgttagatcccaacctaacaggtagcttgagacaatggcaagtgtccactcagaagcaatgtggtgctacagaatgatgttgccttccatcctgaaacaaaaggaatgtctctctaaacagccatatcacaggctgagtttaatttttaagtgcttacaacatggtgtcttgatctcctccctgccaacagtcttcagcctcctggctctacctccaacaggataacctcaaaaaggttataaattgacatcactaaggcccaaagacatggcagggaaaaccctccctgcaatactgcgttaataatactgaactcttgcttaagggtttgatttctctcaaaaacactcattccaggagactttacattgccgaaggaatttatttgccagcagtcctcctttcagggagacaggacagrtgaaccttgaccgctctgcattcttgaaatgcgttcttccctcttggttttcctcctacctcccaggcctcttcttctctgtccgttcattggtacctgctcctctgcttgccatctcagtattggccaactcagatctcagcctgggggtcttttctcatctccatttatactgtttggatgagcttattcagacccaaatctaactatttccagtgcccctatgactgccaggcatgtgtcttcaggctcct

SEQ ID NO: 74473 - DNA, 668 bp, Homo sapiens
cgggttcaagagatcctcctgtcttggcctcccaaagtgctggaattacgggctgtgggccaccacatctgggctagaagtacctggttttagagcagtttaatttcactttttcctgagaccctggtatttgaatcctatcagaaaatttcagtgagttttatgatgcagagtcttcccctatccctattttctcagttataactggcagcttctattctattttgcttttatgcaataccataccaacagagtttcagggcaccttaggataagccatgtctctaagcctcatgtctctgagcagtgtgtgccaaaagtttattgtttgggtactcattgatggccctggtctcccattcttgaatcttctccttttgataaaacaagctcttcaattaaaaacatcctccagacaccgagacggctgttcattctccattcagcagctgcaaagctggaggaggagagggaagggttggggaaatggctgaggcccataacttaattcctgtgcattagccctgccctgtattcgccctttccaatcttggcttctctgctggtgaaacaagcaggattagcgcgtgataagagaagctggggtcataattacaccctatgcgayggggcagcacaaccaccaaataaatccctggacaattatt

SEQ ID NO: 74474 - DNA, 1245 bp, Homo sapiens
aatacaataaataataataataataataataataactaactaactaaaatgggagggcaggctgggcacagtggctcacgcctgtaatcccagcacctcgggaagccaaagggggcagatcatctgaggtctggagttcgagaccagcctggccaacatggtgaaaccctgtctctactcaaaatacaaaaaaaaagtagccaggtgcggtggcacgtgcctgtagtcccagctacttagggagctgaggcaggaggattgcttgaactcgggaggtggaggttgcagtgagccgagatctcaccattgcactccagcctgggtgacagagcaagactctgtctcaaaaaaaaaaawaatatatatatatatatatataaataaataaataaataaaatggaaggacagaagacagaaggcaggcggggccccagaaggtgggtggcagccacctgaggacagagtctgcagcccaggggccggatcccagggcttaggccctgcgtgtctgtgggactgcagggattttcagctcctgagccagctcctcctttcttccccttctctctgagaccccctttcatgtgcgtgtgtttgtctgtattgtgtgtgcgtgtgtctgtgtctctctgtgtgtgtcgtgtgtgtgcttgtcattgtgagctgaactgtgtgaccaagaggccaggtgttcaactgtgtctgcacagatggtggcagcaggttttgtctttggaagatgtatatgtgggtggagccgtgtgtgattgaacccacattcatggatgtgttccctgcttgtgcatggctgtcaccaggaacctgtctgggtctgagaatgctggagctcagcctgccagtaagccgagagtgggccacaacctgtcactggaactttctggatcttggttcactcaatggtgtctaggtgcctgtggtctagaaggaccagtacccaagccctgagtcttgtacacatcttgctgttggcaggtatcagggcccctgggtgcctgtgtgtgctgtttttgggggaagctgggtcctgccttcctgtttctcatgtgtatgcattccctgtgttccagctgcaattgcggagcgcctgctgtgcatgcttctggggtaagaaggcgttgcacatcctcgttgatgagcatctcacgagtatactcgtggctctctagttacttggccaagtcatcttcctgtgcacaggcaggcttgcataagagcaaagagct

SEQ ID NO: 74475 - DNA, 1461 bp, Homo sapiens
ggcagcacaccagtccccatccccaaccatcccaggatgagaatgtcttggtcctggccgggcgcggtggctcacgcctgtaatcccagtactttgggaggccgagacgggcggaccacgaggtcaggagttggagaccagtctggccaacatagtgaaaccccgtctttactaaaaatgcaaaaaattagccgggtgtggtggtgtgcgcctgtaatcccagctactcgggaggctgaggcaggagaatcgcgtgaacccrggaggcagaggttacagtgagccgagatcgtgccattgcactccaccctgggtgacagtgcgagactccgtctctaaataaataaaatagggccaggcgcggtggctcacgcctgtaatcccagcactttgggaggccgaggcgggcagatcacctgaggttgggagttcaagactagcctgaccaacatggagaaaccccgtttctactaaaaatacaaaattagccgggtgtggtggcacatgcttgtaatcccagctacttggcaggagaatcgcttgaaccctggaggcagaggttgcagtgagccgagatcgcgccattgcactccaacctgggcaacaagagcgaaactccctctaaaaaaaaaattaattaattaaaggaattaaaaaaaataaagccttgatcccacacctgggttccctgctgctcacaggataactcagatgccctttgcccttgtagaattggtgggagattccaggagcagaggcacagcccctggctggggcccagccctgccataaggggaactttaaccgagatacctgcttccctcctccatcagtcccctcaacgccatagcaacagaggccttcaaggtgcacaactcctcacctagtatgctaactgatattgactagaccgatcagacaagcaggccctccttagactcacctaaaaatattggggtgagcaggatgccatccagttcccaaaatgatagcactctggcatctcctttcttcttccctcaccttgcacagaggagtaagtcatgtttaagatctagtcaattccggtggtgccaatagtaatggtgccaattcaagtggtgtcagatggtttctacctgtcctccctgaccagggccggccttggggcagcaggagagaaaaagagcccgttggcaggtgcttgatcccagttgtgactcccataagggggcaaacatcaaaagttctgtcactcagagatgaggtgattgcaccactaaatcctatttgctgttccttcatcctcagctgtcatatcgactgctcacccttcaatctccatgtccttgctcaggctgagaatattctatttttgttttggagacaagattgcactctgttgtccaggctggagtgcagtggtgcaatcacggctccctgcagcctcaacttcctgggctcaagtcatcctcctgcctc

SEQ ID NO: 74476 - DNA, 591 bp, Homo sapiens
ggccttctccattccctgcgtctttcccagcggcctgggaggtgagagaaggggtggggcttgggctgggccgccaatcacagcctcggctccactttgaatctgtgctggcgggcgcgggctgcctggccgccaggtgtgccggcgccctctttgtccccacttgcctgcccaggcacgtcccactccaaccccacctttctggaggctctgttcctcacacagctggttcccgcctccccaggtgtccccagcctggaatgaagttggactcagattctgcccctttgaatgctggtgactctaaaccatgcctcatgcagccccatccccagtccggcacaggggtcatcatccgcaagrgacagctacttccatcccctagatggccaccaagggtccggtagtgcagggaacagggcggcgtgggagtaagagctcatgatttgcggcaaaaatcatggcagagggctggcccagggaggagccgtgtgacctggggcaatccccttccttcccacgtggctcctgcagttgtaagactaatataataagggcctatctcccaaattgctgtgaagattagatggg

SEQ ID NO: 74477 - DNA, 675 bp, Homo sapiens
tgctggtatgtaccaagcctggcctgggaaagagagctatgtagcttttggtccttctgaatctctcacccctcaggcagaaatctaaaaccatgctttcttttcaaatggatgaaaggtatttcctttagaatatttctttagaatacactagagtggtcattatcttactcttataatagcagcttattatacagkgatttcatgtacataatcttattgtaaaatttcccattcccctcaaaagatatttgaccttttaaaaatttgtagatatttcatacagttttagatatagaaaaaaatcttagaatcaaatcttttcattttatctttggggaaaccaaggtccagaggagaaaaagacttccttgaggatacagaaatcatcagggctggaatagatactggtgccgattctctaaacttattccaaaatgaaacccaatgtttataggaccaagccctgaatcaaaatgttttcagcgaagttaaattaaaagtcattataacttttaaaagccaagcatgtattcttttttcccattgccaaagtggtttcaaatactttcaacattcttgtttgcaatacagaaagatgcttttattagtaatagaaatctattgttctgtaatgtgattccatgagagagaaaataaaattagtaattactg

SEQ ID NO: 74478 - DNA, 1143 bp, Homo sapiens
tgcataatttacaagtaaattatatctcattagaaaaagtaaagcatataaaggctatgtgctaatttcagtacaatgtacttacttacaattacacctcttttgaagattccataaattatattactcaccagtaagatattatttactttttttttccaaacagaaatatcctactgatgggacatggtgggagaagacagtactaagcaaatgtcgaaatagcatctaagataagttaatacctgaaccatatgaagttcactgcatctgatggggacaatcgtaccttaaaagaaaagacacaaaatactctttcctatagctggtataaaatgtagaaatgatacaatctgaaatattataatttctaaaatattaaaaattcatgtaacttttagttttcactacgccaagcaaggtcatawatacaacagaatacatgaggccacaatgacttcattttatcgagttaacccaagaaagaattaggagagaagaaatagaaaactcatcaattattgaaacttttagctttgagactacatgttgtttaccctccatataatcagtcttgtgtataaaactaatatcaagcaataagtggtcagactggcagctatacagagtacattgtataccatgtcattcctttattataacaatttaatggccattatatttatagcaacttgcagcaaatctacacagattttagatccacaagagagtcttccttcttccccaaagcttcccacagcctctcatccaggaagtcccaaaaccagggcttattctaccaaagggaccaaacaagaaacaaggcccttcaggatcaggaatcaaggccaatataacatcttgaattggccagaaagatctactcttcacatctattctaggactcttttctatcaactgttctcttttatttgcatgttgaatctatttcatggacattctctcacttgaaaacctatctatgctttccaaataattctcatttaatactttatttccctaaatctgcaattgttggggggcagagctagggaaccaattctgatgaaaaatcatcacctcagatacagttaccaataaaattctgggtaagcgactttccaaatgctcctttatatatat

SEQ ID NO: 74479 - DNA, 1180 bp, Homo sapiens
atcctattagcccttaactctgggagggcaatgaccaggwctacctcaatgcctagcacatagcaggtgctcaataaactagtagacttgaattaacctcagcaggaagctcaggattgaggagacaactggcaagggggcagaatgaggcaccattcctcaggtactattttactgcctcagatattattaaactaatagcataattcaatattttcacaacctccaaattcaacatttcagatagttgaataactctcagcacatgcctccacctgacaaaatacaaatgctcttgccaggcacatttgccatcttataagaagctctttcaggatctctgccccaatcctggcattactgtgaaggtgcccaatggaaattatatctgagttggcagagagtggagtgaaggggatattgatgagtctcatccagaaatgggttaggcatttcaaggaaatatctaccattctttttggagaagacttgggtaacatttttcttccatttaacacttcaataatcataacaaacatctttgtgtgcatgtcttcttatagtaccgaactgggagggaaggacagaagttctgctctcaggaaacttttcttttctgtggagtctcacccctacagtgaactccttgcatttcacaattgtacaactcttacccacagagttaaactctggtgtgtgttctctgatgctgcataaggcctgacctatgcctaaatgtttttctacattcactacattcataaggcttctctccagtgtgaattctctggtgctgggtgagggctgagctctgattgaaggattttccacattcattacattcataaggtttctctccagtgtgaattctttgatgttcaataaggatagaactcctaccaaaagccttaccacatgcaatacattcatagcttttatctccagtgtgaattttcttatgctgaataagggctgagctccggctgaaggccttcccacattctccacattcataaggcttctctccagtgtggattctccgatgcctgatgagctctgaactgcccctgaaggcttttccacattcacaacattcatagggtttttcaccactatgaattctctgatgtctaacaaggtctgagctcaaactgaaggctttgccacattctttacatgc

SEQ ID NO: 74480 - DNA, 1002 bp, Homo sapiens
tagctgatatgttctgtcttgtttatgatccagaatgcctgacttgtgtctgtgaggctggattttgtacaacttcagtatgacttgatattaaagtgatccttgtataaatacctttgcataattataaagttagataaaacagtgcagtttctcattggcccttttctcaaatgtggagtacacatgaagatctttttttttgtggcttttatttttacttatttatttatttttattatactttaagttttagggtacatgtgcatcttaccatctttctttttcatggttttcttagcgtttaaggtgagtctccccaggttcattctgctgctgcttctcttccgccttgccttatatctgttaacttacacattatcaagtatttatttatttatttttgagacagagtctcattctgtcacccaggctggagtgcagtggcgcgatctgggctcactgcaagctccacctcccaggttcacaccattctcctgcctcagactcccgagtagctgggactacaggtgcccgctaccatgcccgactaattttttgtatttttagtagagacgtggtttcaccgtgttagccaggatggtctgcatcccctgacctcgtgatctgcctgcctcagcctcccaaagcgctgggattacaggcattagccaccgcacccggccatcaattattttaaagttatcaggtgattggaaatattgtgacttgtgcagattgtagattrtagaatgtagatttaccaacaatttaagcacacgtgtaaacataacacatgaaaacatggtgagccatcagtggatttagtgttaactaccaagccgtagtcattgatccagaggggaataccatcatgaagattagctagagaagttccttcttggctcgattctcttttggtgtcccattccttcattgttcattgatgtgctttattccacatcaggatatgtgactaattacttccttatattgaatgga

SEQ ID NO: 74481 - DNA, 515 bp, Homo sapiens
gaaactcaggttttctaaagcttttttttcagagattattgctcattatagctatgatcagctacttacggattttgaggaacttaattgtgaattaattacttccttctttcctttctctctctctctttttctctctctctctctttctctctccctctctctttctttgtttcggcagagtttcactctgtcgcccaggctggagtacagtggcacaatctcagctgtctacaacctcccctcccaggttcaagcaattcttgtgcctcagccacctgagtagctgggactgcaggttcacaccaacatgcctggctaatttttctatttttagtacagacrggatttcaccatgtttggcaggctggtcttgaactcctggcctcaagtgatccacttgcctcggcctcccgaagtatggggattacaggtgtgaaccaccacacctggcctgtaataatgaatttcaaaaagactttttaatacctataatattaaaaaattaatctata

SEQ ID NO: 74482 - DNA, 713 bp, Homo sapiens
agttccagaggctgggaagtccaagatcaaggggctggcatctggcaaggaggctcttcttgctgcatcttcccatggcaaaggggcaaaaagtgtgagagagagcaagaggtccaattcagagcctcaagccctttcataatcagcattaatccattcatgagagtggagccttcgaaacttaaacacctcccatcactgttgcattggggattaactttccaacacatactttttaggatacacattaaaaccatagcaaatagagaccatatggctcacaaatctaaaatatttactctctgttcctttacagaaaatgtttgtctatgcttggtttagatttgttgctgtccatgtatacctagaactgggaatgagggctgtgtggatgaggggcagacattttaacaagatcaggattttattaagaaggaagaaagacggaattaatacagtataggaagtcagtgctgttccctacacatgagacttctcagactcagttttcccatctacarttgtgagatatagcaaaatatatattatgggaaattgttgagaattcaggagaaggcatgtagacataactgattgacagattcatgaaatagctgcctggatgattacgtggttagatggatggattgatggatggatgaataaacggatggatggatgggtgggtgggtgggtgggtggatggatggatg

SEQ ID NO: 74483 - DNA, 713 bp, Homo sapiens
agttccagaggctgggaagtccaagatcaaggggctggcatctggcaaggaggctcttcttgctgcatcttcccatggcaaaggggcaaaaagtgtgagagagagcaagaggtccaattcagagcctcaagccctttcataatcagcattaatccattcatgagagtggagccttcgaaacttaaacacctcccatcactgttgcattggggattaactttccaacacatactttttaggatacacattaaaaccatagcaaatagagaccatatggctcacaaatctaaaatatttactctctgttcctttacagaaaatgtttgtctatgcttggtttagatttgttgctgtccatgtatacctagaactgggaatgagggctgtgtggatgaggggcagacattttaacaagatcaggattttattaagaaggaagaaagacggaattaatacagtataggaagtcagtgctgttccctacacatgagacttctcagactcagttttcccatctacaattgtgagatatagcaaaatatatattatgggaaattgttgagaattcaggagaaggcatgtagacataactgattgacagattcatgaaatagctgcctggatgattacgtggttagatggatggattgatggatggatgaataaacggatggatggatggrtgggtgggtgggtgggtggatggatggatg

SEQ ID NO: 74484 - DNA, 713 bp, Homo sapiens
agttccagaggctgggaagtccaagatcaaggggctggcatctggcaaggaggctcttcttgctgcatcttcccatggcaaaggggcaaaaagtgtgagagagagcaagaggtccaattcagagcctcaagccctttcataatcagcattaatccattcatgagagtggagccttcgaaacttaaacacctcccatcactgttgcattggggattaactttccaacacatactttttaggatacacattaaaaccatagcaaatagagaccatatggctcacaaatctaaaatatttactctctgttcctttacagaaaatgtttgtctatgcttggtttagatttgttgctgtccatgtatacctagaactgggaatgagggctgtgtggatgaggggcagacattttaacaagatcaggattttattaagaaggaagaaagacggaattaatacagtataggaagtcagtgctgttccctacacatgagacttctcagactcagttttcccatctacaattgtgagatatagcaaaatatatattatgggaaattgttgagaattcaggagaaggcatgtagacataactgattgacagattcatgaaatagctgcctggatgattacgtggttagatggatggattgatggatggatgaataaacggatggatggatgggtgggtgrgtgggtgggtggatggatggatg

SEQ ID NO: 74485 - DNA, 713 bp, Homo sapiens
agttccagaggctgggaagtccaagatcaaggggctggcatctggcaaggaggctcttcttgctgcatcttcccatggcaaaggggcaaaaagtgtgagagagagcaagaggtccaattcagagcctcaagccctttcataatcagcattaatccattcatgagagtggagccttcgaaacttaaacacctcccatcactgttgcattggggattaactttccaacacatactttttaggatacacattaaaaccatagcaaatagagaccatatggctcacaaatctaaaatatttactctctgttcctttacagaaaatgtttgtctatgcttggtttagatttgttgctgtccatgtatacctagaactgggaatgagggctgtgtggatgaggggcagacattttaacaagatcaggattttattaagaaggaagaaagacggaattaatacagtataggaagtcagtgctgttccctacacatgagacttctcagactcagttttcccatctacaattgtgagatatagcaaaatatatattatgggaaattgttgagaattcaggagaaggcatgtagacataactgattgacagattcatgaaatagctgcctggatgattacgtggttagatggatggattgatggatggatgaataaacggatggatggatgggtgggtggrtgggtgggtggatggatggatg

SEQ ID NO: 74486 - DNA, 713 bp, Homo sapiens
agttccagaggctgggaagtccaagatcaaggggctggcatctggcaaggaggctcttcttgctgcatcttcccatggcaaaggggcaaaaagtgtgagagagagcaagaggtccaattcagagcctcaagccctttcataatcagcattaatccattcatgagagtggagccttcgaaacttaaacacctcccatcactgttgcattggggattaactttccaacacatactttttaggatacacattaaaaccatagcaaatagagaccatatggctcacaaatctaaaatatttactctctgttcctttacagaaaatgtttgtctatgcttggtttagatttgttgctgtccatgtatacctagaactgggaatgagggctgtgtggatgaggggcagacattttaacaagatcaggattttattaagaaggaagaaagacggaattaatacagtataggaagtcagtgctgttccctacacatgagacttctcagactcagttttcccatctacaattgtgagatatagcaaaatatatattatgggaaattgttgagaattcaggagaaggcatgtagacataactgattgacagattcatgaaatagctgcctggatgattacgtggttagatggatggattgatggatggatgaataaacggatggatggatgggtgggtgggtggrtgggtggatggatggatg

SEQ ID NO: 74487 - DNA, 713 bp, Homo sapiens
agttccagaggctgggaagtccaagatcaaggggctggcatctggcaaggaggctcttcttgctgcatcttcccatggcaaaggggcaaaaagtgtgagagagagcaagaggtccaattcagagcctcaagccctttcataatcagcattaatccattcatgagagtggagccttcgaaacttaaacacctcccatcactgttgcattggggattaactttccaacacatactttttaggatacacattaaaaccatagcaaatagagaccatatggctcacaaatctaaaatatttactctctgttcctttacagaaaatgtttgtctatgcttggtttagatttgttgctgtccatgtatacctagaactgggaatgagggctgtgtggatgaggggcagacattttaacaagatcaggattttattaagaaggaagaaagacggaattaatacagtataggaagtcagtgctgttccctacacatgagacttctcagactcagttttcccatctacaattgtgagatatagcaaaatatatattatgggaaattgttgagaattcaggagaaggcatgtagacataactgattgacagattcatgaaatagctgcctggatgattacgtggttagatggatggattgatggatggatgaataaacggatggatggatgggtgggtgggtgggtggrtggatggatggatg

SEQ ID NO: 74488 - DNA, 719 bp, Homo sapiens
tgtccactgttgagattgtgaattgcatgcatagactcaactcacaggagacgttgactcccatacctccagctgggacatttgcaagattagaaattttatttctggatctttctgcaagtgcgattgtgacatctacctttgcctagcacctgactgcttttacttttttgcctgggcccagccaatagttgaaattgtgacatatacttgggctacataggtgatgtgatgctcctgcctgggccccgccttcaggagaaatttttacatatctctgggccaatcacctagtgatgtgactctccctttctttctaggcycaacttatagaaggcattgtgacagatctctgggttcatcacctaggagatgtgactctacactcccagctgggccaagccccactgaagattgtgacatattaatgagcccataaactatgtgacatgactctgctccctggcctaagccaagattaaaggggacattgagacataatgctttgcctagcacctacatgatgttgactctcttttcctgcctgggctcggcctacagaagaaattgttcatatcactgagccaagatcccagttgatgtaactctcctcctgggccctgctcacaagggaaatattggcatattccttgcctagcactaaggtgatgtgaacttctgcctggtccctgcccatatgtgagattgtgacatacact

SEQ ID NO: 74489 - DNA, 550 bp, Homo sapiens
ttggggggcgggggtagaggtaccatacaattttaaatgaccagatctcacaagaactcactatcatgaagatagcgccaagtcatgagggatctgaccgcatgatccaaacacctcccacccccacttcctagtactggggattacagttcagcatgagatttggtcagggacaaatacccaaactatatcagtgggcaaatatccaaatatcagtggctcacccctgttaatcccaacactttgtgaggctaagatggtagaatcacttgaagccatgaatttgagaccagccggagcagcatagcaaggtcccatctctacaaaaaaataaaaattagctggatgtggtggtgcrtgcctgtagtcctagctacttgggaggttgagtgaggcatggggattgcttgaaccctggagattgaggctgcagtgagctgtgattgcaccagtgcatgccatcctgagctacaaagtaagagaccctgtgtccaaaaaaaagtgccccaagtgagcacaggatatgatgtgtttcttgcttgatgctgca

SEQ ID NO: 74490 - DNA, 756 bp, Homo sapiens
tttattctgacccctttacctgatggcttattttcttctgtcctttacagtttttaatttgcttctcacataaataaagatcttatattaaaacaaaatagtatggcttggcttgtaatttttgttaaaagctgtagtatatgttgtataaaacagtatactgggggtaaatagtttttaggttattgatgagcagttttccctcagataggccttagcgtaggggtttctggtcatgtagatgagagataggctgggattgaaatttgttatggcagcaataaccttctcagcaccagggaattcaaatccttttcaggatactttgccaatatctcccaggtttgctgtgccttcccttcrtgccttttatcagaggtggtctcgtacacagctgtattttcctgttatttttactcctttttttttttcttttgagatggagtcttgctcttgtcgtccaggctggagtgcaatggcatgatcttggctcactgcaacctccacctcccaggttcaagcgattctcctgcctcagcctcctgagtagctgggattacagacacccacaaccacgcccggctaatttttgtatttttagtagagatggggtttcaccatgttggccaggctggtcttgaactcctgacctcaggtgatccacctgcctcgccctccaaaagtgctgagattacaggcgtgagccactgtgcccagccaactccatgttttttaacttggtggcagggggtgagg

SEQ ID NO: 74491 - DNA, 1422 bp, Homo sapiens
ttcttcaaatagaacggggcgatgtaaggagtcgcagatgtgtaaggtccattttaggagaattggggaagtagtgctcgttagatggccagtgtacgctggttcatcctgataggtgtatcatcctccccacaacccatcagtgtaggtgagattgactcctttgaccagacaaggaagcgtaagcttagcaagttaacacaggtagcactggagccacagagctgacacctggccaggctgtgccttggggtcagtgtgtcggaatcaggacctgtcttctttctcctgcggttttctgaacagcacaaagatgcagttcctgggggcctctgtcaccaaaatgatagggttcaaacgtcttctaattatcctccactgatcttctactaattagatcttctactaaatttcttctaaatcttgtagatttattttctaaatcttccactaaaatcttctatttttctgtgactttaaacaaggtattgaatctgttaagttgggatgataatagtacctaccttgcggttattgtgactagtaaatgagaggatacacattaagcacctagaacagaacctgaactgctaggtgtctcaataaatgttgactgttggcactatgatcactatcatcattgccataagtcttattgtttctgaagcatttctctccctttcttcctttaataaatactcttcaggatcctactaggtgcctggcactgtgcaaggtgtctgagataaaaggacaagcagaggacaattttaactgaaggtgatgtgtacaaagtgctacagaagcttaagagattgctgaaaagctttgtggagcagttgacatttgagttaagcctttaagtttggagtagaattcttcaagatggagaagccagggcaaaggaaagcataaagaaacttctgtcgggactaggctttaggattgagtcaagattttccatgggaaaaacaaactacagtttttttaaaaaaagacacacacacacacagacactcactgagagagaaagaatggcagattggaagctgagtgcaaaatatggctaaattctacctttcaatcatatattaagtctagtttcatggaggcaatattctttgagaggaaataacttgggttttgctgtcagacagtctggaggcaaaatggcaactaagctatgtgtctttagacaagtttatttacctttctcatatctaggtacattacttgtttaaagaaagatggaaggaaggtagatattctcatgttataggatagttctaagaattaaatggaataacctatataaaaatgtctaatcagggcctggcaaatagcgtatgttcaataaaatgtytgctttctttcttccaaaatacagctgcacacatactgaccatgctgtcaacctgaacc

SEQ ID NO: 74492 - DNA, 782 bp, Homo sapiens
agtaagtcctagcttgacaaggagtgggtttggaggcagacacacccagaagtagcaaagcacagtgaggcatgctggaaagagatggtggtgaagatccatgtctgtcgggaggwcacctggtgaaggtttgaagaatctggaaaaaggatggatacacagactgaacagtagttgggtgctcaagcgaaagcagggaggccgtcccaattagtgatgtccagctggtactgcacttggacaagtcacgttttctccttttctctattggaggcctcctcttgtatcaggtatgggtaaggattctaggacaaacatacacagtatccttcttactgatgctggagaaggagcgttggaagaagagtctcaggttctagtgctggctttgctgccaagtagttgtttgatcagcagcaattcacactatctcttttggcttaattcacattatctcttttgaataaagtggggcactggatggtcacttctaggccttaagttctttgagtctaagacaaatgaagatggttgcttatcatagggctaagcatttggggtctaacaagtcaaagggaggtcattttcaccaatccaagcatccatcatacatctgttcaccttcactaagaacattctatatgtcaagaactaagctagcactatggaattgatttaactaaatacctatcttcaaagaatacattgtgaaaaggcacgatagccagcatgactctcagtgagcactgcctctggctagtgacacccttgtgtggatccct

SEQ ID NO: 74493 - DNA, 782 bp, Homo sapiens
agtaagtcctagcttgacaaggagtgggtttggaggcagacacacccagaagtagcaaagcacagtgaggcatgctggaaagagatggtggtgaagatccatgtctgtcgggaggtcacctggtgaaggtttgaagaatctggaaaaaggatggatacacagactgaacagtagttgggtgctcaagcgaaagcagggaggcygtcccaattagtgatgtccagctggtactgcacttggacaagtcacgttttctccttttctctattggaggcctcctcttgtatcaggtatgggtaaggattctaggacaaacatacacagtatccttcttactgatgctggagaaggagcgttggaagaagagtctcaggttctagtgctggctttgctgccaagtagttgtttgatcagcagcaattcacactatctcttttggcttaattcacattatctcttttgaataaagtggggcactggatggtcacttctaggccttaagttctttgagtctaagacaaatgaagatggttgcttatcatagggctaagcatttggggtctaacaagtcaaagggaggtcattttcaccaatccaagcatccatcatacatctgttcaccttcactaagaacattctatatgtcaagaactaagctagcactatggaattgatttaactaaatacctatcttcaaagaatacattgtgaaaaggcacgatagccagcatgactctcagtgagcactgcctctggctagtgacacccttgtgtggatccct

SEQ ID NO: 74494 - DNA, 1203 bp, Homo sapiens
ggatcctgtctctacaatttcttacaatttaagcctccagtctacacaagcagcataattatatttggaccagaaagcatggtattcttttcttgcracaaactttcacacgtgaattttagagctatgaaactgtcttcttgttgttctcaaaatgagtatgagccataaacaaatggacaaactacatgtctaaaatgccatttcatggacaagttttaaaatttaccatctgcagcctacgtctgaagggcaaatattgcttatgaaaataatgatctttagaggtctgtttggtctctacacatagtggagtaatagcccttaggctagaaagtggtaaagatgttaacagtttaaggtggccttaagtggcaatggacaaatttggactaatatctatttgtgactattaagaaatccatgacttttatccatcacacacacacaagcacacaatcagtgtcacccaattaagaacgactcctcttgtgtaactaactaaattcctttggctaccaagtctatattttctgcttgatgcagatatctggtcattccttcccaggtgcccgctctttgtgttttctacagacttttcatcctcagtggccacctggtttatatgccttttgtttgattctagctcccatctccctcggttctgaatagttttgcagagatcagcatattctatttcttgctgaatgcctctctttctctgagttacatttttttttgtactctcatttaatctttttcttgcctctcttctaattaactccatcgttgcctccttcattatgcttgtaatgaggtcaccgaggtgttccgaaatttctgcttttcccatctgcttcagggttccaattagtttcctttggaaatctgaagttttgcttagtagaagcttccaataaagctaactctaggatggcctcttttccttcatcagttcaaatgaaaactttcaagattatacaggctctcaatggtgtaaaaggcatcattttctctagcatagaaatggagttagagacaacaacagttgagctacacagaaaatttaaatatcttttgaaagagtgtgaagtctgttcttccagattgcaagtagatgcaggtgagaaatttcagaaagacacttttatccacacttggacgtgaagggtatgtagctaacacaacaaaatgaattttaaa

SEQ ID NO: 74495 - DNA, 954 bp, Homo sapiens
gggttggggagtccatagactttccttgccctctctggattatccattatcccagcacttcagtgtgttcgctaacccagaagctctccaaaccctgtcactggggaaggggggtggttatggtgatttcattatgtagccatattgatcaaatcattggccattgatacttagctcaacctccatcttctctctcctccccagaggtcaggagttgaggctgaaagttctgaccctctaatcatgccttggtctttctggttactaccctccataatgatatctaggggtccccagctaccaatcatctcattagcaaacaaagacactcttatcacttttgggattacagaggttttaggagctaggtgctaagaactaggacaaagacgaaatatatatctcctactgtattgctctgtaaccagtattttctttaatatcatctctcactaccaccctattctctacactgtctacaattgttcacattgcttctctgagcactattgctctcccctccttgttcttggttctacccacagcagttcttacagagggccccttcctttggtggggtgaaaatttgctggcattgtttgtgctctgcctctgctagaaaatctcactcccagttctttcctacaacacctgccatcatccaacactgtttgtcaaccccctgctattcttcttgtttcaaatgttcttcccctaacttatattttattcagtttgtggatttttcttggtcttctagtttttttgaaggctgtggagagttgtatcgttgttcttgttgtctctattataattcagaattcctctagttctaatttcaagttattatttctgttttcttatcttgtattatccaggagacttcagaatagtttcataaaactaaggrctagatctctggtagattgtagaaaactaagggaagcatctatg

SEQ ID NO: 74496 - DNA, 673 bp, Homo sapiens
tggcacacagtaggtgcgtcacaaatttctggtgaaacgctctgagacaaagttaatgactgtggcaagctggagtaaacattggaggaggagttggcagggcttagcatygagctctggccttgccacaaagggacactgggcatgggtgggtcctttcccctaccctgggtctttctcttagcatctaaagaggatgagccagctctgccaggtcctctgcaggtggctctggggacacagccctgcacagggtcggccactgagcaagtcctggctgtgtccccgcaatgttactgggcctctttgtggtgacagccccggaatagtgaggcccagtggaactgctgcttatccctgttcccctggtggctgtcctgctctcctcctctcaccctgactggctggagggcacagccctgccataagggcatctgaggacactcaaatggaggggggcacatctctgtgtgacttctgaccaggccctcagacagccttgctgagccagggctccctcaacatgaagctgataaaaagtaaggagatgcaggggctggctgggaacaggggccctgagccatgtgggcctgggagtggaatccttgctcttccacctcccagctgtgtgaccttggatgagtgacttgacctctctgagtttctctccctt

SEQ ID NO: 74497 - DNA, 667 bp, Homo sapiens
ggcacaaatgagaggaaacattaacaactggtgaatgtaagtgaaggatatgtgagtatttactgcactgctcctgcaaatctgtagaactaaaatgttaaaaaataaaaatttgcaaaataaaagaaagaaaaatatgttacttcctattttagataaaagtaaaacccctatcactcatcactttgcagctgtgtgtcccttgctttgtgaggcacttgctatgcattgtgtatactctcatgagtcacctaggtctttacaagtagtaagaatccaatcaaataactgcagcatttattggctcacatatttgaacaatccaggagcaataggtttcaggtcaagcttaatccaggacctaaaatacgtgacccattttctctccctctgtttctcagctctgcctcttctggtttggtttcatttttagayacacgctctcttccaggtcagtaggtggctgagaggaccaaccaggtagagagtaaatttcccaaagggagaggggaaaggatgctaggaaggccacccccaaatggttcccacacaggcatgtaatccacaaggcagatggttgtactccttgtgtatttcaggaactcagagagcttatgtgattcttccaaagtttcacaagggaaggacagcagggatttgaaacctg

SEQ ID NO: 74498 - DNA, 740 bp, Homo sapiens
agaaaggatgaaggctgaaggctcccagtgcccacagccaacaatcgggcaggcttcccacatccaggctccagtctcagggcaactcagttttagtaaggagactggtgaagggggagggaagaggagaggaaaatgggaggaggagagtgagaagaaggagagggaggaagaggagcagcgggaggaggaggaggaaggggaagaggagggaaacatcacagcttcagctttcctggaactaaatttcaaattctatgcacgactcatccttgggggaaactatgtcagaacccttcagatccatcagttttagacgcctacaagttttaggagttggaaaccaagtagttttagaaaaaaatctgtcctagttttgtaattggctcccagggccctgctcaatgattattaaaatactgacatgaaatctctgagagaaattgctctgggccctctatttatcatttgcgtcggtgagacaagtggaggcctttctgtggtgtgtcagctagggtacgtttcaakgtcagataattaactttagtaagaaagagtcagatttgcaaagggactaaggccgagactctggtggcccttgcttaaaggaaacttgctgaacagaactcagggcctcaggatgtcgtggatctgacttacattgtttgtttgaacagtggttctgaaggtgaggtccacagatccttccctattcccaaagcacatggagaggctgcagg

SEQ ID NO: 74499 - DNA, 740 bp, Homo sapiens
agaaaggatgaaggctgaaggctcccagtgcccacagccaacaatcgggcaggcttcccacatccaggctccagtctcagggcaactcagttttagtaaggagactggtgaagggggagggaagaggagaggaaaatgggaggaggagagtgagaagaaggagagggaggaagaggagcagcgggaggaggaggaggaaggggaagaggagggaaacatcacagcttcagctttcctggaactaaatttcaaattctatgcacgactcatccttgggggaaactatgtcagaacccttcagatccatcagttttagacgcctacaagttttaggagttggaaaccaagtagttttagaaaaaaatctgtcctagttttgtaattggctcccagggccctgctcaatgattattaaaatactgacatgaaatctctgagagaaattgctctgggccctctatttatcatttgcgtcggtgagacaagtggaggcctttctgtggtgtgtcagctagggtacgtttcaatgtcagataattaactttagtaagaaagagtcagatttgcaaagggactaaggccgagactctggtggcccttgcttaaaggaaacttgctgaacagaactcagggcctcargatgtcgtggatctgacttacattgtttgtttgaacagtggttctgaaggtgaggtccacagatccttccctattcccaaagcacatggagaggctgcagg

SEQ ID NO: 74500 - DNA, 740 bp, Homo sapiens
agaaaggatgaaggctgaaggctcccagtgcccacagccaacaatcgggcaggcttcccacatccaggctccagtctcagggcaactcagttttagtaaggagactggtgaagggggagggaagaggagaggaaaatgggaggaggagagtgagaagaaggagagggaggaagaggagcagcgggaggaggaggaggaaggggaagaggagggaaacatcacagcttcagctttcctggaactaaatttcaaattctatgcacgactcatccttgggggaaactatgtcagaacccttcagatccatcagttttagacgcctacaagttttaggagttggaaaccaagtagttttagaaaaaaatctgtcctagttttgtaattggctcccagggccctgctcaatgattattaaaatactgacatgaaatctctgagagaaattgctctgggccctctatttatcatttgcgtcggtgagacaagtggaggcctttctgtggtgtgtcagctagggtacgtttcaatgtcagataattaactttagtaagaaagagtcagatttgcaaagggactaaggccgagactctggtggcccttgcttaaaggaaacttgctgaacagaactcagggcctcaggatgtygtggatctgacttacattgtttgtttgaacagtggttctgaaggtgaggtccacagatccttccctattcccaaagcacatggagaggctgcagg

SEQ ID NO: 74501 - DNA, 1022 bp, Homo sapiens
ccagcttaagttgtatcatcatgaccaagtgaaggccaagatcaaatcaagatcaaactagtcttatgcaagagccagtgataagtataaagtgggaagtccaatatcttggtctaatacattaagtttgtaaagtattaaaacagaaataaacatgagacagaaaatgacaaaagcttttccccatctttgtgctcatctctatttacaaataaatgagagactaaaagtcattaaaatgtctgaataaagcctggtatcactgcatcctaaatattaccacaatgctaacattgtacatatttagtgcatagggcggtagaatcgcgcacactgccccttctcccagcccccaggaaaagtcaaaagtcattttctatgatmtaaccaatagcaaatggagaatgactgagagctctgttgctttctaaatagaaaaattgtaatatatgtatttttattaggcttatagaagagatggcttcagcgttaggtagttttgttaatccatccagctggactgtgcaaaagtttagggcttgccatctacaatttctatttatatgggtcagttaaaccagataagattttgccttttttcttcctcaaggtaacaaataatcagcttaaccaatataattttaacactgatacatacacaaaaataaagaactcactgagttgcaaaagttctatttagcactgcatgtgctaacattacatatcactgcttagctgactagagagggtgctggaggctccagtgacccagatgcttagctccattttcagagttatctcctcagtctatctacactcagacatcatgaaacgttcaacacaggagtgttccaaaaaaggtgaaaaaatagctcaaaagcatctgaggatctttagaaagtagcatcaccaatctgcctttgctgtactaaagaaagtccaagacattctgctccaccaaaagaaatgataattcattgtgaatgtgcaaccataacatgcacgagctgatgtctggaagt

SEQ ID NO: 74502 - DNA, 2131 bp, Homo sapiens
aatgcattattttaatgtttagtgaatttaatagtcttttaaatcattatccttagagtaaaactcaggaaaatataatacacttcatatgaaaagacgtgccttttacagaatatatgagagctaatgctcttaagcagtttgtaaattaagtgatttccctaattaattatttttttccgggtaacctatctataaatgatttgcacatgacatgcaaggccttccgtcttctcacaatactacaattgctggtaaaatttaagtgcattatgtcttctttctttctttcttttttctttcagtgcattatgtcttctttctttctttcagtgcattatgtctgctttctttcttttcttttctttctttgctttccttgctttccttgcctttctttctttctttctctttttctttctctttcttttctttctttctctctctttctttctttctctttctttctttctctttctttctttctttctttctttctttctttctttctttctttcttcttttcttttctttctttctttctttctttctttccttctttctctttcttgacagattctcactgttgtcacccaggctggagggcagtggcatagtagcatgatcttggctcactgcaacctctgccccttgggttcaagagactctcatgcctcagcctcctgagtagccgggattacaggtgtgtaccaccatgcctggctaattattattattattattatttgagatgatgtctcactctgtcgcccaggttacagtgcggtggcgtgatctcggctcactgcagcctccatctcccagattccagctattcccctgcctcagcctcttaggtagctgggattacaggcacgtgccaccatgccaggctaatttttgtctttttaatatagatggggttttgccatgttggccaggctgctctcgaactcctggcctcaagtgatcctccccactcagcctcccaaagtgcttagattacaggtgtgagccaccatgccttgccaattatgtcttatatattatgctacataggccttaacagttttgattgtagcagcctgtgctttacagacattgttaattttgatttgtaattctgtgaatttatatgacttttggtagtaaaaatatatgaaatatatatttttattttttataaatttgacctttttttaaaaaaataaccagattacaaaaaagtaaatctatgactgcatcaaatatagtcaaaagatgcatgtgattctattaagaacaagtctcttagtgctctttaacactaaacatcttctccactaatttgtcacatcattcaaatatgtgactgccaatgagaaagttattatttctattcatgttatagaagatatgctatccacgggctgggtgcagtggctcacgcctgtaatcccagcactttggaaggcggaggcgggtggatcacgaagtcaggagatcgagaccatcctggctaacacgctgaaaccccatctctactaaaaatacaaaaaattagccggacrtggtggcgggcgcctgtagtcccagctactcaggaagctgaggcaggagaatggcgtgaacccaggaggcggagcttgcagtgagccaagatcgcgccactgcactccagtctggcgacagagcaagactccgtctcaaaaaaaacaaaaacaaacaaacaaaaaaaagaagatatgctatccacatctatgaaatcataggtatctaacacatttttaacccgatacttacacagtaatcacattgctggcactgttgtgttttacagattttaactcatttaatctttataatgacactaagaagtaaatgtcatttgccatagcataactttgaaaacacaatagacccaataatagactcaacattcgactttacgtgaagatctgaggaacttttcaccatagaatggtaagcacatatctcaaaaataaatttaaaagtttcacatgaggtacagaagctacaaggtgcatccatttgtcttgggtgaaagtacagctttactgttattttttctgcaaatttatgtgaaattctatccaggagtcagtctcaggaggacagcctgcctacatgt

SEQ ID NO: 74503 - DNA, 2131 bp, Homo sapiens
aatgcattattttaatgtttagtgaatttaatagtcttttaaatcattatccttagagtaaaactcaggaaaatataatacacttcatatgaaaagacgtgccttttacagaatatatgagagctaatgctcttaagcagtttgtaaattaagtgatttccctaattaattatttttttccgggtaacctatctataaatgatttgcacatgacatgcaaggccttccgtcttctcacaatactacaattgctggtaaaatttaagtgcattatgtcttctttctttctttcttttttctttcagtgcattatgtcttctttctttctttcagtgcattatgtctgctttctttcttttcttttctttctttgctttccttgctttccttgcctttctttctttctttctctttttctttctctttcttttctttctttctctctctttctttctttctctttctttctttctctttctttctttctttctttctttctttctttctttctttctttcttcttttcttttctttctttctttctttctttctttccttctttctctttcttgacagattctcactgttgtcacccaggctggagggcagtggcatagtagcatgatcttggctcactgcaacctctgccccttgggttcaagagactctcatgcctcagcctcctgagtagccgggattacaggtgtgtaccaccatgcctggctaattattattattattattatttgagatgatgtctcactctgtcgcccaggttacagtgcggtggcgtgatctcggctcactgcagcctccatctcccagattccagctattcccctgcctcagcctcttaggtagctgggattacaggcacgtgccaccatgccaggctaatttttgtctttttaatatagatggggttttgccatgttggccaggctgctctcgaactcctggcctcaagtgatcctccccactcagcctcccaaagtgcttagattacaggtgtgagccaccatgccttgccaattatgtcttatatattatgctacataggccttaacagttttgattgtagcagcctgtgctttacagacattgttaattttgatttgtaattctgtgaatttatatgacttttggtagtaaaaatatatgaaatatatatttttattttttataaatttgacctttttttaaaaaaataaccagattacaaaaaagtaaatctatgactgcatcaaatatagtcaaaagatgcatgtgattctattaagaacaagtctcttagtgctctttaacactaaacatcttctccactaatttgtcacatcattcaaatatgtgactgccaatgagaaagttattatttctattcatgttatagaagatatgctatccacgggctgggtgcagtggctcacgcctgtaatcccagcactttggaaggcggaggcgggtggatcacgaagtcaggagatcgagaccatcctggctaacacgctgaaaccccatctctactaaaaatacaaaaaattagccggacgtggtggcgggcgcctgtagtcccagctactcaggaagctgaggcaggagaatggcgtgaacccrggaggcggagcttgcagtgagccaagatcgcgccactgcactccagtctggcgacagagcaagactccgtctcaaaaaaaacaaaaacaaacaaacaaaaaaaagaagatatgctatccacatctatgaaatcataggtatctaacacatttttaacccgatacttacacagtaatcacattgctggcactgttgtgttttacagattttaactcatttaatctttataatgacactaagaagtaaatgtcatttgccatagcataactttgaaaacacaatagacccaataatagactcaacattcgactttacgtgaagatctgaggaacttttcaccatagaatggtaagcacatatctcaaaaataaatttaaaagtttcacatgaggtacagaagctacaaggtgcatccatttgtcttgggtgaaagtacagctttactgttattttttctgcaaatttatgtgaaattctatccaggagtcagtctcaggaggacagcctgcctacatgt

SEQ ID NO: 74504 - DNA, 2131 bp, Homo sapiens
aatgcattattttaatgtttagtgaatttaatagtcttttaaatcattatccttagagtaaaactcaggaaaatataatacacttcatatgaaaagacgtgccttttacagaatatatgagagctaatgctcttaagcagtttgtaaattaagtgatttccctaattaattatttttttccgggtaacctatctataaatgatttgcacatgacatgcaaggccttccgtcttctcacaatactacaattgctggtaaaatttaagtgcattatgtcttctttctttctttcttttttctttcagtgcattatgtcttctttctttctttcagtgcattatgtctgctttctttcttttcttttctttctttgctttccttgctttccttgcctttctttctttctttctctttttctttctctttcttttctttctttctctctctttctttctttctctttctttctttctctttctttctttctttctttctttctttctttctttctttctttcttcttttcttttctttctttctttctttctttctttccttctttctctttcttgacagattctcactgttgtcacccaggctggagggcagtggcatagtagcatgatcttggctcactgcaacctctgccccttgggttcaagagactctcatgcctcagcctcctgagtagccgggattacaggtgtgtaccaccatgcctggctaattattattattattattatttgagatgatgtctcactctgtcgcccaggttacagtgcggtggcgtgatctcggctcactgcagcctccatctcccagattccagctattcccctgcctcagcctcttaggtagctgggattacaggcacgtgccaccatgccaggctaatttttgtctttttaatatagatggggttttgccatgttggccaggctgctctcgaactcctggcctcaagtgatcctccccactcagcctcccaaagtgcttagattacaggtgtgagccaccatgccttgccaattatgtcttatatattatgctacataggccttaacagttttgattgtagcagcctgtgctttacagacattgttaattttgatttgtaattctgtgaatttatatgacttttggtagtaaaaatatatgaaatatatatttttattttttataaatttgacctttttttaaaaaaataaccagattacaaaaaagtaaatctatgactgcatcaaatatagtcaaaagatgcatgtgattctattaagaacaagtctcttagtgctctttaacactaaacatcttctccactaatttgtcacatcattcaaatatgtgactgccaatgagaaagttattatttctattcatgttatagaagatatgctatccacgggctgggtgcagtggctcacgcctgtaatcccagcactttggaaggcggaggcgggtggatcacgaagtcaggagatcgagaccatcctggctaacacgctgaaaccccatctctactaaaaatacaaaaaattagccggacgtggtggcgggcgcctgtagtcccagctactcaggaagctgaggcaggagaatggcgtgaacccaggaggcggagcttgcagtgagccaagatcgcgccactgcactccagtctggcgacagagcaagactccgtctcaaaaaaaamaaaaacaaacaaacaaaaaaaagaagatatgctatccacatctatgaaatcataggtatctaacacatttttaacccgatacttacacagtaatcacattgctggcactgttgtgttttacagattttaactcatttaatctttataatgacactaagaagtaaatgtcatttgccatagcataactttgaaaacacaatagacccaataatagactcaacattcgactttacgtgaagatctgaggaacttttcaccatagaatggtaagcacatatctcaaaaataaatttaaaagtttcacatgaggtacagaagctacaaggtgcatccatttgtcttgggtgaaagtacagctttactgttattttttctgcaaatttatgtgaaattctatccaggagtcagtctcaggaggacagcctgcctacatgt

SEQ ID NO: 74505 - DNA, 2131 bp, Homo sapiens
aatgcattattttaatgtttagtgaatttaatagtcttttaaatcattatccttagagtaaaactcaggaaaatataatacacttcatatgaaaagacgtgccttttacagaatatatgagagctaatgctcttaagcagtttgtaaattaagtgatttccctaattaattatttttttccgggtaacctatctataaatgatttgcacatgacatgcaaggccttccgtcttctcacaatactacaattgctggtaaaatttaagtgcattatgtcttctttctttctttcttttttctttcagtgcattatgtcttctttctttctttcagtgcattatgtctgctttctttcttttcttttctttctttgctttccttgctttccttgcctttctttctttctttctctttttctttctctttcttttctttctttctctctctttctttctttctctttctttctttctctttctttctttctttctttctttctttctttctttctttctttcttcttttcttttctttctttctttctttctttctttccttctttctctttcttgacagattctcactgttgtcacccaggctggagggcagtggcatagtagcatgatcttggctcactgcaacctctgccccttgggttcaagagactctcatgcctcagcctcctgagtagccgggattacaggtgtgtaccaccatgcctggctaattattattattattattatttgagatgatgtctcactctgtcgcccaggttacagtgcggtggcgtgatctcggctcactgcagcctccatctcccagattccagctattcccctgcctcagcctcttaggtagctgggattacaggcacgtgccaccatgccaggctaatttttgtctttttaatatagatggggttttgccatgttggccaggctgctctcgaactcctggcctcaagtgatcctccccactcagcctcccaaagtgcttagattacaggtgtgagccaccatgccttgccaattatgtcttatatattatgctacataggccttaacagttttgattgtagcagcctgtgctttacagacattgttaattttgatttgtaattctgtgaatttatatgacttttggtagtaaaaatatatgaaatatatatttttattttttataaatttgacctttttttaaaaaaataaccagattacaaaaaagtaaatctatgactgcatcaaatatagtcaaaagatgcatgtgattctattaagaacaagtctcttagtgctctttaacactaaacatcttctccactaatttgtcacatcattcaaatatgtgactgccaatgagaaagttattatttctattcatgttatagaagatatgctatccacgggctgggtgcagtggctcacgcctgtaatcccagcactttggaaggcggaggcgggtggatcacgaagtcaggagatcgagaccatcctggctaacacgctgaaaccccatctctactaaaaatacaaaaaattagccggacgtggtggcgggcgcctgtagtcccagctactcaggaagctgaggcaggagaatggcgtgaacccaggaggcggagcttgcagtgagccaagatcgcgccactgcactccagtctggcgacagagcaagactccgtctcaaaaaaaacaaaaamaaacaaacaaaaaaaagaagatatgctatccacatctatgaaatcataggtatctaacacatttttaacccgatacttacacagtaatcacattgctggcactgttgtgttttacagattttaactcatttaatctttataatgacactaagaagtaaatgtcatttgccatagcataactttgaaaacacaatagacccaataatagactcaacattcgactttacgtgaagatctgaggaacttttcaccatagaatggtaagcacatatctcaaaaataaatttaaaagtttcacatgaggtacagaagctacaaggtgcatccatttgtcttgggtgaaagtacagctttactgttattttttctgcaaatttatgtgaaattctatccaggagtcagtctcaggaggacagcctgcctacatgt

SEQ ID NO: 74506 - DNA, 2131 bp, Homo sapiens
aatgcattattttaatgtttagtgaatttaatagtcttttaaatcattatccttagagtaaaactcaggaaaatataatacacttcatatgaaaagacgtgccttttacagaatatatgagagctaatgctcttaagcagtttgtaaattaagtgatttccctaattaattatttttttccgggtaacctatctataaatgatttgcacatgacatgcaaggccttccgtcttctcacaatactacaattgctggtaaaatttaagtgcattatgtcttctttctttctttcttttttctttcagtgcattatgtcttctttctttctttcagtgcattatgtctgctttctttcttttcttttctttctttgctttccttgctttccttgcctttctttctttctttctctttttctttctctttcttttctttctttctctctctttctttctttctctttctttctttctctttctttctttctttctttctttctttctttctttctttctttcttcttttcttttctttctttctttctttctttctttccttctttctctttcttgacagattctcactgttgtcacccaggctggagggcagtggcatagtagcatgatcttggctcactgcaacctctgccccttgggttcaagagactctcatgcctcagcctcctgagtagccgggattacaggtgtgtaccaccatgcctggctaattattattattattattatttgagatgatgtctcactctgtcgcccaggttacagtgcggtggcgtgatctcggctcactgcagcctccatctcccagattccagctattcccctgcctcagcctcttaggtagctgggattacaggcacgtgccaccatgccaggctaatttttgtctttttaatatagatggggttttgccatgttggccaggctgctctcgaactcctggcctcaagtgatcctccccactcagcctcccaaagtgcttagattacaggtgtgagccaccatgccttgccaattatgtcttatatattatgctacataggccttaacagttttgattgtagcagcctgtgctttacagacattgttaattttgatttgtaattctgtgaatttatatgacttttggtagtaaaaatatatgaaatatatatttttattttttataaatttgacctttttttaaaaaaataaccagattacaaaaaagtaaatctatgactgcatcaaatatagtcaaaagatgcatgtgattctattaagaacaagtctcttagtgctctttaacactaaacatcttctccactaatttgtcacatcattcaaatatgtgactgccaatgagaaagttattatttctattcatgttatagaagatatgctatccacgggctgggtgcagtggctcacgcctgtaatcccagcactttggaaggcggaggcgggtggatcacgaagtcaggagatcgagaccatcctggctaacacgctgaaaccccatctctactaaaaatacaaaaaattagccggacgtggtggcgggcgcctgtagtcccagctactcaggaagctgaggcaggagaatggcgtgaacccaggaggcggagcttgcagtgagccaagatcgcgccactgcactccagtctggcgacagagcaagactccgtctcaaaaaaaacaaaaacaaamaaacaaaaaaaagaagatatgctatccacatctatgaaatcataggtatctaacacatttttaacccgatacttacacagtaatcacattgctggcactgttgtgttttacagattttaactcatttaatctttataatgacactaagaagtaaatgtcatttgccatagcataactttgaaaacacaatagacccaataatagactcaacattcgactttacgtgaagatctgaggaacttttcaccatagaatggtaagcacatatctcaaaaataaatttaaaagtttcacatgaggtacagaagctacaaggtgcatccatttgtcttgggtgaaagtacagctttactgttattttttctgcaaatttatgtgaaattctatccaggagtcagtctcaggaggacagcctgcctacatgt

SEQ ID NO: 74507 - DNA, 1010 bp, Homo sapiens
tattttatgtaaattcaggatatattagtgtcagaacaaaggaggctgatgtaacactgatatcctgggaaagtcactgatttaaytctaatgtgatgaaagaatggattggaatttttttcttttattgaaataacattttgtcaaataaggttgcttttggggaaaccatgttgtcatttttttttttctgagatggagtctcactctgttgcccatgctagagtgcagtggtgccgtctcagctcactgtaacctccacctcctgggttcaagcaattctcctgcctcagctcccagagtagctgggactacaggtgcgtgccactgtgcctggctaatttttgtatttttagtagagacagggtttcaccatgttggccaagctggtctcgaattcctgaccacaggtgaccctcctgcctcggcttcccaaagtgctgggattacaggtgtgagccactgtgcctggccaagaaaccatttataatatggatataatacggatattacattacttggtatatataagaaaggcctatcagttacctagtgagagtggtcaggaaagtaagacaaacatgttaattcagaccacaaagagtattttgggcacagcttgaagttgctttaaaggcatactgaatgagaaaataggtctctcagaagcagtggttcttagcctgtgtttcacattatagtcacctgaggagctttgaaacaagtgatgcctgggctgcattcccagcaatgctgatttaattaatctgtgggtggggcctgggcatcagtattttttcaaagcattctagatgatttatatgtacagccaagatacagacccagtttcagactttaaatatgttgactcaggtcatttccctataagaggaaaagctgagacttgacattagttcgggtgttaaatctagaccacaatttcctagttgcttcttcactcacattggcctagtagattatgtagcaaaacattccttgagcatttaggg

SEQ ID NO: 74508 - DNA, 1010 bp, Homo sapiens
tattttatgtaaattcaggatatattagtgtcagaacaaaggaggctgatgtaacactgatatcctgggaaagtcactgatttaactctaatgtgatgaaagaatggattggaatttttttcttttattgaaataacattttgtcaaataaggttgcttttggggaaaccatgttgtcatttttttttttctgagatggagtctcactctgttgcccatgctagagtgcagtggtgccgtctcagctcactgyaacctccacctcctgggttcaagcaattctcctgcctcagctcccagagtagctgggactacaggtgcgtgccactgtgcctggctaatttttgtatttttagtagagacagggtttcaccatgttggccaagctggtctcgaattcctgaccacaggtgaccctcctgcctcggcttcccaaagtgctgggattacaggtgtgagccactgtgcctggccaagaaaccatttataatatggatataatacggatattacattacttggtatatataagaaaggcctatcagttacctagtgagagtggtcaggaaagtaagacaaacatgttaattcagaccacaaagagtattttgggcacagcttgaagttgctttaaaggcatactgaatgagaaaataggtctctcagaagcagtggttcttagcctgtgtttcacattatagtcacctgaggagctttgaaacaagtgatgcctgggctgcattcccagcaatgctgatttaattaatctgtgggtggggcctgggcatcagtattttttcaaagcattctagatgatttatatgtacagccaagatacagacccagtttcagactttaaatatgttgactcaggtcatttccctataagaggaaaagctgagacttgacattagttcgggtgttaaatctagaccacaatttcctagttgcttcttcactcacattggcctagtagattatgtagcaaaacattccttgagcatttaggg

SEQ ID NO: 74509 - DNA, 1010 bp, Homo sapiens
tattttatgtaaattcaggatatattagtgtcagaacaaaggaggctgatgtaacactgatatcctgggaaagtcactgatttaactctaatgtgatgaaagaatggattggaatttttttcttttattgaaataacattttgtcaaataaggttgcttttggggaaaccatgttgtcatttttttttttctgagatggagtctcactctgttgcccatgctagagtgcagtggtgccgtctcagctcactgtaacctccacctcctgggttcaagcaattctcctgcctcagctcccagagtagctgggactacaggtgcgtgccactgtgcctggctaatttttgtatttttagtagagacagggtttcaccatgttggccaagctggtctcgaattcctgaccacaggtgaccctcctgcctcggcttcccaaagtgctgggattacaggtgtgagccactgtgcctggccaagaaaccatttataatatggatataatacggatattacattacttggtatatataagaaaggcctatcagttacctagtgagagtggtcaggaaagtaagacaaacatgttaattcagaccacaaagagtattttgggcacagcttgaagttgctttaaaggcatactgaatgagaaaataggtctctcagaagcagtggttcttagcctgtgtttcacattatagtcacctgaggagctttgaaacaagtgatgcctgggctgcattcccagcaatgctgatttaattaatctgtgggtggggcctgggcatcagtattttttcaaagcattctagatgatttatatgtacagccaagatacagacccagtttcagactttaaatatgttgaytcaggtcatttccctataagaggaaaagctgagacttgacattagttcgggtgttaaatctagaccacaatttcctagttgcttcttcactcacattggcctagtagattatgtagcaaaacattccttgagcatttaggg

SEQ ID NO: 74510 - DNA, 579 bp, Homo sapiens
tgaatattcattatttttctttaattgttaaaataaaagtaagtgtgaatgtcaatcttctcttccaagaaaattagcatctgaaatatttctgtggagaaacaaggcaataatgaaaatgatgaatgaatacttctccttytgggaatgtacacaaccagttattcctcccacagcatctcagggaagcagcgcccaccctccacagggctcaggcactgggtttgtttctgtctgatgagaaagccttgatcagactccatctgaaaaggtcttcctggtatctggcttctttaacacaccaattgtcatgcttttattactattcccatcacagaggacagcatgaagcctcgagttttcttgttttatttaaggtactcaaaactctggcttttatcatgtcacatacatacgccatcaggagagaggacaaagcagctgcagagtatcaagggatctaaaaacacacaggctgcctgggcaaatccagagtacactaagaagatctgtttaagtgcttctatttgattcccgcccccacttcagagtaggtggggggaacctctctttgggtaa

SEQ ID NO: 74511 - DNA, 538 bp, Homo sapiens
agctagctctgacaactccctctttcaaagccttcctctgttatccatctgcaaaatgaggaattttgactgaggatttctaacaagggatttgtgacaaggggacaaaacaggggttccagagaagctgcaagaaatgaagttcaaagcatgcagggaatcagaagaccctactccaggacctttctgtcttttgtgaactacagtacttttcccttagcttcaaggcagtggagaaggatgcttaatggcaatactcctcaaagcatggaccctgaaatcctggggttccaagaaaktgcctcaacatctattgtagaaagcaaggagtaggccagtcttagaaactgtaccttaatccatttgaggtactacgttctaggtgagagttcatttgcaagaaaagtagactttgctgcttacaaaaaagaaatttgaaagcaagagcagaattggtcactgacttaggatttaaagtacatcatcatcagagggtcatgaaatcctgacaatcctctggctctggtatgctcgaaac

SEQ ID NO: 74512 - DNA, 538 bp, Homo sapiens
agctagctctgacaactccctctttcaaagccttcctctgttatccatctgcaaaatgaggaattttgactgaggatttctaacaagggatttgtgacaaggggacaaaacaggggttccagagaagctgcaagaaatgaagttcaaagcatgcagggaatcagaagaccctactccaggacctttctgtcttttgtgaactacagtacttttcccttagcttcaaggcagtggagaaggatgcttaatggcaatactcctcaaagcatggaccctgaaatcctggggttccaagaaagtgcctcaacatctattgtakaaagcaaggagtaggccagtcttagaaactgtaccttaatccatttgaggtactacgttctaggtgagagttcatttgcaagaaaagtagactttgctgcttacaaaaaagaaatttgaaagcaagagcagaattggtcactgacttaggatttaaagtacatcatcatcagagggtcatgaaatcctgacaatcctctggctctggtatgctcgaaac

SEQ ID NO: 74513 - DNA, 538 bp, Homo sapiens
agctagctctgacaactccctctttcaaagccttcctctgttatccatctgcaaaatgaggaattttgactgaggatttctaacaagggatttgtgacaaggggacaaaacaggggttccagagaagctgcaagaaatgaagttcaaagcatgcagggaatcagaagaccctactccaggacctttctgtcttttgtgaactacagtacttttcccttagcttcaaggcagtggagaaggatgcttaatggcaatactcctcaaagcatggaccctgaaatcctggggttccaagaaagtgcctcaacatctattgtagaaagcaaggagtaggccagtcttagaaactgtaccttaatccatttgaggtactacgttctaggtgagagttcatttgcaagaaaagtagactttgctgcttacaaaaaagaaatttgaaagcawgagcagaattggtcactgacttaggatttaaagtacatcatcatcagagggtcatgaaatcctgacaatcctctggctctggtatgctcgaaac

SEQ ID NO: 74514 - DNA, 1030 bp, Homo sapiens
gcatctcatggtgctaaataccaactacaagctgatgactcccaaagcttttacatgcccaacctgggtccctcccctgacattcagaccactagactcaaccatcaacacagaagcctctaacgcatcctgatatgaacacccatccttccctgaaaatcagcacttcctgctgccagccccctctagactccagcagcaaactcaccaaaacatagccagaactcagcagcatcttctcgcctctggcatcaccactctggcccaagcccctagtgccctgagcctgcgctagagcagcagcctctaagtggtctccctgcttcttccatttagtctgtgatcccatgatatcactcaaagtgaagagtccttctgtattagtcatggccccatggcttctctgttttcattgtcaaatattttccaccccctccaccctccaccagatgtccctgtgattcctcagacaggccagatgcacccttttgggcctccgaacctgctgcttccctctccccaatgtccctgcctcctcacttcattctagtctttgctcattggcagcttctcagtgaggcctttccctggccccatctgaaatatcaaacctcctaaaatgaataaaaaataaaatgtcaactcctcactttatacccccacttccctgccttactttttctccttgacacttacactaccagactctgtgttttactgatttagcctgattgctggctgtctccctcaccagcatctatgctccagaaaggcaggcattcctgtcggtttactgttgctagaacagtgtttggcacataataggtaggtacttactattcattcagtgaatgggagtaaatggatgaatttacaratttgaatccctctttttttcaattttaatttttttatttccattttttattttaagttctgtgatacatgtgctgaatgtgcaggttacataggtatacatgtgccatggtggtttgctgcacctattaacccaccatctagttttaagccc

SEQ ID NO: 74515 - DNA, 638 bp, Homo sapiens
aggaggccaaagtagttatactttaaaaagacagggtaaggaagagaaaatagatacatggagagagtcccatcaatttgcagaaggcacttgttcagtcattagctgagtagtgatcagcacatgtatgtgaggaaactacttgaggccaagaacaaagctgtatcagacaagcagagggaaaaaatccttgcagcttgcataaggtcaggaatatttcacatgcctcatagccagaaagaaaaatctcataattctcgaggcattgaacagagtatttaagctctagttacagcaaaacaaagcttaaaaagcaagattggagaggaaaataaataattccaagtaatttaactgtatcccataataaagtttaagaatatttataggaattaaaagatacagcactcaaaaagtaaaattcataatgtgtgtcatttaataaaaaattaacaggaatacaaataaattacaattcataatgaagaaattaataaaaagacccagaaatgacacagataatagaattagtagtaaaggcatttaaatagtcaaraggataaaggtttagcatgttaagcagagatatagatgtttttagaaagatctaaatacaattcctagaaataaaaatatac

SEQ ID NO: 74516 - DNA, 765 bp, Homo sapiens
attcacagttctcagacattgtaaaagtgtaaatgggtctcaagaccaaatagttttgagaactgttagcctatagtaaataaagtgtagctcctgaaatttccttgtcagtatacaaaagaaggagttagaaaactcagagaggaggtatccttactaaaatggatttgttatataaaatcagagaatcaccagttcactatgtgtcctgggagggagcagaggacactagaatttattaaagcaataaaaaaatgcacaagtcggggaggcacagtctgtcccctgtaggcttgaatgaatgatggargataccattacaaactaggctccctagtgtcaatatggatgatagaattccagaacagcagagtccaaattatgctacgtaacagtcagaggaaaggtggagatgattatgttaatggacagcaaaagagaatggcaaccatggcacctaacccattgggatcttcactatggctaaaataccatggtattcacaggagtgaaaccgatggaaaacaattagaatgttgcttgacttatgtaattttttaaaatgctttgagatggaaaacagaaggctgatatcaagtgatgcaatctaaaaatcacaagctgtttccggacttgagccagttcttagacacagagtccatcaattgaagcagaggtcagacactcttaaggaaggaccctgcatccccacagtagtatgtacaaaatatttccccagtccttacccaaaaggacttacatgca

SEQ ID NO: 74517 - DNA, 765 bp, Homo sapiens
attcacagttctcagacattgtaaaagtgtaaatgggtctcaagaccaaatagttttgagaactgttagcctatagtaaataaagtgtagctcctgaaatttccttgtcagtatacaaaagaaggagttagaaaactcagagaggaggtatccttactaaaatggatttgttatataaaatcagagaatcaccagttcactatgtgtcctgggagggagcagaggacactagaatttattaaagcaataaaaaaatgcacaagtcggggaggcacagtctgtcccctgtaggcttgaatgaatgatggaggataccattayaaactaggctccctagtgtcaatatggatgatagaattccagaacagcagagtccaaattatgctacgtaacagtcagaggaaaggtggagatgattatgttaatggacagcaaaagagaatggcaaccatggcacctaacccattgggatcttcactatggctaaaataccatggtattcacaggagtgaaaccgatggaaaacaattagaatgttgcttgacttatgtaattttttaaaatgctttgagatggaaaacagaaggctgatatcaagtgatgcaatctaaaaatcacaagctgtttccggacttgagccagttcttagacacagagtccatcaattgaagcagaggtcagacactcttaaggaaggaccctgcatccccacagtagtatgtacaaaatatttccccagtccttacccaaaaggacttacatgca

SEQ ID NO: 74518 - DNA, 765 bp, Homo sapiens
attcacagttctcagacattgtaaaagtgtaaatgggtctcaagaccaaatagttttgagaactgttagcctatagtaaataaagtgtagctcctgaaatttccttgtcagtatacaaaagaaggagttagaaaactcagagaggaggtatccttactaaaatggatttgttatataaaatcagagaatcaccagttcactatgtgtcctgggagggagcagaggacactagaatttattaaagcaataaaaaaatgcacaagtcggggaggcacagtctgtcccctgtaggcttgaatgaatgatggaggataccattacaaactaggctccctagtgtcaatatggatgatagaattccagaacagcagagtccaaattatgctacgtaacagtcagaggaaaggtggagatgattatgttaatggacagcaaaagagaatggcaaccatggcacctaacccattgggatcttcactatggctaaaataccatggtattcacaggagtgaaacygatggaaaacaattagaatgttgcttgacttatgtaattttttaaaatgctttgagatggaaaacagaaggctgatatcaagtgatgcaatctaaaaatcacaagctgtttccggacttgagccagttcttagacacagagtccatcaattgaagcagaggtcagacactcttaaggaaggaccctgcatccccacagtagtatgtacaaaatatttccccagtccttacccaaaaggacttacatgca

SEQ ID NO: 74519 - DNA, 765 bp, Homo sapiens
attcacagttctcagacattgtaaaagtgtaaatgggtctcaagaccaaatagttttgagaactgttagcctatagtaaataaagtgtagctcctgaaatttccttgtcagtatacaaaagaaggagttagaaaactcagagaggaggtatccttactaaaatggatttgttatataaaatcagagaatcaccagttcactatgtgtcctgggagggagcagaggacactagaatttattaaagcaataaaaaaatgcacaagtcggggaggcacagtctgtcccctgtaggcttgaatgaatgatggaggataccattacaaactaggctccctagtgtcaatatggatgatagaattccagaacagcagagtccaaattatgctacgtaacagtcagaggaaaggtggagatgattatgttaatggacagcaaaagagaatggcaaccatggcacctaacccattgggatcttcactatggctaaaataccatggtattcacaggagtgaaaccgatggaaaacaattagaatgttgcttgacttaygtaattttttaaaatgctttgagatggaaaacagaaggctgatatcaagtgatgcaatctaaaaatcacaagctgtttccggacttgagccagttcttagacacagagtccatcaattgaagcagaggtcagacactcttaaggaaggaccctgcatccccacagtagtatgtacaaaatatttccccagtccttacccaaaaggacttacatgca

SEQ ID NO: 74520 - DNA, 765 bp, Homo sapiens
attcacagttctcagacattgtaaaagtgtaaatgggtctcaagaccaaatagttttgagaactgttagcctatagtaaataaagtgtagctcctgaaatttccttgtcagtatacaaaagaaggagttagaaaactcagagaggaggtatccttactaaaatggatttgttatataaaatcagagaatcaccagttcactatgtgtcctgggagggagcagaggacactagaatttattaaagcaataaaaaaatgcacaagtcggggaggcacagtctgtcccctgtaggcttgaatgaatgatggaggataccattacaaactaggctccctagtgtcaatatggatgatagaattccagaacagcagagtccaaattatgctacgtaacagtcagaggaaaggtggagatgattatgttaatggacagcaaaagagaatggcaaccatggcacctaacccattgggatcttcactatggctaaaataccatggtattcacaggagtgaaaccgatggaaaacaattagaatgttgcttgacttatrtaattttttaaaatgctttgagatggaaaacagaaggctgatatcaagtgatgcaatctaaaaatcacaagctgtttccggacttgagccagttcttagacacagagtccatcaattgaagcagaggtcagacactcttaaggaaggaccctgcatccccacagtagtatgtacaaaatatttccccagtccttacccaaaaggacttacatgca

SEQ ID NO: 74521 - DNA, 765 bp, Homo sapiens
attcacagttctcagacattgtaaaagtgtaaatgggtctcaagaccaaatagttttgagaactgttagcctatagtaaataaagtgtagctcctgaaatttccttgtcagtatacaaaagaaggagttagaaaactcagagaggaggtatccttactaaaatggatttgttatataaaatcagagaatcaccagttcactatgtgtcctgggagggagcagaggacactagaatttattaaagcaataaaaaaatgcacaagtcggggaggcacagtctgtcccctgtaggcttgaatgaatgatggaggataccattacaaactaggctccctagtgtcaatatggatgatagaattccagaacagcagagtccaaattatgctacgtaacagtcagaggaaaggtggagatgattatgttaatggacagcaaaagagaatggcaaccatggcacctaacccattgggatcttcactatggctaaaataccatggtattcacaggagtgaaaccgatggaaaacaattagaatgttgcttgacttatgtaattttttaaaatgctttgagatggaaaacagaaggctgatatcaastgatgcaatctaaaaatcacaagctgtttccggacttgagccagttcttagacacagagtccatcaattgaagcagaggtcagacactcttaaggaaggaccctgcatccccacagtagtatgtacaaaatatttccccagtccttacccaaaaggacttacatgca

SEQ ID NO: 74522 - DNA, 688 bp, Homo sapiens
agccattctgactggtgtgagatggtatctcattgtagtttcgatttgcatttctctaatgatcattgatgttgagctttttttcatatgattgttggctgcatgtattgtcttattttgaaaagtgtctgtttgtgtcctttgcccactttttaatggggttgctttttgcttataaatttaagtttcttgtagacgccagacattagatctttgtcagatacatagtttgcaaaaattttctcccattctgtaggttgtctcttcactctattaatagtttcttttgctgtgcagaggctctttagtttaattagatcctgtttgtcaatttttgcttttgttgcaattgcttcggtgtcttcatcatgaaatctttgcccattcctatgcccagaatggtattgcctaggttgtcttccagcattgttatagttcggggttttacgtttaagtctttaattcgtcttgagtaaatttttgtgtatggtgtaaggaatagatctagtttcaatcttctgcatatggctagccagttatcccagcaccagccaagtggttttttcatccccgctatgttcaattcaaatttatttaaccatggaacaattattttatttttatttttattttaccgtaatattttaccaaacaaawactgtcaattgaaaggagcatttaacagagc

SEQ ID NO: 74523 - DNA, 1006 bp, Homo sapiens
aataattatcttcaggacctcggcaaaacctgagtcctgtgctctcgctttcctccccgtacacagagagcttcaccacttgctccgcaccttctccatcaactactacctgtccctgggatctgtccagtcgcccagctaaagtgctcagcaggtcagcagcgcggcgagcttctatgaggcgtggggtctggggctcctggatctctgtgtcccatttcacagagattgccacctactgccgcctgctagaagatggggaggacttcaatcttggtggtattctggacagcagcaaatacctgtaaagcatccaaaagaccaacacccacaggatagtggacggcaaagtggtgtctgagaccaacatcacagacgtcttgaggtgctaaaccagcagaagcaaggtccctttgcggagcaggagggcaataaaaacttctgtggtcaaaaaaaaaaaaaaaaaaaaaattacccycgcatcacagaggtgttttcctcacgcaaacgtaatatagattcattaatacatagatgtggaaattagggcaatttccacaactactcacccagagaggattaaaaaaataattgaccaccaactaattaaataaatacagaagtcataaataaagcatgagtaatgtttatacagtcaaacgaacagagaattatgtttgcaatacacatatggttgattcatatttgactttttttctacactcttttaaagtgtacacagttaaatatagtcataaaaaattataacatataagcagaaactaaaaacacaattaaatgatgtaagacagcctatcctaacaggaaaatacaggaatataaaatattacaaaacaaaattggataaacattaacctgtgaaatactgaataaacaaatcatgcaactgaagaagactctttctagataactgaaatattcaaccataactggacacccataaagaacagattttgaattattagcatatggttagagtaacaaa

SEQ ID NO: 74524 - DNA, 1006 bp, Homo sapiens
aataattatcttcaggacctcggcaaaacctgagtcctgtgctctcgctttcctccccgtacacagagagcttcaccacttgctccgcaccttctccatcaactactacctgtccctgggatctgtccagtcgcccagctaaagtgctcagcaggtcagcagcgcggcgagcttctatgaggcgtggggtctggggctcctggatctctgtgtcccatttcacagagattgccacctactgccgcctgctagaagatggggaggacttcaatcttggtggtattctggacagcagcaaatacctgtaaagcatccaaaagaccaacacccacaggatagtggacggcaaagtggtgtctgagaccaacatcacagacgtcttgaggtgctaaaccagcagaagcaaggtccctttgcggagcaggagggcaataaaaacttctgtggtcaaaaaaaaaaaaaaaaaaaaaattacccccgcatcacagaggtgttttcctcacgcaaacgtaatatagattcattaatacatagatgtggaaattagggcaatttccacaactactcacccagagaggattaaaaaaataattgaccaccaactaattaaataaatacagaagtcataaataaagcatgagtaatgtttatacagtcaaacgaacagagaattatgttkgcaatacacatatggttgattcatatttgactttttttctacactcttttaaagtgtacacagttaaatatagtcataaaaaattataacatataagcagaaactaaaaacacaattaaatgatgtaagacagcctatcctaacaggaaaatacaggaatataaaatattacaaaacaaaattggataaacattaacctgtgaaatactgaataaacaaatcatgcaactgaagaagactctttctagataactgaaatattcaaccataactggacacccataaagaacagattttgaattattagcatatggttagagtaacaaa

SEQ ID NO: 74525 - DNA, 229 bp, Homo sapiens
aataaatgaagttatatccagggaccatgatgagtagagataagattcattttcccagttggaatctttctatgaacagaattcatctggttgtgttgcggtacttttctcattttcaaatkcagctccattaaaaaaagttatatgtggaggaaggaatgatgggaaaaaagagaaacaatttatttatacatgtcagtctgactcaccttatttgctataatgccct

SEQ ID NO: 74526 - DNA, 971 bp, Homo sapiens
ttggtggaattatggaattgtagactgcttttagtcatcttgttttataagcaaaagtaaccctttctatggtcaagttttctgttactttcagccagaaatattcccaagtgacagaaaaaaaaaaggtcaatcaaaacaaaaatgaatgtaaacaatgatcattaacaaaaaccagtctcaatgatgttaacagaatgtgcatatgagacaaatagcaaatagtgcttagtttattttacaactgcaagtaaaaacaaacattttatgtcaattaaattagcaaaataaatcaaagtactaaaagtaccgattagatatctgcagagaaacagtgctttttttttttgttttkttttttttttttgagacagagtcttgctctgtcacccaggctggagtgcaatggtgtgatctcggctcactgcaacctccgtctcccgggttcaagcgattctcctacctcagcctcccaagtagctgggattacaggcgcccaccaccatgcctggctaatttttgcatttttagtagagacggagtttcaccacgttggccaggctggtctcctcctgacctcaggcgatccacctgcctcggcctcccaaagtgctgggattacagccatgagccaccacacccagccttgcttattagttagtaaattagtttattcttccaaggacaatctgctattaccaggaccgtcaccttaagtgtatgccaacggcactcctggcatgtgccacctatagctctggataccatctgtgatcatttccccctacctcctcagtctgctttcttgccttttcctcataaggccaatctataaaagtaagagtacctcaggtcttggtccttgacactctttattctttctctggattcactcagctagccctgtgtctttaaatactatccatgatatggtttggagatttgtcctctccaaatctcatgatgaaatg

SEQ ID NO: 74527 - DNA, 946 bp, Homo sapiens
  misc_feature (1)...(946): n = A,T,C or G
taaaagatgaagggtatagtacctgggcatgacagactggtgatttaaaacttcattaatggctactgatcatgcagatagcctgcacatgtaaaataacaccttaaaaaataaagggctgggcacggtggctcatgcctgtaatcccagtactttgggaggctgaggtcggcggatcacgaggtcaagagatcgagaccatcttggccaacatggtgaaaccccatctctactaaaacacaaaaaattagctgagcttggtggctcgagcctgtagtcccagctactcaggagactgaggcaggagaatcactkgaatccangaggcggaggtttcagtgagctgagattgagccactgccttccagcctggcgacagagcaagactctgtctcaaaagataaaggatgaaagcagaagacatctagatgtcaggaatggcctgaagaaaggctcanggatgaggagagggcctgtaaaagtgatcttaaaaagagtgtattttggatgtcatattaaagtttggcaagtattcttttctgtaaaatgttgctatgacttaaaaatatccaatcagcttcatctttccacgaattttaagtaggggaaaaaactaaataaatgcttactgtcctcctcattacttctgcccccatgatagcctttgcccacagttcttcacatctttgtttgcctaaccccagaaagagacctggagaaactatagactctttcacacattgtgaaagctaatatccaaattttcacactgcaattgtaaacggttgcaaagaatataatttctggcatgttataaatactgagttttaaataaaaccattacatctcttaaacgtatccattctgacctaaatgccatagccatccccacaaccgatatccattttaaaaaaataaatgaacaaactctttcaaaagaggtgga

SEQ ID NO: 74528 - DNA, 672 bp, Homo sapiens
cgacctcaggtgatccacccacttcagtctctcaaagtgctgagattgcaggcgttagccactgcgcccggccagtaacttaatgactatagccgggccttcatagatttttctacctatgagcatcctaaaataagtagaattaaaacattaaaaaaaaggaagtttcaaagtgtgttcctgcttctttgtctttagagacagtacggcacaatgaagttggaggtcaattttaactctggattggctacctacccctctcagtctcagtttctaacatgtaaaataaggacagtaacatgattcctattagatttttgtggggtttacataagacatgcatgcraagtaagtgctcagtgactgttctcccttttccttacacataagaaatactttgtttgtttgcttgtttgtttgttttgagacggggtcccactttgttgcccaagctggagtgcagtggcagcattattgctcactgcagccttgacctcacaggctcaagaggggcgagagtagaagtttggatttcattctaatcgtatagaaaaccactggagggttgtatacgtaatctgaattgtatttttaaaagatcattttggcacttataaaattgagatataaggggcaagagtagaagcaaggagaccactagaaggcaactat

SEQ ID NO: 74529 - DNA, 672 bp, Homo sapiens
cgacctcaggtgatccacccacttcagtctctcaaagtgctgagattgcaggcgttagccactgcgcccggccagtaacttaatgactatagccgggccttcatagatttttctacctatgagcatcctaaaataagtagaattaaaacattaaaaaaaaggaagtttcaaagtgtgttcctgcttctttgtctttagagacagtacggcacaatgaagttggaggtcaattttaactctggattggctacctacccctctcagtctcagtttctaacatgtaaaataaggacagtaacatgattcctattagatttttgtggggtttacataagacatgcatgcaaagtaagtgctcagtgactgttctcccttttccttacacataagaaatactttgtttgtttgcttgtttgtttgttttgagacggggtcccactttgttgcccaagctggagtgcagtggcagcattattgctcactgcagccttgacctcacaggctcaagaggggcgagrgtagaagtttggatttcattctaatcgtatagaaaaccactggagggttgtatacgtaatctgaattgtatttttaaaagatcattttggcacttataaaattgagatataaggggcaagagtagaagcaaggagaccactagaaggcaactat

SEQ ID NO: 74530 - DNA, 518 bp, Homo sapiens
aagacagcaggagcaacaaggagggacaaccacgacctaggagggcatgatgccagagacacctggaccccacgctaggctcagtgcttgttatactcttgggacccagtgctttccctctccatcatgtggcatacttggcgttrtttcttgtttaaaatattgtccttagttttcacctttcctaggagacactggcagaccctgtgacactacagtgtctggcacacagtaggtgcatcacaaacatctgccgagttcacacactcttgccttctcaaaacttcttgtcaagtcttcagtgaaaaggaattgctgattgagcaagaattaaacttctagagactcctggatccactgaagtttgagacaaagtgagatttgtttgctgtcatattcctagctcatagcatactgtagtcaattaaaaaatgttcgttgaatcagtgagtgaattgattcttacgtcatacttagctatatattttctgagtaaaattgataaatttaatagttta

SEQ ID NO: 74531 - DNA, 518 bp, Homo sapiens
aagacagcaggagcaacaaggagggacaaccacgacctaggagggcatgatgccagagacacctggaccccacgctaggctcagtgcttgttatactcttgggacccagtgctttccctctccatcatgtggcatacttggcgttgtttcttgtttaaaatattgtccttagttttcacctttcctaggagacactggcagaccctgtgacactacagtgtctggcacacagtaggtgcatcacaaacatctgccgagttcacacactcttgccttctcaaaacttcttgtcaagtcttcagtgaaaaggaattgctgattgagcaagaattaaacttctagagactcctggatccactgaagtttgagacaaagtgagatttgtttgctgtcatattcctagctcatagcatactgtagtcaattaaaaaatgttcgttgaatcagtgagtgaattgattcttacgtcatacttarctatatattttctgagtaaaattgataaatttaatagttta

SEQ ID NO: 74532 - DNA, 698 bp, Homo sapiens
gggaaaatgttgggtgcccagtgcaggctaagtgctcggcccacagccgcgtcggcctgcggggctctcacctgcccactggatcgccagcctgggttacttcatccgggagcgattcagaggatttccgcctcccagggaatgagcgaattccccaaagaacagagcagagacttgaatggttgtccgtttttcatccacagggttcacagatgacatatccccatgctgagcctgcaacagagcgcaaggcagatactcccacccacacaggagtcacactcaagccgagtgagccaagattccggattccacgttcctttgccctctgcaaggggtcctgctgctcacgtgtctctggcccccaaaagcgtgaccatgttgactgtttgtttcccgagctctgtggggacacagaaacctccagcgaagcatggaaacgcagcatcgtgtcttcgctctcctttcgtttccaaacaggccattttggagactccccatgttgcaggaaacaggaatccctcatcagtccgtgatgactcagtcccctgcccagactacaggcccaccaggcggcctcccttttgctgacactccaggccttcccccggctcgcgagctcccgagtttccaacacatcgggcsggctcaggacagggtgtgcttggaggcctcagggcccggggcccacagttctg

SEQ ID NO: 74533 - DNA, 1731 bp, Homo sapiens
attctacaaaaagagtgcttcaaaacggctcaatcgaacgaaagtttcacctctgtgaaatgaatgcacacatcacaaaatagtttctcagaatgcttctttgtagtttttatgtgaagatatttgctttgtcataataggcctcaaagcgctccagatatccacttgcagattctacaaatagagtgtttcaaaactgctcaatcagaagaacatgtcaactctgtgagatgaaggctcacatcacaaagaagttcctcataatgcttctgtgtagtttttatgtgaagaaatttccttttcgacaataggcctcaaatcgctccaaatatccacttgcagattctacagaaaaagtgtttcaaaactgctcaatcaaaagaagtgttcaactctgtgagatgaatgcacacatcacaaagaaggttctccggatgatgtccgaataggaacagctccagtctacagctcccagcgtgagcgacgcagaagacgggtgatttctgcatttccttctgaggttctgtgttcatctcactagggcatgccagacagtgggcccagcacaagtctctgcaccctggaaagtgtgaccatgttgactgtttgtttcccgacctctgtggggccccagaaacttccagaaatacatggaagaccagcatcgtgtcgctctcctttccagttttcaaacaggctatattggagactccccatttttcaggaaacaggaatcattcttcaggacgtgatgcatgggacgtttcttttctctgtggtttcgctctccttgtctacatgaaaataaacgagatccacacacctgcgtgtgtgagactattacggcaactgtgacacccacgcgctggctaagagttggcagcctgatcctggcacaaaggttctgagggacatccagacacaccccaccacagtcactagcaaacccactcccaaacacacagatacacaggggcgcacgcgtgggaacacaagcacacacacagacacacaaagacacagacagcttgaagaagaacaagggacagagagatggagagatagaaacggaaggagagtgagaaacagcgatcgagagaaagacagagaagaacctgggagattgagagagagagcacgcaaggtggagagggaagtagagaaagggagagggtgagggagctagagagggrgagcaacagagccttggagagggaggctctgctctggtagacaggggcccctttggcgagggtagggtcgagggtgcctgggccgggctggaacaggggggcagggctgcccacacgggaaaaccaacggagccctgagacatgtttttacttggattggtttgttgctttgggtgtgtgtttcctagggtcattcctttgttggctcctccctgtcctcttggtgctgtgggctctgaaagttgtagagtgctcctgccctgtggtggaagcagtggcgccgagcctgctcacaggacacagcttgggtctgtcttagatttgtcttcgtggggcgattttctagatcctcccctgcctctttctctacatcttctttaaaaccaataactcttagatctgtctttgtgaggttattttctagatcctgtaggcatgatttgctgtttttattctttttcttttgtctcttctatgtattttcaaagagcctgtcttctctgcttgatccattctgctattacatggctctaatgca

SEQ ID NO: 74534 - DNA, 1731 bp, Homo sapiens
attctacaaaaagagtgcttcaaaacggctcaatcgaacgaaagtttcacctctgtgaaatgaatgcacacatcacaaaatagtttctcagaatgcttctttgtagtttttatgtgaagatatttgctttgtcataataggcctcaaagcgctccagatatccacttgcagattctacaaatagagtgtttcaaaactgctcaatcagaagaacatgtcaactctgtgagatgaaggctcacatcacaaagaagttcctcataatgcttctgtgtagtttttatgtgaagaaatttccttttcgacaataggcctcaaatcgctccaaatatccacttgcagattctacagaaaaagtgtttcaaaactgctcaatcaaaagaagtgttcaactctgtgagatgaatgcacacatcacaaagaaggttctccggatgatgtccgaataggaacagctccagtctacagctcccagcgtgagcgacgcagaagacgggtgatttctgcatttccttctgaggttctgtgttcatctcactagggcatgccagacagtgggcccagcacaagtctctgcaccctggaaagtgtgaccatgttgactgtttgtttcccgacctctgtggggccccagaaacttccagaaatacatggaagaccagcatcgtgtcgctctcctttccagttttcaaacaggctatattggagactccccatttttcaggaaacaggaatcattcttcaggacgtgatgcatgggacgtttcttttctctgtggtttcgctctccttgtctacatgaaaataaacgagatccacacacctgcgtgtgtgagactattacggcaactgtgacacccacgcgctggctaagagttggcagcctgatcctggcacaaaggttctgagggacatccagacacaccccaccacagtcactagcaaacccactcccaaacacacagatacacaggggcgcacgcgtgggaacacaagcacacacacagacacacaaagacacagacagcttgaagaagaacaagggacagagagatggagagatagaaacggaaggagagtgagaaacagcgatcgagagaaagacagagaagaacctgggagattgagagagagagcacgcaaggtggagagggaagtagagaaagggagagggtgagggagctagagagggggagcaacagagccttggagagggaggctctgctctggtagacaggggcccctttggcgagggtagggtcgagggtgcctgggccgggctggaacaggggggcagggctgcccacacgggaaaaccaacggagccctgagacatgtttttacttggattggtttgttgctttgggtgtgtgtttcctagggtcattcctttgttggctcctccctgtcctcttggtgctgtgggctctgaaagttgtagagtgctcctgccctgtggtggaagcagtggcgccgagcctgctcacaggacacagcttgggtctgtcttagatttgtcttygtggggcgattttctagatcctcccctgcctctttctctacatcttctttaaaaccaataactcttagatctgtctttgtgaggttattttctagatcctgtaggcatgatttgctgtttttattctttttcttttgtctcttctatgtattttcaaagagcctgtcttctctgcttgatccattctgctattacatggctctaatgca

SEQ ID NO: 74535 - DNA, 1731 bp, Homo sapiens
attctacaaaaagagtgcttcaaaacggctcaatcgaacgaaagtttcacctctgtgaaatgaatgcacacatcacaaaatagtttctcagaatgcttctttgtagtttttatgtgaagatatttgctttgtcataataggcctcaaagcgctccagatatccacttgcagattctacaaatagagtgtttcaaaactgctcaatcagaagaacatgtcaactctgtgagatgaaggctcacatcacaaagaagttcctcataatgcttctgtgtagtttttatgtgaagaaatttccttttcgacaataggcctcaaatcgctccaaatatccacttgcagattctacagaaaaagtgtttcaaaactgctcaatcaaaagaagtgttcaactctgtgagatgaatgcacacatcacaaagaaggttctccggatgatgtccgaataggaacagctccagtctacagctcccagcgtgagcgacgcagaagacgggtgatttctgcatttccttctgaggttctgtgttcatctcactagggcatgccagacagtgggcccagcacaagtctctgcaccctggaaagtgtgaccatgttgactgtttgtttcccgacctctgtggggccccagaaacttccagaaatacatggaagaccagcatcgtgtcgctctcctttccagttttcaaacaggctatattggagactccccatttttcaggaaacaggaatcattcttcaggacgtgatgcatgggacgtttcttttctctgtggtttcgctctccttgtctacatgaaaataaacgagatccacacacctgcgtgtgtgagactattacggcaactgtgacacccacgcgctggctaagagttggcagcctgatcctggcacaaaggttctgagggacatccagacacaccccaccacagtcactagcaaacccactcccaaacacacagatacacaggggcgcacgcgtgggaacacaagcacacacacagacacacaaagacacagacagcttgaagaagaacaagggacagagagatggagagatagaaacggaaggagagtgagaaacagcgatcgagagaaagacagagaagaacctgggagattgagagagagagcacgcaaggtggagagggaagtagagaaagggagagggtgagggagctagagagggggagcaacagagccttggagagggaggctctgctctggtagacaggggcccctttggcgagggtagggtcgagggtgcctgggccgggctggaacaggggggcagggctgcccacacgggaaaaccaacggagccctgagacatgtttttacttggattggtttgttgctttgggtgtgtgtttcctagggtcattcctttgttggctcctccctgtcctcttggtgctgtgggctctgaaagttgtagagtgctcctgccctgtggtggaagcagtggcgccgagcctgctcacaggacacagcttgggtctgtcttagatttgtcttcgtgrggcgattttctagatcctcccctgcctctttctctacatcttctttaaaaccaataactcttagatctgtctttgtgaggttattttctagatcctgtaggcatgatttgctgtttttattctttttcttttgtctcttctatgtattttcaaagagcctgtcttctctgcttgatccattctgctattacatggctctaatgca

SEQ ID NO: 74536 - DNA, 2085 bp, Homo sapiens
tgcctaatccagattctwtatatatatatatatatatattattaggattatatatatgtgtgtgtgtgtatatatatatatataattatatatatatgtgtgtgtgtgtgtgtctgtgtgtgtgtgtgtgtgtgtgtgtgtgtgtatatatatatatacactctccatccaggtctcagacttcagtctttattggtctctcctcttgaaaactgccagaattaaggacctcacttaaagaggagttgaaatggatgattaattttatatgttgatgtttaactgtgttcatgcttctcgtagacctaacagcctgtttggccctgtatctcttcacttatattgctgtgttttgtctctgcccatctgttcacagttcttaatttatacttatacataacatgtttggtgtatgctagggctaaattgtgtacactagggctaatgccaaattcttttagggcattgaatgcacacatttatcatacatttgtaaacacagtcctcataacttttgggttggtttcctttcattttttcagaattcagccattgtgcagtacccacccagtgtagtcactctgccagaaatgagctgagggtctgtcccagtcaacaaacacaaaaaccacaattcaaaatgattgacatgaagatccatgtaacggccttttaggaatgcaactgggtttaatgtagtgaaaatgactcttagagacttcctcttccttaattttctaccctattttataaactgggaactaccatccattcacaaacattaggaagtagtccctctacccttgattctgtatctccaacacccaacccatcctcagaaagtagaaaagatttctctgagcagtttcggcttttctgtctcttttcggggggtggggggggggtgtatgtgtgtgtttattgctttgcatctgcctcccagtggaagcacacctggatcagagccctgagtcagttctggagaccaacatctctctgttcttattcagaggcctttcaggtgtgaggggccatgcttccttgaggctaagctgtcttgttaactaaccctgtttactgtactagggcagctcattccaaagtctagatgtagggaaaagtagaagaaagcctgttcaagctacattctctcacccaacattactagtaagagaaaatgattttgatctccatctctctgacttctctatttcccaactggtttcaaacacaatgtgtgtatacgcatccccagtgaggttacaagaggtgtagtgaaagatgcaagtagcttccatgcattaaccctactgtaggtagaactgtatagaagtcgcttcaaactaaaagagaaaaaaataaaagtaaaggttaatgtattctattttctctgtaatgccacaaattttattctatttccctgcatcatttgggctgcaagatggctttcctcatacagtatgcattacattgcttatttgacatttacttagaacctactctgcaccaggctgagaggtggacaccggagtaatccctcagaatgcaagaatgaatgcaagtggcaagggatggggctgggagggaaggggtcacattaagaaggaccttaagtaaagtgctaaggaattttggcatgacccgaaagctaatagttacttgatatctcagccacccacttatcaaagaaagtctgtgacctggggtggtggcggggtcgggggggtggtggctccaaactgattctcagagccctaggacttcatagatggcacttaggggtcagtcactatgagggaaacgccaaatagaaggatcctgggttccagcaaatccattcaagacacccccattttcatctgtattgtatactgatgtgttatgtaagaattgttctgaagaaagagctaaatatcaaacttactttttaaggttaaaactgtatttaatagtcccattgaagattcatctacaagcagccatctttaaagactcaacttattttatatgtcaaagtgtgaatctcaatttgcatctccaggtatcccagaaatatcatattttttgccttctcttgaaataaaa

SEQ ID NO: 74537 - DNA, 970 bp, Homo sapiens
aagtgttctgaaaggtttttcaacaaaattgcatttagaagtaaatatttacttgagtacaactcattcgtgaaattaagtcatctttatgagacatacttgattatttttataacgagtgagcagcataatatctatggaattataccatgtgaagcctttctaattatctcacttagaaaacataaacacaggcttttaaaaaatgcagttataggcaaaacaaatttcttagcacctccacaatatctagcaagtataagtgcggtgcgtaactggtataatcagaaatctttgaaaagcaggaagacgcgacttttgcgtgtcccttcccagttacaaarcagattcttccgttctgtaataaagttcatttgtgtatctagtctgtgatgtctgtgcatagcacattccagacctactagagacataaaaagaaataagaaagggtctgctagccttgaggatctcctaggctattagaggaagagagacatattagtagaccctgataattgagtgtgataagtgctaaagatagatgcaaactcagggtgctgctatgggagcctcacgggggcagccagctcctggaggggtgggtgaggtgtaccagctagggtcccagggaaggcttccttgaagatgggaggcgtgactgaaaaatgagctggagttacacatgtgaagagaggggaaaaaaagagagagaaacctggacatgggctgggggtgagaaagagcctagtgaagaaatggtgagtccctctgtgtggtgggagcataaggtgtgacggaggtgagaatcatagcaacaagtgacgtgtgagcccaaaaggtagctagaagcagggtcacagaaggtcttagcagccaagctaagaacttcatgctgaggaccacagagtgcctctgaagggaataagcagacaagaggtatgggcaggtttgtgttttacaaagattcatc

SEQ ID NO: 74538 - DNA, 970 bp, Homo sapiens
aagtgttctgaaaggtttttcaacaaaattgcatttagaagtaaatatttacttgagtacaactcattcgtgaaattaagtcatctttatgagacatacttgattatttttataacgagtgagcagcataatatctatggaattataccatgtgaagcctttctaattatctcacttagaaaacataaacacaggcttttaaaaaatgcagttataggcaaaacaaatttcttagcacctccacaatatctagcaagtataagtgcggtgcgtaactggtataatcagaaatctttgaaaagcaggaagacgcgacttttgcgtgtcccttcccagttacaaagcarattcttccgttctgtaataaagttcatttgtgtatctagtctgtgatgtctgtgcatagcacattccagacctactagagacataaaaagaaataagaaagggtctgctagccttgaggatctcctaggctattagaggaagagagacatattagtagaccctgataattgagtgtgataagtgctaaagatagatgcaaactcagggtgctgctatgggagcctcacgggggcagccagctcctggaggggtgggtgaggtgtaccagctagggtcccagggaaggcttccttgaagatgggaggcgtgactgaaaaatgagctggagttacacatgtgaagagaggggaaaaaaagagagagaaacctggacatgggctgggggtgagaaagagcctagtgaagaaatggtgagtccctctgtgtggtgggagcataaggtgtgacggaggtgagaatcatagcaacaagtgacgtgtgagcccaaaaggtagctagaagcagggtcacagaaggtcttagcagccaagctaagaacttcatgctgaggaccacagagtgcctctgaagggaataagcagacaagaggtatgggcaggtttgtgttttacaaagattcatc

SEQ ID NO: 74539 - DNA, 1552 bp, Homo sapiens
ataagatgcctggagcaggtagctggctgttgtaagggctaaggattctataaggctctgataggataaagcattcaaaggagcagatttaaggcctagtcaatatcggtctcctataattcaaactagggaaacatttggtgaactggagaactgatgtacctgttcatgaaggagaaaaacaactccaaagacatgctccaaaggacagctcacccttccatgagtgatggatcaccaatctctttgaacactaagaaggtgccctcttggggccgggcgcggtgactcacacctgtaatcccagcactttgggaggccgaggcaggtggatcacgagatcaggagatcgagaccatcctggctaacacggtgaaaccctgtctctactaaaaatacaaaaaattagctgggtgtggtggcggtcgcctgtagtcccagctactcaggaggctgaggcaggagaatggcgtgaacccgggagacggagcttgcagtgagctgagatcgtgccactgcactccagcctgggcaacagagcgagagtccatctcaaaaaaaaaaaaaagaaggtgccctctttcatgtgtccatccatcaatccatccatctatctattcttccattgatccatgcattcattcagtattttagagtgtccaccatgttttgtgtatcatgaatgagaaacactaggattaatgagacgtagtccctactccttcaccccacaaaaacctctcatgtttaaatagataaaaacagattgacagatttccggttaaaaatggtgtattaaacacatatttacctcaggtcatcctcaaaataaacagcataggaggggatgagtggtaactaatttagaaggcctcagaaagctgcctcctaagtgggcagtagggagttctagaaaccacccattttatatgaagggagcatcgagggacttggatgaaacccaaatcatcaaaaataatgatgaaaatctgtttaagaagcagtaataacaccaacatttcttttttttcacaccctccagccaaggtaaagcctctttccctctagatagaataaacaggagacttaytttctagtaagtgagaccacagactctgcacttgtaaaacacaaggaacagggaagagcagggatcctgtgctgaaaacatggggagttattgcaaaattatatattgagtgttgaggacctcccatcctcctgttttccttggtcagcattctgtacacccattactaagtatacaccttccagccagatcttggaagaatgttttctactgcatctaacaacctgaaggaactaacatgggattctctaatttaagaaataaacaagcaaagactatttctgtcacttcaatgtgcagcaaagaccatcacccacaagccctaccgagaagcacagacttccattccattgttaatttccacactcttctatgtgaaggaaaaaaaaaaaagccaaggaccagtaggttcttaaggaaaatctttaatatgaaaaagaacaaaacaaagaaacagaaaat

SEQ ID NO: 74540 - DNA, 522 bp, Homo sapiens
gctaagattacaggygtgagccactctgctcaggctatggtggtttttatacagcaacactcagtttattacagtttatcccagtgcttattgcatttttttctgttaggaacctgtagtcaattcctcccttatttgcaaaggggtttacttaaaagatttgtaatttttgtaaattttgttgaaagtacactatttgtatactttggtaatgatatttatacatctacttgacaaatctatcttttaagaaattattttcagcttttaagtaactgtcacataacatgtatgtccagtatccattggcttcagctcccactgatactattttctttttgactcagcagctttaaaaccaaaatagtaagatctgtcttgaagccacagtctagcaggagaagcaaactatataaatttagacagctctgattagcacagttcccaaactgttatattatgcattaacccatacaggaagaatttaaaattgcagtatggtgagacaagttttagaagtga

SEQ ID NO: 74541 - DNA, 631 bp, Homo sapiens
agaaagacattgtccattgcactttaattttttcagttaatattatgcccttgcgatccctctgtatcagtttttctgccttcttttttttttttttttaaacagctatagtactccgttgtatagatggtacatmatttgttcagccactttcctaggtatgggcgtttaggttgtttgtgatgtttggcaattacatataatgatgcaatgaataactttatatatgtatttttgtatcattagaggtatatcttcagggtagatttctaggagtaggactgttgggccatatgaacacttactttgatttctttaaaacatagtaaaatctgttttgaagtatatttgttttgttcccttattgaggacatagtggttttttttgtttgtttgtttgagacggagtctcgctctgtcgcccaggctggagcgcagtggcccgatctcgactcactgcaagctctgcctcctggttcacgccattctcctgcctcagcctcccgagtagctggcactataggcacctgctaccacgcccggctaattttttgtatttttagtagagacggggtttcactgtgttagccaggatggtcttgatctcctgacctcatgatccacccgcctc

SEQ ID NO: 74542 - DNA, 508 bp, Homo sapiens
ggtacatttctactgttaagatttttgtctgaaaagctttgcttgtataggggaggaaaatcgtggtgattctttaaggcctgtaggcgaccttttccagaagtttattgtggatcaaggagagaggggatctccgtaatttgaagtgaataggttctctggaagtttcttgttttgtttttgagacttgagcatttctataatgtgaaggggagagtccggaagaggcagatattttccaagtatttacatgagcaaccacaagagtactttaggttgctggatgcgatacagttgtggtgtggtcacagctggatgtacccagaggtgcggtacagtacagagtagcagaagttctgccattagcattttggagaaaaaaaaaaacaactagtctggagtagagaaactttgccgttacatctcttttctccccttaatttgtttgatttgtctcctggtcagataaactgttggtgggacgtttagatgtgggagtagtcyattt

SEQ ID NO: 74543 - DNA, 652 bp, Homo sapiens
aacgcttgtgaatctttaggattttcagtggaaatacacagtgaatttttgtatgtgtatatgtgtttgaacggttatagttaagcatttatatttttacagaaggctttatgcctgctttttttggtttcttgtttgtttggtttggttttggttctttgttttgttttattttagttctcacaacatttccaaccctaaatggctcagcaaataaagttgccgtgttttatgttatttgcctcaggtcatgcagaggtttttagccagggtgtttttaatctgctgttttaacctgtcagcgcatcattgttgggtcttgggtcatctgtgaagttctaggtgctgtgctaagggccttggagacagaaatataagtcatgagttctaattctcacttttttcaatactrtatgtggaggatggagacagttctaaaagtatgcacttgagtgagaggctgagacccccctaaagtttgtcacttcctgccaccctcaggctcagcatatccctgcacagtggctagttctttttctaactgggatttcaaaagttaaagaggaggaagggaaaggaacagaaactaataactactgaatgcctgttataagccaacctgatgcccagagtcctccaattgaatccatgg

SEQ ID NO: 74544 - DNA, 598 bp, Homo sapiens
aggcgcagtggctcacacctgtaatcccagcactttaggaggccgaggcaggcagaacacaaggtcaggagtttgagaccagtctcgccaacatgatgaaaccccatctctactaaaaatacaaaaatcagccgggcgtggtggcgcacacctgcagtcccagctactcgagaggctgaggcaggagaattgcttgaacccaggaggcggaggttgcagtgagctgagatcatgccactgcactccagcctgggcgacagagtgagactccatcyccaggaaaaaaaaaaaaaagaaagaaagaaaaaagttccttaagcgatgctgatggttgagaaccacttccagaaaacatgacacctctcttaagcatctgctggagactgttgtccccttggtttctgtgaaacttattgctctccaccaagattattccccaaggcctgttcttcacctttggctcttctctctccctcggaccactccagttgctctagctcccaaaagatctagtccagtaattccaatagcctatgggcagggactcctacctgcaacttcaagttcaacctgtctaaaactgaactttttcccctaa

SEQ ID NO: 74545 - DNA, 598 bp, Homo sapiens
aggcgcagtggctcacacctgtaatcccagcactttaggaggccgaggcaggcagaacacaaggtcaggagtttgagaccagtctcgccaacatgatgaaaccccatctctactaaaaatacaaaaatcagccgggcgtggtggcgcacacctgcagtcccagctactcgagaggctgaggcaggagaattgcttgaacccaggaggcggaggttgcagtgagctgagatcatgccactgcactccagcctgggcgacagagtgagactccatctccaggaaaaaaaaaaaaaaraaagaaagaaaaaagttccttaagcgatgctgatggttgagaaccacttccagaaaacatgacacctctcttaagcatctgctggagactgttgtccccttggtttctgtgaaacttattgctctccaccaagattattccccaaggcctgttcttcacctttggctcttctctctccctcggaccactccagttgctctagctcccaaaagatctagtccagtaattccaatagcctatgggcagggactcctacctgcaacttcaagttcaacctgtctaaaactgaactttttcccctaa

SEQ ID NO: 74546 - DNA, 1363 bp, Homo sapiens
ccgaggtaggcagatcacttgaggtcaggaattctagaccagtttggccaacatggtgaaacactgtctctactaaaaatacaaaaattagccaggcatggtggtgtgtgcctgtagttccagctactcgggaggctgagccatgggaattgcttgaaaccaggaggcggaggttgcagtgagccaagatcacacaactgcactccagcctgggcaacagagcaagactgtctaaaaaaaaaaaaaaaaaaaagagtgaggagtctcacttctggggacccccttcctcccgcagtgatctccctacccagcatgtacgaggggcttgtgagtggcctgtgcggaaactacgacaagaaccgcaagaatgacatgatgctgcccagtggcgccctgacccagaacctcaacacctttggcaacagctgggaggtgaagaccgaggacgcactcctgcgcttccccaggtgcacggcctggaagggatgaggcgggggaggtgaacaacaatgtctgtgcacggtggccgctagccctcctgtcctcaggagaggatgaaactccagggagagggtgcagataggcctggatcctcccaattccgtcattccctctcatctgactctgggggctcccgctcaatggaaatctctctctgtgcccctgccctgccctcagcctgccttcccagttatttttccttcttccttcttccttctttcctcctcctcctcttcctcctccttctcctcctcctcctccttcttcttctcctcctcctacttcttcttcctctgtcacccaggctggagtgcagtggcatgatctcagctcactgcaacctctgcctcccagtttcaagtgattctcgtgcctcagcctcccaagtagctgggactacaggcatgggccaccacgctcagctaatgttcgtatttttagtagagacagggtttcaccatgttggccatactggtctcgaactcctgacctcaagggakctgcccacctaggcctcccaaagtgctgggattacaggtgtgagccaccacacccagccccagtagttcttatttctttttttaaaatatattttttagagaccgggtcgtgctctgttacccaggctggagtgcagtggcgtgatcttggctcactgcagtttccacctcctgggctcaagtcatcctcctgcctcagcctcccgggtagctgggactccaggcagccaccaccatgcccggctaatcagttcttcttcttcccccacttcaccttccttggggcctcacctgaccccgtggctgtctctactgcagggctataccagcggaggaggagggacaaggggcggagctgggcc

SEQ ID NO: 74547 - DNA, 732 bp, Homo sapiens
ggatcccttaaatgtccacaacactggggacaacagggtggagtggaagagtagcccagatccaatgttgctttcacagtagcatgtatggggaagaagagcttgtttgccagccgcttcctgaatgctttgctaaatatcatttcatttaattctcacttgtagcattcaaatggggtaggctgtattttctttgccttttttttttttttttttagacgaagtctcgcttttgttgcccaggctggagtgcaatggcatgatcttggctcaytgcaacctctgcctcccgggttcaagtgattctcctgcctcagcctcccgagtagctgggattataggtgcataccaccacgcccggctaattttttgtattttaagtagagacggggtttcaccatgttggccaggctggtctcgaactcctgacctcaggtgatccgcccgcctcggcctcgcaaagtgttgggattacgggcgtgagccactgcgcccagccccagtgggtaggctgtattttcattacaattttttttttttttttgagatagagtctcactctgtcacccaggctggagtacaatggtgtgatctcggctcactacctcctgggttcaagcgattctcctgtctcagcctcctgagtagctgggattacaggcgcatgccatcacgcccagctaatttttgcattttgagtagtaacggggtttcaccctgttggccaggctg

SEQ ID NO: 74548 - DNA, 690 bp, Homo sapiens
tcagtggtgcgatttcccctcattgcaacttctgcctcccgggttcaagcgaatctcctgcctcagcctcctgagtagctgggattacagacgcgtgccaccayacccagctcatttttgtatttttagtagagacggggttttaccatgttggccgggctggtcttgaactcctgaccttgtggtctgcctgcctcggcctcccaaagtgttgggattacaggcatgagccactgcgcccggcccgagtttaaatattgagatgacaattacttcctagcccctctctgcgcctgccctgtctccctacccttcctctccctaactgacttagagactggggctctgccacaggggagggtggggaaccctggggtcctagagtggtggcatgtgggcagtggcaggtgcttcctcccctcctcactagagaggtgcccagcagggccagggtcggggctggggctgtgctgggaagctttgggccattgacacatgggagctacagcagaaaatggatcagctcagaacatctgggggctctctgcatctagggcgggactcctcctcctttatttttaaatttttaatttttaaaaaagagatgggggtctcactctgtcacccaggctggagtgtagtggtgcgattgtagctcaccgtagccttgacctcttgggctcaaaggat

SEQ ID NO: 74549 - DNA, 690 bp, Homo sapiens
tcagtggtgcgatttcccctcattgcaacttctgcctcccgggttcaagcgaatctcctgcctcagcctcctgagtagctgggattacagacgcgtgccaccacacccagctcatttttgtatttttagtagagacggggttttaccatgttggccgggctggtcttgaactcctgaccttgtggtctgcctgcctcggcctcccaaagtgttgggattrcaggcatgagccactgcgcccggcccgagtttaaatattgagatgacaattacttcctagcccctctctgcgcctgccctgtctccctacccttcctctccctaactgacttagagactggggctctgccacaggggagggtggggaaccctggggtcctagagtggtggcatgtgggcagtggcaggtgcttcctcccctcctcactagagaggtgcccagcagggccagggtcggggctggggctgtgctgggaagctttgggccattgacacatgggagctacagcagaaaatggatcagctcagaacatctgggggctctctgcatctagggcgggactcctcctcctttatttttaaatttttaatttttaaaaaagagatgggggtctcactctgtcacccaggctggagtgtagtggtgcgattgtagctcaccgtagccttgacctcttgggctcaaaggat

SEQ ID NO: 74550 - DNA, 690 bp, Homo sapiens
tcagtggtgcgatttcccctcattgcaacttctgcctcccgggttcaagcgaatctcctgcctcagcctcctgagtagctgggattacagacgcgtgccaccacacccagctcatttttgtatttttagtagagacggggttttaccatgttggccgggctggtcttgaactcctgaccttgtggtctgcctgcctcggcctcccaaagtgttgggattacaggcatgagccactgcgcccggcccgagtttaaatattgagatgacaattacttcctagcccctctctgcgcctgccctgtctccctacccttcctctccctaactgacttagagactggggctctgccacaggggagggtggggaaccctggggtcctagagtggtggcatgtgggcagtggcagrtgcttcctcccctcctcactagagaggtgcccagcagggccagggtcggggctggggctgtgctgggaagctttgggccattgacacatgggagctacagcagaaaatggatcagctcagaacatctgggggctctctgcatctagggcgggactcctcctcctttatttttaaatttttaatttttaaaaaagagatgggggtctcactctgtcacccaggctggagtgtagtggtgcgattgtagctcaccgtagccttgacctcttgggctcaaaggat

SEQ ID NO: 74551 - DNA, 690 bp, Homo sapiens
tcagtggtgcgatttcccctcattgcaacttctgcctcccgggttcaagcgaatctcctgcctcagcctcctgagtagctgggattacagacgcgtgccaccacacccagctcatttttgtatttttagtagagacggggttttaccatgttggccgggctggtcttgaactcctgaccttgtggtctgcctgcctcggcctcccaaagtgttgggattacaggcatgagccactgcgcccggcccgagtttaaatattgagatgacaattacttcctagcccctctctgcgcctgccctgtctccctacccttcctctccctaactgacttagagactggggctctgccacaggggagggtggggaaccctggggtcctagagtggtggcatgtgggcagtggcaggtgcttcctcccctcctcactagagaggtgcccagcagggccagggtcggggctggggctgtgctgggaagctttgggccattgacacatgggagctacagcagaaaatggatcagctcagaamatctgggggctctctgcatctagggcgggactcctcctcctttatttttaaatttttaatttttaaaaaagagatgggggtctcactctgtcacccaggctggagtgtagtggtgcgattgtagctcaccgtagccttgacctcttgggctcaaaggat

SEQ ID NO: 74552 - DNA, 690 bp, Homo sapiens
tcagtggtgcgatttcccctcattgcaacttctgcctcccgggttcaagcgaatctcctgcctcagcctcctgagtagctgggattacagacgcgtgccaccacacccagctcatttttgtatttttagtagagacggggttttaccatgttggccgggctggtcttgaactcctgaccttgtggtctgcctgcctcggcctcccaaagtgttgggattacaggcatgagccactgcgcccggcccgagtttaaatattgagatgacaattacttcctagcccctctctgcgcctgccctgtctccctacccttcctctccctaactgacttagagactggggctctgccacaggggagggtggggaaccctggggtcctagagtggtggcatgtgggcagtggcaggtgcttcctcccctcctcactagagaggtgcccagcagggccagggtcggggctggggctgtgctgggaagctttgggccattgacacatgggagctacagcagaaaatggatcagctcagaacatctgggggctctctgcatctagggcgggactcctcctcctttatttttaaatttttaatttttaaaaaagagatgggggtctcactctgtcacccaggctggagtgtagtggtgcgattgtagctcacygtagccttgacctcttgggctcaaaggat

SEQ ID NO: 74553 - DNA, 882 bp, Homo sapiens
tgcatgcacacgtccatctcagcttcagctcgcaagcaggaccctcaccgtggggccacgacggaccctgcaaagctggtctgactgtgccgagcctgtcgggggtygggggaaggaaggcgggagctcggcatctggagggcagtggagaccctcagcgagtgccaggaggatctgctgtcttcccagtgttgtcttcacagtggagagatgagttcacacagccttatctgtgtttccagtggcctctgtgtgcaagacgggccacgggttttgtgcggtatttgcctgtgggtcacagccaggtgaatgggccctcctggggctgcagccccaggtcctgatgttacttgtgccagcctggccacagtgcccggcctccagaagctgctgtcagaggagcagacgggagggcagggtggacggttaacagggtcaaggccccagagccccacaccctccccagcagccagcacaccctctgttctgtgacctcgcccctgcattgcggcaactgacagatgctccccggcctccttccccgctgccgcgcaacctctgacagccacgtgtactctcctgctttagaacaaggacctttcccttttgtgcatgaatacgctctcagcagatgcgagaaaatgggagtcaaatgcacctttgtggtttcttttccttctacacaaacaccacttgagtgaggcccgggttctgcaaagggaaagtagtcgtcactttctaggccccaccatgagccggggctcaaatcccatcctggcctgctgggcatttgtttcatcaattaagagtcagtgagcaggaaacaacattgcatattcacacaaacacacgtgcatatccaaatacacatacacacacatg

SEQ ID NO: 74554 - DNA, 1777 bp, Homo sapiens
aaagtggcagaagtaaatccttccttaacagaaattactgtaaatgaaaagggatcaaactcaccaattaaaagagagactgacagaatacatttttaaaagtatgaccaactacgggttgaatatccctaatccaaaagtccaaaatctaaaatgctccaaaatctgaaaatttttgagtgcctacatgatgttcaaaataaatgcccattgaagtattttggatttcatatttttggattatggaagctcaactggtgagtccggttggccttaaaacaagatgtgtttgaatcatgcaggtccacttatatgcagatttttttcaaccaaatgtgaattgaaaatatagtactcgtgggattcaaaacccatgtatacggagagctgacttttataaatgtgggttctgcagggccaactttgagacttgagtatgcgtgaattttggtacacattgcagggggcgggtgtcttagaaccaatcatctgcatatatgagatgaccacaaatgttccaaaatttgaaaagatccaaaatctgaaatacctctgtcccaagcatttaagataaggtatactttgtatgtaagataagggatatatgctgtcggttagggactcacgtaggatccaaagttgaaagtaaaatgatgcatttygggatggtgaaaatgttacatacaggtggcagttgcacaatgttgtgaatgtaccaagtgccactgaattgttcatttttaagtggttaattttatgctatgttaattttatctcaattttttaaaaagactccctcaatttagttttgtttcattcatctattccctatttatttgcctctctagattataaaattgttgagaacatggacaggagtttattcctctttgtgctacccagcacagtgcctggaataataaatatttactgaaggcatcactaagcatggagttgaacatcattgaggggctcagacactggcggctgagtcaatgccatgcttgctgcaggacagcctgcccaggccatctcagtctcaggtatttcttcatagcagtatacgaatggactaatacaggcccatattccaagacccttaggaacaagtggtaattgtttactatctagacgggactctcctacttgataaaagtctcctgctctatagctccacaaacagtaaatttatttgaaatcaataaatgaatgattaagcactgtgactggagagggccgaacagggttccatttccagatgtttcccaggcactgatgattcacttcctggggccgggcaagttccgaggctcctcagggtctcctcaaacaattcaggcttctttaagcctccagcttgcaactatctgactcattaagttgaagttggcaggaaagttataaaggttgtacttgaatcacagtcctgagatcttgggttgagatgctttttatttagcttgtgcatcaccaacttgtaaaaaatatcttggtaaaaaaatttaaaataaaactttaaagtttgtgttatgacagattaaacatttaatgccacatggtgtgtatatctcaatggaaacactgttcttgtgtgttcagtatctgtgtgcatgttaatcttcctgtgagatcataaagctctgtaagggaaagggtccaattgtctcaccttgaaaattccaaacctagcaaacgcctggtgggaaatacaaacccgcaggcgtttctgagtgaacggaggttgtgccaggtcaaatgctcactgctggtcccgtcc

SEQ ID NO: 74555 - DNA, 1397 bp, Homo sapiens
catccaacacagctttatcttacctgctgcccacaccctactcttgagagcacgtactcctggcaggaccccaacccaggaaaccctcccatgccccaggtgccgtcccctgaccaaccagcctcactctcagagacaaggatgaaacgcatatgaatatccactctaatacggttcagagaaggatgatctgttatctgaaacttttactgcaaaagctcttttaatcaaaaccttcagaaaatttgaattttactccttgcaaagattatttggttaaaaaaaaaggacactcacaacaattaacatatgactggggatgtgtaagaacagcgaagagaactggacaggctgtgtcctgggaacagcgcccggtgcacacacccctttccatcttccctattggcaccttcagtcccsggaggcgctgctgatgctcataggaagggactaaggccttcacagtctgtcaacaggagggtcccatggggctccatcacggtctctgggaccccccttccactgcagcaaagtggacaggtgcactgcatcaacatctcaacaccgggtgaaaagggaaacgccttactaaacgatgttcccgtgatcagaatcacgggctaacgtccctccgcttccgcagtcttcaggcctcaggcactgccagtgacattagctgctgtgcgtccctcctgccggactgcaacaccgtctcaggatccacctcccaccatcttccctgaccatggccctgctccatctgatttgtttgtcctctgatcaggtggggcctgagtccggcagtggatgccagtgagtcagccatggttggcagggactggctggctgcccccctctcttcattggccccgcctgtctggcctgggcgcccactcactcctgctgcacctgccacaactgccggctgatcctgctgctctgatgccccctcacgtctccagcctgcgccccgcactgcgttcgctgcccatcttcctcccaagctcacagtctagctccaggtgcctgctctccttgttctgtgtctgtttctgcacaccctgcggggaggccaggctcacccaagaaaagagtcaaggctgcaccatgaagcctctcgggctgggcagggagtccaggccctgggagccccccagagccccccacagaatgtgcagctagcctcgccagacgcgggcgatggggccgaaccccgcaggacaacttaggaggagtgaagagtggaagagtgcccggtgcagggatgggtgggaggaacctggggtagtgtgcacgcctgagacagggtgggggacacgaagggagacaggcgagggtgggacaggcaagggtgggtagtgtgcatccctgagacggggtgggggacacggggggag

SEQ ID NO: 74556 - DNA, 700 bp, Homo sapiens
cggctctccacaaaacacaaaaattaaccccaggcagattaaagcctaaatggggggaaaaaacctgtaaatgttttgaagaaaacatttgagcctctctgaactcagggcagaaaacagtttcctcaaatcctttcctcaaacaacacaaactacggaggaagggagtggtaaaatttgatcaaatcaagtgaagcagcttctgtgcttcaagaaacactattaaaaagtgggaaaaggtgggggtgagccacscgccaggaagcgagattcacggcacctctgtcagatgaaagggctgggtctgcgtccagccaggcaatgaagatgagccgccaatattctaggaagaaaagcgggggtgggagtcaccaaaacaagtcttctgaaaactggccaaggtgtgatgtacgtttgcatcctaggaaattaaagaggtaaaaaaacccatctggaaaaccaagagctgcttgattctatgaacctaagaacagtccgtttctccttcagagacgtattgagagaactcggtatcattatgaaatctctcaggcctccaggaaatgacgctctaaaaatgcaaagctctgaaccaaccaccgagaaacaccctttcccctcccctgggtgatactaagctgctgtggggcgtccccacaattttggggccggaacggagggggaacaggcaccagtttgt

SEQ ID NO: 74557 - DNA, 1637 bp, Homo sapiens
cactccctcatgggtgccgtatgtttacagatgtttacagagccctctttcattacatcatgtgtgcctgatgtttacagagccctctctcattacatcgtgtgtgcctgatgtttacagagccctctctcactccctcatgggtgccgtatgtttacagatgtttatagagccctctttcattacatcatgtgtgcctgatgtttacagagccctctctcattacatcgtgtgtgcctgatgtttacagagccctctctcactccctcatgggtgcagtatgtttacagatgtttacagagccctctttcattacatcatrtgtgcccaatgtttacagagccctctctcattacatcatgtgtgcctgatgtttacagagccctctctcactgcatcatgcgtgcccaatgtttacagagccctctctcactctgtcatgtgtgcccgatatttacggagccctctctcattccgtttgatttgcaccactgctgtgagatgggcaacagttcctggctttacaggcaacaaaatgctcccaccagtcaatgaagccacagagcttgccaggagtgaatggggccccacctgacagaaatgacggcttccgcgggatcccatgaaggttctgtaagccagagctgaagtgagtggggcccctgtccgcaggctgccacctctggcaggtcgtccacaggaacgcttgtcctgaatggtggcccgcaccctgcagtgagcccacggctatagtggtgcagccagcagccccgacgcctctgcagtcccagacccagggaagccccgtgtgcaccacggtgtgccctggaccactcacttggccgctgccaccctgggaggatcacaggggctgccttctggacatatgtcaggctctcactgccccagtgagaggactggctctggtcctgatccacaagctctgaaccaatagcgggtcttgggatgacgtctgcggagcccctcggtcccagcgtggctggcgtccaggaccccagcacctctacacccaggtccttctcagttcccaccggccgggctgacgctggtctccagggtgatggagctgattcttcgggtttccctcagctcagatcaaatttaacacagcaagaggacacccactgttcccaccgaagaggcagaaagctggagttcgcggtgcctttctcccccaggctgggatggaggaggcagcatgaggccaccgtcattcccagtgtgtgagctggggccatccggaagttgcgattcatgtcagacactacggggccgaggctcatgtgggtgtgcgtcctctcagggtcacacctcagcaaggaagctcagcagaaggtctcccaggtccctgagccaccgttcctctgactgcttgtacccttcccgagatgctgctgcagccccacgccactcagagtgaccagcctgggccaacccctgggttctgacaagatgtgctgtttaggactaaattcagctgcatataacagaaaacttctgacaaggttggtgtgaacacctgaggcttttcttccctcccacacaaaacccatctaaatgggcagtctgggtcccgcatcctggccagggacatttacgggaaccacatcagccta

SEQ ID NO: 74558 - DNA, 1814 bp, Homo sapiens
ccaggtctcccggggcctggtgtgtgcaccacagactacatattccacaaggaagctgtgagaaagaagcacagacagtcctgcaccatctcacatccaccaaatccagaattctcctttctcaaaccatccacagactaacttattcagctccccacaatatgagtctgttttgaggccagggggtgggtcctggaccctccaattccttgacagacaaaaggtgtagaatagcctgggattccaggttcctgggagtcctgcagggcaggtgcaggctggggcatggaggcggaagcttcttcacaccacaagcggccacggtagagttgacgggagaaaccaactttaaattcatgcaggatcaggaatgctgtgccacatcaatgtgtaaaatacaatcttcatgtgggagaacgaatggtcatctctgaaatatgctttgcacattaggatttttcagatcttccctattcttggtttacccaaagcaaagcgagttcttgctggggtgaagggtggaagagaaaagcagcggaatgggcgggctgtcgaacaaaaggcggcgagggaggtaccgtgcagagcctgctgggccttctgtcccatggccccgcacaccggactcacccagcctccagccgctcctgtgcctttctgcctaataaatatctgtgataattaccaacccccaaaaagggttctctaacgagggtgcattttatcagtcccttaacgaggctgtttgggttcctgcctcctatagagtggcggttaatgcttaatcagcaaatgcactgtttaaataataacaagaatatcagcagagaatctaaattatcccttaacttctcaaaataatcataacaggcatttgaacattcatacaaatatggctcatgaataaaaatgcgctttctttaatacaaatatagtctgatggaaagtctctgaaacccaacctacggaggcccctccctgtcatctcctggtgcatggaacagcgactttgccatcactgaggttccgggcacagaacctgcctcagtccagcgtccctatccgctgtaagaaagggtgaaggatccagtatgggagatggagattgtccatatcccgagggagggactggccagggcacacccgccaagggcaccttgtgtccctgctctgcagagaccgcccagctctaggtgcctgagtgttttctgctctccacatttgaaaccctaacaaaayccctgagcaatcaggccgtgtggaggcaaagagcctctcctgtaacagtgtggtccttccagccttctctcacatgcggaatttggcagacagtgatgtgagacgctcacatggcaaactttcttttctgtttctctttggcacaaagcctcagcgctcccgcgcctgccctaccactgaacaaaacagcctcttccgggcccagctcacttgtgcctccgcccacctcgctgcgggcaacacccgttttcctaaagattgacaagaggacgtgttactcaaataaccacccgctcagaagaaaaaacctctgtgcagagccttttgtgttgaaaacgacaccttcacgttatcagccttagaggcaggtctgtttgcagcggtgcccgctgaggagtctggatttttaaaatacgccagaaatgacttagggtctcagccaacagaaccaaggaaagttatatttatgtgggaattattttgtcaaaaaagttccaaaatgttggcaaactctgctcaattatataagctttcacctgaaggcacagtatttttttaaaagtcagtttgtgtat

SEQ ID NO: 74559 - DNA, 1814 bp, Homo sapiens
ccaggtctcccggggcctggtgtgtgcaccacagactacatattccacaaggaagctgtgagaaagaagcacagacagtcctgcaccatctcacatccaccaaatccagaattctcctttctcaaaccatccacagactaacttattcagctccccacaatatgagtctgttttgaggccagggggtgggtcctggaccctccaattccttgacagacaaaaggtgtagaatagcctgggattccaggttcctgggagtcctgcagggcaggtgcaggctggggcatggaggcggaagcttcttcacaccacaagcggccacggtagagttgacgggagaaaccaactttaaattcatgcaggatcaggaatgctgtgccacatcaatgtgtaaaatacaatcttcatgtgggagaacgaatggtcatctctgaaatatgctttgcacattaggatttttcagatcttccctattcttggtttacccaaagcaaagcgagttcttgctggggtgaagggtggaagagaaaagcagcggaatgggcgggctgtcgaacaaaaggcggcgagggaggtaccgtgcagagcctgctgggccttctgtcccatggccccgcacaccggactcacccagcctccagccgctcctgtgcctttctgcctaataaatatctgtgataattaccaacccccaaaaagggttctctaacgagggtgcattttatcagtcccttaacgaggctgtttgggttcctgcctcctatagagtggcggttaatgcttaatcagcaaatgcactgtttaaataataacaagaatatcagcagagaatctaaattatcccttaacttctcaaaataatcataacaggcatttgaacattcatacaaatatggctcatgaataaaaatgcgctttctttaatacaaatatagtctgatggaaagtctctgaaacccaacctacggaggcccctccctgtcatctcctggtgcatggaacagcgactttgccatcactgaggttccgggcacagaacctgcctcagtccagcgtccctatccgctgtaagaaagggtgaaggatccagtatgggagatggagattgtccatatcccgagggagggactggccagggcacacccgccaagggcaccttgtgtccctgctctgcagagaccgcccagctctaggtgcctgagtgttttctgctctccacatttgaaaccctaacaaaacccctgagcaatcaggccgtgtggaggcaaagagcctctcctgtaacagtgtggtccttccagccttctctcacatgcggaatttggcagacagtgatgtgagacgctcacatggcaaactttcttttctgtttctctttrgcacaaagcctcagcgctcccgcgcctgccctaccactgaacaaaacagcctcttccgggcccagctcacttgtgcctccgcccacctcgctgcgggcaacacccgttttcctaaagattgacaagaggacgtgttactcaaataaccacccgctcagaagaaaaaacctctgtgcagagccttttgtgttgaaaacgacaccttcacgttatcagccttagaggcaggtctgtttgcagcggtgcccgctgaggagtctggatttttaaaatacgccagaaatgacttagggtctcagccaacagaaccaaggaaagttatatttatgtgggaattattttgtcaaaaaagttccaaaatgttggcaaactctgctcaattatataagctttcacctgaaggcacagtatttttttaaaagtcagtttgtgtat

SEQ ID NO: 74560 - DNA, 1814 bp, Homo sapiens
ccaggtctcccggggcctggtgtgtgcaccacagactacatattccacaaggaagctgtgagaaagaagcacagacagtcctgcaccatctcacatccaccaaatccagaattctcctttctcaaaccatccacagactaacttattcagctccccacaatatgagtctgttttgaggccagggggtgggtcctggaccctccaattccttgacagacaaaaggtgtagaatagcctgggattccaggttcctgggagtcctgcagggcaggtgcaggctggggcatggaggcggaagcttcttcacaccacaagcggccacggtagagttgacgggagaaaccaactttaaattcatgcaggatcaggaatgctgtgccacatcaatgtgtaaaatacaatcttcatgtgggagaacgaatggtcatctctgaaatatgctttgcacattaggatttttcagatcttccctattcttggtttacccaaagcaaagcgagttcttgctggggtgaagggtggaagagaaaagcagcggaatgggcgggctgtcgaacaaaaggcggcgagggaggtaccgtgcagagcctgctgggccttctgtcccatggccccgcacaccggactcacccagcctccagccgctcctgtgcctttctgcctaataaatatctgtgataattaccaacccccaaaaagggttctctaacgagggtgcattttatcagtcccttaacgaggctgtttgggttcctgcctcctatagagtggcggttaatgcttaatcagcaaatgcactgtttaaataataacaagaatatcagcagagaatctaaattatcccttaacttctcaaaataatcataacaggcatttgaacattcatacaaatatggctcatgaataaaaatgcgctttctttaatacaaatatagtctgatggaaagtctctgaaacccaacctacggaggcccctccctgtcatctcctggtgcatggaacagcgactttgccatcactgaggttccgggcacagaacctgcctcagtccagcgtccctatccgctgtaagaaagggtgaaggatccagtatgggagatggagattgtccatatcccgagggagggactggccagggcacacccgccaagggcaccttgtgtccctgctctgcagagaccgcccagctctaggtgcctgagtgttttctgctctccacatttgaaaccctaacaaaacccctgagcaatcaggccgtgtggaggcaaagagcctctcctgtaacagtgtggtccttccagccttctctcacatgcggaatttggcagacagtgatgtgagacgctcacatggcaaactttcttttctgtttctctttggcacaaagcctcagcgctcccgcgcctgccctaccactgaacaaaacagcctcttccgggcycagctcacttgtgcctccgcccacctcgctgcgggcaacacccgttttcctaaagattgacaagaggacgtgttactcaaataaccacccgctcagaagaaaaaacctctgtgcagagccttttgtgttgaaaacgacaccttcacgttatcagccttagaggcaggtctgtttgcagcggtgcccgctgaggagtctggatttttaaaatacgccagaaatgacttagggtctcagccaacagaaccaaggaaagttatatttatgtgggaattattttgtcaaaaaagttccaaaatgttggcaaactctgctcaattatataagctttcacctgaaggcacagtatttttttaaaagtcagtttgtgtat

SEQ ID NO: 74561 - DNA, 1814 bp, Homo sapiens
ccaggtctcccggggcctggtgtgtgcaccacagactacatattccacaaggaagctgtgagaaagaagcacagacagtcctgcaccatctcacatccaccaaatccagaattctcctttctcaaaccatccacagactaacttattcagctccccacaatatgagtctgttttgaggccagggggtgggtcctggaccctccaattccttgacagacaaaaggtgtagaatagcctgggattccaggttcctgggagtcctgcagggcaggtgcaggctggggcatggaggcggaagcttcttcacaccacaagcggccacggtagagttgacgggagaaaccaactttaaattcatgcaggatcaggaatgctgtgccacatcaatgtgtaaaatacaatcttcatgtgggagaacgaatggtcatctctgaaatatgctttgcacattaggatttttcagatcttccctattcttggtttacccaaagcaaagcgagttcttgctggggtgaagggtggaagagaaaagcagcggaatgggcgggctgtcgaacaaaaggcggcgagggaggtaccgtgcagagcctgctgggccttctgtcccatggccccgcacaccggactcacccagcctccagccgctcctgtgcctttctgcctaataaatatctgtgataattaccaacccccaaaaagggttctctaacgagggtgcattttatcagtcccttaacgaggctgtttgggttcctgcctcctatagagtggcggttaatgcttaatcagcaaatgcactgtttaaataataacaagaatatcagcagagaatctaaattatcccttaacttctcaaaataatcataacaggcatttgaacattcatacaaatatggctcatgaataaaaatgcgctttctttaatacaaatatagtctgatggaaagtctctgaaacccaacctacggaggcccctccctgtcatctcctggtgcatggaacagcgactttgccatcactgaggttccgggcacagaacctgcctcagtccagcgtccctatccgctgtaagaaagggtgaaggatccagtatgggagatggagattgtccatatcccgagggagggactggccagggcacacccgccaagggcaccttgtgtccctgctctgcagagaccgcccagctctaggtgcctgagtgttttctgctctccacatttgaaaccctaacaaaacccctgagcaatcaggccgtgtggaggcaaagagcctctcctgtaacagtgtggtccttccagccttctctcacatgcggaatttggcagacagtgatgtgagacgctcacatggcaaactttcttttctgtttctctttggcacaaagcctcagcgctcccgcgcctgccctaccactgaacaaaacagcctcttccgggcccagctcacttgtgcctccgcccacctcgctgcgggcaacacccgttttcctaaagattgacaagaggacgtgttactcaaataaccacccgctcagaagaaaaamcctctgtgcagagccttttgtgttgaaaacgacaccttcacgttatcagccttagaggcaggtctgtttgcagcggtgcccgctgaggagtctggatttttaaaatacgccagaaatgacttagggtctcagccaacagaaccaaggaaagttatatttatgtgggaattattttgtcaaaaaagttccaaaatgttggcaaactctgctcaattatataagctttcacctgaaggcacagtatttttttaaaagtcagtttgtgtat

SEQ ID NO: 74562 - DNA, 857 bp, Homo sapiens
caatggtgaaggagtgtgtgtttaaaataaaagtgtttatatttttcagattttgttttctcctgcttccttaaaaaatacactggccgggtgcggtggctcacgcctgtaatcccagcactttgggaggctgagaagggcggatcacgaggtcaagatgctgagaccatcctggccaacatggtgaaaccccgtctctactaaaaacacaaaaattagctgggtgtggtggtgggcgcctgtaatcccagctactcgggaggctgaggcaggagaatcgctttaacccaggaggcagaggttgcagtgagccaagatcgcaccactgcactccagctcggcaacacagcaagtctctcaaaaaaaaaaaaaaaaaaaatactagcacagtggaccctgaagcgccagcagcaaaccctctgagatgtgcgtccggagtggccatgccaccagctttttctgcccactgttttggaaaagtgttgattttggaatgtggtttcccatcactgtgtggaccrtgggtgaatggggagggtggatggtctctggggccgtcctctctccgcctccagatcagcaggcagtggatgggtatttgggtctttcttgtactcacacggatgcgatgtgtgattcctggtaggaaacaagaagcagctcactggcaacaccacactgccccttgcattccgaggagtcatgtagtcatgaggggcatgagcaagatggagacccagaggctcacgctcacatgatgacggccgagccgggcctgcaacggaaaggcctgtggcatggggtaacttcagagccttcttctcaacaggcacggcccgcagagccactggaggtaa

SEQ ID NO: 74563 - DNA, 857 bp, Homo sapiens
caatggtgaaggagtgtgtgtttaaaataaaagtgtttatatttttcagattttgttttctcctgcttccttaaaaaatacactggccgggtgcggtggctcacgcctgtaatcccagcactttgggaggctgagaagggcggatcacgaggtcaagatgctgagaccatcctggccaacatggtgaaaccccgtctctactaaaaacacaaaaattagctgggtgtggtggtgggcgcctgtaatcccagctactcgggaggctgaggcaggagaatcgctttaacccaggaggcagaggttgcagtgagccaagatcgcaccactgcactccagctcggcaacacagcaagtctctcaaaaaaaaaaaaaaaaaaaatactagcacagtggaccctgaagcgccagcagcaaaccctctgagatgtgcgtccggagtggccatgccaccagctttttctgcccactgttttggaaaagtgttgattttggaatgtggtttcccatcactgtgtggaccatgggtgaatggggagggtggatggtctctggggccgtcctctctccgcctccagatcrgcaggcagtggatgggtatttgggtctttcttgtactcacacggatgcgatgtgtgattcctggtaggaaacaagaagcagctcactggcaacaccacactgccccttgcattccgaggagtcatgtagtcatgaggggcatgagcaagatggagacccagaggctcacgctcacatgatgacggccgagccgggcctgcaacggaaaggcctgtggcatggggtaacttcagagccttcttctcaacaggcacggcccgcagagccactggaggtaa

SEQ ID NO: 74564 - DNA, 857 bp, Homo sapiens
caatggtgaaggagtgtgtgtttaaaataaaagtgtttatatttttcagattttgttttctcctgcttccttaaaaaatacactggccgggtgcggtggctcacgcctgtaatcccagcactttgggaggctgagaagggcggatcacgaggtcaagatgctgagaccatcctggccaacatggtgaaaccccgtctctactaaaaacacaaaaattagctgggtgtggtggtgggcgcctgtaatcccagctactcgggaggctgaggcaggagaatcgctttaacccaggaggcagaggttgcagtgagccaagatcgcaccactgcactccagctcggcaacacagcaagtctctcaaaaaaaaaaaaaaaaaaaatactagcacagtggaccctgaagcgccagcagcaaaccctctgagatgtgcgtccggagtggccatgccaccagctttttctgcccactgttttggaaaagtgttgattttggaatgtggtttcccatcactgtgtggaccatgggtgaatggggagggtggatggtctctggggccgtcctctctccgcctccagatcagcaggcagtggatgggtatttgggtctttcttgtactcacacggaygcgatgtgtgattcctggtaggaaacaagaagcagctcactggcaacaccacactgccccttgcattccgaggagtcatgtagtcatgaggggcatgagcaagatggagacccagaggctcacgctcacatgatgacggccgagccgggcctgcaacggaaaggcctgtggcatggggtaacttcagagccttcttctcaacaggcacggcccgcagagccactggaggtaa

SEQ ID NO: 74565 - DNA, 857 bp, Homo sapiens
caatggtgaaggagtgtgtgtttaaaataaaagtgtttatatttttcagattttgttttctcctgcttccttaaaaaatacactggccgggtgcggtggctcacgcctgtaatcccagcactttgggaggctgagaagggcggatcacgaggtcaagatgctgagaccatcctggccaacatggtgaaaccccgtctctactaaaaacacaaaaattagctgggtgtggtggtgggcgcctgtaatcccagctactcgggaggctgaggcaggagaatcgctttaacccaggaggcagaggttgcagtgagccaagatcgcaccactgcactccagctcggcaacacagcaagtctctcaaaaaaaaaaaaaaaaaaaatactagcacagtggaccctgaagcgccagcagcaaaccctctgagatgtgcgtccggagtggccatgccaccagctttttctgcccactgttttggaaaagtgttgattttggaatgtggtttcccatcactgtgtggaccatgggtgaatggggagggtggatggtctctggggccgtcctctctccgcctccagatcagcaggcagtggatgggtatttgggtctttcttgtactcacacggatgcgatgtgtgattcctggtaggaaacragaagcagctcactggcaacaccacactgccccttgcattccgaggagtcatgtagtcatgaggggcatgagcaagatggagacccagaggctcacgctcacatgatgacggccgagccgggcctgcaacggaaaggcctgtggcatggggtaacttcagagccttcttctcaacaggcacggcccgcagagccactggaggtaa

SEQ ID NO: 74566 - DNA, 857 bp, Homo sapiens
caatggtgaaggagtgtgtgtttaaaataaaagtgtttatatttttcagattttgttttctcctgcttccttaaaaaatacactggccgggtgcggtggctcacgcctgtaatcccagcactttgggaggctgagaagggcggatcacgaggtcaagatgctgagaccatcctggccaacatggtgaaaccccgtctctactaaaaacacaaaaattagctgggtgtggtggtgggcgcctgtaatcccagctactcgggaggctgaggcaggagaatcgctttaacccaggaggcagaggttgcagtgagccaagatcgcaccactgcactccagctcggcaacacagcaagtctctcaaaaaaaaaaaaaaaaaaaatactagcacagtggaccctgaagcgccagcagcaaaccctctgagatgtgcgtccggagtggccatgccaccagctttttctgcccactgttttggaaaagtgttgattttggaatgtggtttcccatcactgtgtggaccatgggtgaatggggagggtggatggtctctggggccgtcctctctccgcctccagatcagcaggcagtggatgggtatttgggtctttcttgtactcacacggatgcgatgtgtgattcctggtaggaaacaagaagcagctcactggcaacaccacactgccccttgcattccgaggagtcatgtagtcatgaggggcatgagcaagatggagacccagagrctcacgctcacatgatgacggccgagccgggcctgcaacggaaaggcctgtggcatggggtaacttcagagccttcttctcaacaggcacggcccgcagagccactggaggtaa

SEQ ID NO: 74567 - DNA, 660 bp, Homo sapiens
agataccaatatcagactttctttgaggcagtgtgattctctgcaattctatacatagaggcaaatatcagcttattgttggccctccctattcatgggttgtgcatccatggattcaatggaaaatatttggaaacaaaaaataacaatacagcgataaaaagtaacacgaataaaaaacaatgctgtataacaactatttatgtagcattcacattgtgttatgtattataaataayatagagattatttaaggtatatgggaggatgtgcatagttatatgcaaatactattttgccattttatatagggaacttgagcatccttagattttggtatctgtgggaggggcatgtgtgtgtgtgtgtgtgtgtgtgtgtgtgtgtgtgtgtgtgtgtgtgtgtggtgtgtggactgtacttcattatatctgataatgtagttttgtccaaaaatttttatattaagacacattgtattataagttgcttcaatttttaaaatataattaagcctttatataatagcaatttgaatttacagttttataattttaaattgcacatatatgtaggttatcttatctatacttttatttcatatataaaaagaggcattgagaatcactagatgacaatagtatggtatctgtctctctt

SEQ ID NO: 74568 - DNA, 660 bp, Homo sapiens
agataccaatatcagactttctttgaggcagtgtgattctctgcaattctatacatagaggcaaatatcagcttattgttggccctccctattcatgggttgtgcatccatggattcaatggaaaatatttggaaacaaaaaataacaatacagcgataaaaagtaacacgaataaaaaacaatgctgtataacaactatttatgtagcattcacattgtgttatgtattataaataatatagagattatttaaggtatatgggaggatgtgcatagttatatgcaaatactattttgccattttatatarggaacttgagcatccttagattttggtatctgtgggaggggcatgtgtgtgtgtgtgtgtgtgtgtgtgtgtgtgtgtgtgtgtgtgtgtgtgtggtgtgtggactgtacttcattatatctgataatgtagttttgtccaaaaatttttatattaagacacattgtattataagttgcttcaatttttaaaatataattaagcctttatataatagcaatttgaatttacagttttataattttaaattgcacatatatgtaggttatcttatctatacttttatttcatatataaaaagaggcattgagaatcactagatgacaatagtatggtatctgtctctctt

SEQ ID NO: 74569 - DNA, 660 bp, Homo sapiens
agataccaatatcagactttctttgaggcagtgtgattctctgcaattctatacatagaggcaaatatcagcttattgttggccctccctattcatgggttgtgcatccatggattcaatggaaaatatttggaaacaaaaaataacaatacagcgataaaaagtaacacgaataaaaaacaatgctgtataacaactatttatgtagcattcacattgtgttatgtattataaataatatagagattatttaaggtatatgggaggatgtgcatagttatatgcaaatactattttgccattttatataggraacttgagcatccttagattttggtatctgtgggaggggcatgtgtgtgtgtgtgtgtgtgtgtgtgtgtgtgtgtgtgtgtgtgtgtgtgtggtgtgtggactgtacttcattatatctgataatgtagttttgtccaaaaatttttatattaagacacattgtattataagttgcttcaatttttaaaatataattaagcctttatataatagcaatttgaatttacagttttataattttaaattgcacatatatgtaggttatcttatctatacttttatttcatatataaaaagaggcattgagaatcactagatgacaatagtatggtatctgtctctctt

SEQ ID NO: 74570 - DNA, 660 bp, Homo sapiens
agataccaatatcagactttctttgaggcagtgtgattctctgcaattctatacatagaggcaaatatcagcttattgttggccctccctattcatgggttgtgcatccatggattcaatggaaaatatttggaaacaaaaaataacaatacagcgataaaaagtaacacgaataaaaaacaatgctgtataacaactatttatgtagcattcacattgtgttatgtattataaataatatagagattatttaaggtatatgggaggatgtgcatagttatatgcaaatactattttgccattttatatagggaayttgagcatccttagattttggtatctgtgggaggggcatgtgtgtgtgtgtgtgtgtgtgtgtgtgtgtgtgtgtgtgtgtgtgtgtgtggtgtgtggactgtacttcattatatctgataatgtagttttgtccaaaaatttttatattaagacacattgtattataagttgcttcaatttttaaaatataattaagcctttatataatagcaatttgaatttacagttttataattttaaattgcacatatatgtaggttatcttatctatacttttatttcatatataaaaagaggcattgagaatcactagatgacaatagtatggtatctgtctctctt

SEQ ID NO: 74571 - DNA, 726 bp, Homo sapiens
gccattctcccgcctcagcctcccgagtagctgggactacaggcgcccgccaccacgtccggctaattttttgtatttttagtagagatggggtttcaccgtgttagccaggatggtctccatctcctgacctcgtgatccgcccatctcggcctcctaaagtactgggattacaggcgtgagccaccgcgcccagccttttttttttttttttttaacaaaacaagatacctttaaattcctgaacctttgcttatttgaaagggagctgaataatagtgcttccatcaattaatggcagtttcaggagaccttcaaggaagggtggaccatggcatacaggaatcaaagtcctgggagacttcccaagtgctaaatactcttcatgtctatagcaagtgttaatgatcttattatactcatgccctttattcttctatcctctcactcctttgcttccatatgatctccttttctccgggtcacacaccaagaatagtttttgarcactttatctctttttttctctgaggtctttcttctccatagaattcatctcaattttctctgagtctcaactagcttaaaacacccttgactagaaatgcccaaggtcaccggtaggctctgtagccagctgagaagaaggatatttgatgtctgtgcctcatgcccagtgccaagcttggaaacatacctcctcacctcactgcatgacttccatta

SEQ ID NO: 74572 - DNA, 489 bp, Homo sapiens
acagatcagtgacctacaagggagggagaagtacaagaaggcttctggaggacgtggccatcaccctggacatctggtgttacagattttagccaaactctctgtgtatgtctgtgttgtgtatgtttatgtggaaaatggcatgccaataggtgggtcttttggaaaatgttaccaatttctgatttttgttttcggtttttttaaaaaaggttctgtgagaaaaactgagcttagagggtgtgatggtgggttttatgtcaacttggctaggccatagtgccgttatkcagccaaacgacaccataggttttgatgtgaaggtattttgtagatgtaattaacatctgcagtcagttaactttaagaaaaggctattagccttgataactttggtatgcctcatccgatcagatgaaggccttcagaacaactgagatgtcctagaaaagaaggaactctacctcaagatgacagcattaactcctg

SEQ ID NO: 74573 - DNA, 1335 bp, Homo sapiens
tgagcaggttttcctctcacaaagagcacttgacactygcctgaaagcatgagaaggcgctcactgtggtagagtgcagaggggcaaaaggcgttcaggcacaagtttggtggtggttagaaaaaaacaaatatgttccaagactgataaatagtatgccggagctcaaggcaacctcaggcaagtggcaagagacgcaatggaagggcaggcagcagtcaggtctgaatgatcttttatgacagacttcaaatgaggtgcaaattgatgaagaattgtgttccaggtctcacagagagcagatgagaatcaaggcccgatctaggctaactttgaagccaggctttgtcttacacaacaccactctcagatcaaagggataaggctgggatgctgtattttggaagtaatactacatcctagctctccaatttgagttgcatcagctgctgaagttgggggaaggaggaccttgatcaagatcacatcctgctccttgctccttattctatgtgatttgtatagcctgctcaaagtcttcagtctgattccatttgagccaggcccggccaataactgcagctggttggttcttggacttggtcacctttcagcaaggctcaatcacacctccatcttatgcacatacaagatgcactggggcacctgccatcttcctgctaatggcaggctgctaaggatgttagcacgcacctgcagctgtccagtggcccctaatttagtagtcataactgtcacaagctaatgcaacctgacagaaaatgtggactgggaagctcgtcattaccaaatgactcacggcccagcacacccagtgtcctcccaaaacacatgactaaagccccagcagtgctcttcccaagagcctctttttctcctttttcagattctccaacatatggaaaggatcagatgaataccctgcttcctcgccctctgccccagtcccatagaaaacagatgactgtctccaccactccctcagccttcccaactcctatgccaccacacagatcctgaaccgctatctcaggctaccatttgccacctactctgtcacataacacctgtagcaggcaagggctggcgagatgattcagtgcccttacattgttgagaaacagagccccaaacctctttctgctgggtattgtcactagcgcccaggggaggggaagcacagagaatgcatttaaggaaagcccgtgccaagcaaggcaagaatatgcttactaagcaggcacatggaagcccaggaaaatcagggcctttctaccgcccttcccccacagttatttggatggtgtatgacag

SEQ ID NO: 74574 - DNA, 2449 bp, Homo sapiens
caagggaaaggcaggaacaagaacatctccatttctatatcaggagtcacaatagcccagttacacaatgacggcagacacagaatgctccagttccttcaggtcaagctccctgatgtagttttattatatctttaaaaaatgtatttgtactttaaaaacacctattcgacatagtgtgaactcatttccatcattccagggcagttggaacaaagctttatgctcagttgttacactgttcatgattttattactgtactgttgcttcctttcccgtgttaagaatcatcttttaatgtgttttgaaataaaatttttattttagaaaaatgttaggtttatcaaacagttactaaagatagtccagagagttcctgtatgatctcactcagcttctcccaatgttatcatcctatattaccagggtacgtttgtcaaaactgagaaaccaacacgagtatgtcattactagctaaactcaagactttatttgratttcaccttaatttttcctgcaaacttttttccagttccaggatataatccaggataccacactgcgttcagctgccatgtctcccgtttcctctgatctgctatgctttctccgtcttgccttgtttctcatgactttgacagttttgtggagtaccggttgggtattttgtgaaatgtgtctcaacttggatttgtctgatgtttttccagtgattaacaaagcctcagtttttaaagttttattttaaataaattctgtataacctgtgatcggggcaggttgctccacattatacaaaattcacagtttaagagcatgtctcaagaacagcagtccccagattacctggtatactgaatccagccactttctgagaatcttgtgacctctgatcaaaactgattatttaactgcatttacattcactaacttaaaatcctacctccaccgtagagaatttgtatggatcacaattgaagtggtcaaacccaagaggaatcctgatttagatgttagagacaagagttagtcaatagtggtgaaaagaaaatgtatacttattttttttttctggagaagtagtataattatgagtcgattcaaaatatgagcttggaagttaagacagacctgggtttgaatctggtagctgtgtgatctcgggcaagccccttcaactctctgtgtctcagtttgctttctaataagggtacttataaaacaatgttgtgaaaatttaaaggactttttaaaatgtttagaaagtgttttttataaatgtttataaacatgcatagaggaacacattaatcatacagcaatcaatgaaacattacatcaacaatggttacctctggaaggtgggattacagaggctatttctcaatctttctctaatgtacatgttatcgggaaatgcccaataaatattaggaagaaaatctgacgttgctttagagtttcctacaccccaggtgtctctgtaccaggcctagaacggaaatgatactgcaccaacctgctagccacttaggaaaatttgctaagattctcatttatgctcctctttctctagtgcaagctgaaaggatcccttcaggagaagagggtgaagtggctcacccaggtcacaggtgaaacagcgctggagctggaactagaagattctctacccctgacatctgaaggatttgtgaaggtttgttcttcccacctgtgacatttgggcggcttgctccatttaatctcacaaggttactgaggttgaaacaacttgttcttgttctctaaaacaattccaaggagaggagtatagtgggcggcaagctgaggtgcttttgaaagcttggctgacagcttagccttagcttcaataggttaagtaacttatcccagggtgtttgacaagccagaggcaaagccaaggatcagagctcaaaatgttagactgttaatcttgggtttccactctgggtcagacagtctttccacatagcctggctgctctcaggatttacagggactgaaaacgatttcttctggagagtcagcaccattgcaatggaacacctgcatgccttagtggctgctggagtcttttagtgtgctgtttcctattctatcatgctccccagattttggtgctcctggccatgctggacatttctgagggtttacctgacaatagaagacaaagacaaggcttatcactcacttcacctagacatcaaataacaccaaggcatcctgttttgattgagactagttgacacaaagattcaagttccagtgtgctgaatagctgctcacttaccccagtctcaaacccttcacgcttccttataaaataagccttcttattttgtttgatgatttttttttccaaaacacaaattagagcctatgaaatcctgggctaaagaaaggtcaccttcatgtttatttaaa

SEQ ID NO: 74575 - DNA, 2449 bp, Homo sapiens
caagggaaaggcaggaacaagaacatctccatttctatatcaggagtcacaatagcccagttacacaatgacggcagacacagaatgctccagttccttcaggtcaagctccctgatgtagttttattatatctttaaaaaatgtatttgtactttaaaaacacctattcgacatagtgtgaactcatttccatcattccagggcagttggaacaaagctttatgctcagttgttacactgttcatgattttattactgtactgttgcttcctttcccgtgttaagaatcatcttttaatgtgttttgaaataaaatttttattttagaaaaatgttaggtttatcaaacagttactaaagatagtccagagagttcctgtatgatctcactcagcttctcccaatgttatcatcctatattaccagggtacgtttgtcaaaactgagaaaccaacacgagtatgtcattactagctaaactcaagactttatttgaatttcaccttaatttttcctgcaaacttttttccagttccaggatataatccaggataccacactgcgttcagctgccatgtctcccgtttcctctgatctgctatgctttctccgtcttgccttgtttcycatgactttgacagttttgtggagtaccggttgggtattttgtgaaatgtgtctcaacttggatttgtctgatgtttttccagtgattaacaaagcctcagtttttaaagttttattttaaataaattctgtataacctgtgatcggggcaggttgctccacattatacaaaattcacagtttaagagcatgtctcaagaacagcagtccccagattacctggtatactgaatccagccactttctgagaatcttgtgacctctgatcaaaactgattatttaactgcatttacattcactaacttaaaatcctacctccaccgtagagaatttgtatggatcacaattgaagtggtcaaacccaagaggaatcctgatttagatgttagagacaagagttagtcaatagtggtgaaaagaaaatgtatacttattttttttttctggagaagtagtataattatgagtcgattcaaaatatgagcttggaagttaagacagacctgggtttgaatctggtagctgtgtgatctcgggcaagccccttcaactctctgtgtctcagtttgctttctaataagggtacttataaaacaatgttgtgaaaatttaaaggactttttaaaatgtttagaaagtgttttttataaatgtttataaacatgcatagaggaacacattaatcatacagcaatcaatgaaacattacatcaacaatggttacctctggaaggtgggattacagaggctatttctcaatctttctctaatgtacatgttatcgggaaatgcccaataaatattaggaagaaaatctgacgttgctttagagtttcctacaccccaggtgtctctgtaccaggcctagaacggaaatgatactgcaccaacctgctagccacttaggaaaatttgctaagattctcatttatgctcctctttctctagtgcaagctgaaaggatcccttcaggagaagagggtgaagtggctcacccaggtcacaggtgaaacagcgctggagctggaactagaagattctctacccctgacatctgaaggatttgtgaaggtttgttcttcccacctgtgacatttgggcggcttgctccatttaatctcacaaggttactgaggttgaaacaacttgttcttgttctctaaaacaattccaaggagaggagtatagtgggcggcaagctgaggtgcttttgaaagcttggctgacagcttagccttagcttcaataggttaagtaacttatcccagggtgtttgacaagccagaggcaaagccaaggatcagagctcaaaatgttagactgttaatcttgggtttccactctgggtcagacagtctttccacatagcctggctgctctcaggatttacagggactgaaaacgatttcttctggagagtcagcaccattgcaatggaacacctgcatgccttagtggctgctggagtcttttagtgtgctgtttcctattctatcatgctccccagattttggtgctcctggccatgctggacatttctgagggtttacctgacaatagaagacaaagacaaggcttatcactcacttcacctagacatcaaataacaccaaggcatcctgttttgattgagactagttgacacaaagattcaagttccagtgtgctgaatagctgctcacttaccccagtctcaaacccttcacgcttccttataaaataagccttcttattttgtttgatgatttttttttccaaaacacaaattagagcctatgaaatcctgggctaaagaaaggtcaccttcatgtttatttaaa

SEQ ID NO: 74576 - DNA, 910 bp, Homo sapiens
tccccactggtgtggatgctgcagggcctgggaaaagatgcagttaatggcaaagcacaaagcagactggggaaagggacttgcactattgcttcccttactacttggtcacctccctctggaattagtcagctctgatcttatgttctcactccggtttctgtgctttgcagacccccagaacttaagggtacgcctcagcattcattctgcattcttagaattgcattctacmtttctctctgtatctgcaggactagtgtgtctcagagttgttttgagttgtctaatgcttggacagtgcttttcgcatggctgctttccaaagcccacctttcagaggctagcttaggtccaagcattcttctcatccactagcttttctgacaactggaaaaataaaagttaaacaaaaaaactcctttgctgatctatgaatggaagctgggacccggacagagcgagcaccatctgatctattttctcccattgtgcggggagcaaatttatcacactgacaatgggaggataaccgactggggctgacagtaaaacctgacttcccttgagctgcaagacactgtggcaggctttgcagcaaagaaagaaggcgtattaaaagtagcacctgcagagctcctgcgagaggagggggagcggccagctcaaaaacaccaagtatggttcacaatttgaaaaaaaacaactccacaaaattaataaaattagtatcagttgtggtgatgtgtgcctcctccagttaataaaagaaataataattcaatccatttgcagcaagtttggtggttaccattaatgtaatgtgacaacttggcaccgaaaagaatgttgctgctgatttctgctctttccactgagacagaccactgctgactgggaatgatcttca

SEQ ID NO: 74577 - DNA, 1617 bp, Homo sapiens
tcacactcctcattttctcaggcttgcatcatatacatcatctaatctgggagggtccatcattgtgcatccatagtgctccctgcatacttctgggactacatttattaccttttaccttaaccgctgtttcgcttgtctgcctcctccatccttggagatggcaactgtgtctgactcatctccgtgccgaggataaggcctagcagagaggatatgttcggtaaatgcttaatgactggatgatggatggagtttcgcttggccagggtcttaagtttaaactcagcatgttaccgccaatatactcacaggttagcttctagtttttattttttagcccaggctactgtatggggaaagtaggtagaaagaaaaggtcagtgttacctgcagtgggataacagtcaggtttaaacagttttacaagcaagcaccttaactgcctcctctggccagttactttagtttggggatactcagtcagagtgccgttagtccttcttagtcttcaatttctctctttactggatgctccatgtcaacagaagccatgttttccaatactacagcatcttcgcaaaactttgtcaagtgagcctcccacctcacaaatcactgaaggaacagaccagaaggatagcctccagcctcacgcagaattcttatgatgtctgcttagattctgagctattgccaattttcaggtccagtaccactgtccaagcctcaacctggcaagaattcaacaattcttcattcaaaacaagtcaatcatttacccgctggatcctaggaaaggacccaatgaaaagaaaaggctgtgtttgactcactgttcctctccaacagagtcaaagggttaatcatttgtgtgcagtctgggttccttgattgtaaattaacttttttttcatatgaaaacacaggaagacattagtattatttccctaatacttcttttagaaaaaacatccttatttttctttccatagaaaaatcaggaaactgcgtgkcaactgttgcagaaacacaaagacgatgcaactccacatgcatattttccaagtataccaggatttgtggtacaatggacagttaacatttgtatacagatatacattctttgggagaatcatcactatattacagcagttgttcctttttgcaccaaacctacagaactgttgtaggtcttattttatatttctgcttttttatggataagcaatcaatatataagactttctcacccaggcaatcatggaagcaaatgttgtttcctttagccacatacaatggtaggaatattatgcagagattgttctagaatacacaaaagtccccaagcagctaaagtacttttaaagctgaaaaatgctggtaaaatcaactacatctgggccagaatcagaggtaaatcgacatagaatgcctaaaagccatctgaatagtaattaaggtttattttttttctacaaatcttactttaatatagcacttaacctttcaaatgttcttaagccaacaaatggatgatttaataaaggtcttagtttattttgagctttgagatagaacttgttgcttgactatattccattttgaagctttggc

SEQ ID NO: 74578 - DNA, 1339 bp, Homo sapiens
tattagccctcttcattctagaggagtttgcacaacatgtctaaatcttggcacagccacagttcagactttaaacaaggggcttctaataattcccttcatcagtgtttgttttgatgtatttatcagctagcagtgtcacagcagatgcactgttagccaattcttttttaatgatgttgccacctgtcactaaattttttgtgagtttatgagatgaatgaatgtcctgaacctggctgcaaggtaaatatctcatgtatctcatgacatgcactctaaggacctttacayggatatagcataatgtatgtttacgcttcactggccgtttacaaggtcacatgataccaggagacaacccctagcagtcacaggcatgtcatcttcaagaagcagtaacatatgacaaatgtgccacaccatttcactagcaaccatgctgtgtgtggtattccctactgtaaagacaagaataaatcaaaggagccaaaagctcctttcagagttaatgggactatcaaatcacacaagtaatacggggagatgaagaacttctcagtgaggatgtctgttataaaggttcttgcagaaataatatctttccaggtcacatttcccaatcaaggttttttgttttgttttgttttgagatggagacttgctctgtcgcccagtctggagtgcagtggtgcaatctcagctcactgcaagctccacctcccaggttcacaccattctcctgcctcagcctcccgagtcgctgggactacaggcgcccgccaccatgcccggctaatttttttgtatttttagtagagatggggtttcactgtgttagccaggatggtctcgatctcctgaccttgtgatccgcccgcctcagcctcccagagtgctgggattacaggtgtgagccaccacgcccagcccaatcaaggttaaaaggctgcttgtgtattagcataccagatattttagcatccaaagtcaggcataatcttacgtgttctggacatggataaagtgtcatgttcatgtggcaactatacaattagttttatatttttataaataccatttatataattcattttatatttatatttcatctctcttcgtagttgtaaagatctgacattgatgaagtcaacttttagagaaaaccggagcccttatcggcaggagtgcagctggtaattgtgttaaccaaggcctttcattcctagaagcattatgccagttcatgtcagaacccatttggagttaagtttaacatgcacctagttgtgtagcacaggactctccttcctttgaggaagtttgaatattcctgaag

SEQ ID NO: 74579 - DNA, 665 bp, Homo sapiens
ttaactcccttgacaactatcacttgtccccaatccccacccttccacttgacatacaaacccaaagagattcatgctcatttatgctcagtagaaaacataattccataggttactgctattattaatcaaatatttactagatttatatctattagtcaattctctttagaatttctttgactgtttctataaatctttattcctcagatattcctttaaaccagtcttaccagcttattggctccactactaattaattagttgrataaaatctttgaaatgtgtttatgtttgtataaaaaccatcttctttacttttcaaaaactatacttgagcacactgtgaaaagataaattgctaggttcaactgaggaactgaataattttttcctcttttagttttaacattctacacaatctaaattattttaaaactcagaaaatgctttaagctcatatttatagacttcccaagtagtacaatctgttaactgaggtaggtaagtaaacgtccttgaaaacttccataaatgatggtgaataaattaaaaaggtggaaacaattttccaggtctctgagccatattcaatataatgaatcctgaataggagttcaatgaaaagattaggtagattttttttaaaaaaaacccatatccca

SEQ ID NO: 74580 - DNA, 712 bp, Homo sapiens
ccagatcccagtctaactggccactgtcttttgctccccacagacagcagggaggtgaaggtgggagagtacaacgctgtggccgacacactggagatcatcaatgacaccatcaggttccaaggtaaggcaggtgggcttctcagaggagggggcctgcccagttgctcccaagcctggacattgtctaagggttagggacaagctcagcatccttggcttcagggggtcaagggaacatcctcaacacatgcactcaatcgttgagcacagggcwccaatcacttgtatgggctccagcacctggcatgggtcactagagtttgtatgaagtgcacactgaggtgtttaaaccattggatggccaggagtaattctttttaaatgtagccctgctaaatttaggtctatcttctcctctggcaaagggtttgactgggttggaaataaggcctgtctatctgctgctcttcctagaagattatttcttctcctctgctagagaactcctcttcagcttctataaccagctcaaatgacacctcttctgtgcgatcttccttaattgccatccaactgagctaatgactcccttctctttgcttccagtctttcttctctgcctctcttatggccactgtcactttacattgatattactaggtgattcagctatgagcccctgactggatcctatttaactttaaattcc

SEQ ID NO: 74581 - DNA, 876 bp, Homo sapiens
cagtctctgcagcatctgtcctgggaagggccagccctcttgagctctgagtgtgtttttttcatgttggttatatcaggttccttgagaggcaaaagtgaaaggcaactcttgggtcctggcttccttgaggaggctggrgtgccactccgtccatccagacttcaaatggacccacactgatgtacatctgctctgtttcactggcactgtttcatttctgtctcacaacaatcctctaaaaccaatacgaccctacacaattttcatagaagatgaaatgcttgttttcctggcatctggttcagtaatgaaaatgtgttttgaatggaggtgagcaaacagggctatcaggagagcatccagtccaatgggcggcaggtgtgcaaacaatgacaacaggtcttctttcttgggaagaaaggtgcatgtggatctggggcctctgagcaggggtggcaagatgggatttgctatgtaagagatacgcttggacaagttcccatgagaaacatggggagctcctcctttgtgaacggaagcctctcccaaaacgtttgataattactgctttagcaaaagaaatgctttttccttgaaaaacaaaagctcaggcacagttgggtttctctctcactattgctccttgcatagctccaactaccatattaatttttttaactcatacagatttatcttaaccatattaattttcattactagccaaaatgtcttctacttcacagagaaaaatggtgggtagagaagtgagaactgtttatcttagacaaagatttcagcagaatagcaaagttcataaccaaccttctatagccacacacattccttttacgccttctgaaagttcaaaaatga

SEQ ID NO: 74582 - DNA, 620 bp, Homo sapiens
tgaagggcagtatctgaggctgtgagtcaactatgctccctgaagcaaaagatataagmaatgactttctgtgagtttcatactcatcattcgcaccatcttttatccacctttcccaaggcatgtggctttgggtttagcagtcagctgagcttaaataaagctcacacacagctttagttaggagagctgacaaggcttttctttcctgtgggatatgcaagtgcctggacacaagcatcagaacataccaaggccacagaacatgcctatccataggaataatttgataagaagaaatctgtaaactcccatttgtaaggttgacaatagacccatgggatagagcttgtctttcatttgctccaaaagtccaagaaagagttaaaatatggaactgacttcttcaaaactcattatagtgcactaacaaggtaataggcagcatgattgctgctattccgccaacccatggtggtggaaatacctgctctcagttaattgtcaggcctataccacataatgtaaatcaattgccaatactaagactaagactaaacataaaaaagacacatataaatagacatagcaggtgggaagaaataggccagaaaaataca

SEQ ID NO: 74583 - DNA, 998 bp, Homo sapiens
tcacttatcatttcatagtgtttctgggttggaataactcactgaataatttctcagcagtaagagctagaagtgcatcaacaattatcattacatcaaaatctatcttaattacaacattcataataatataatatctataagtatttggtatatcatctgccaagctgtgagctaaattctttaaatgtgttaatttatttaagctttaccacaattctatgaatgaaatagcattattagtttccttttgcagatgaggaaattgagtcttagaaagtttaaacgaagagttccaaattgcataacaattaaatattcgacttagaatgtaaactcaagtagttttactttgggtgacactctaaatattactctttaaatagatcagtattatgatacattaaaattattccttttctaaagtaatgtcttccattacattataaggtatgttttaattcctcatatttctttgttgcactatgtcatggcaatttatttaaacagtcacataggaaaaaaatggcatgacagaaaatgctcagacaaaacataataggctgggcatggtggctcacacttgtaatcccagcactttggaaagctgaggcaggtgaattacctgaggtcaggagtttgagaccagyctggccaacatggtgaaaccccatctctactaaaattacaaaaaattagccaggtgtagtggcatgtgcctctagtcccagctactcaagagactgatgcatgagcatcccttgaagccaaaaggcagagattgcagtgagctgagatcacacccctgcactccaacctgggtaacagaatgagattttgtctgaaaaaatttaaaacaattaaaaaaaaatttttttaattaattatttttattttattattattatactttaagttttagggtacatgtgcccaatgtgcaggttagttacatatgtatacatgtgccatggtggtgtgctgcacccattaactca

SEQ ID NO: 74584 - DNA, 754 bp, Homo sapiens
ttccctgcctcttccagtttctgggggctgctggtgttccccggcttgtggctgattcaatctgatctctgcctcagaggttacactgccttttcctccatcgtgtgycatcgaatctccctctctcacaaggacactgtcattgcatttagggttcacccacaaaatccaggaaaatctccccacttggagatcgttagcttagccatgtctgcaaagtctaccaaataatgaacattcacaggttctaggggttagaccctgatgtcttcaggggccattatcagtttaccacaggccccgtgccctccctgggaccacagcacccagggcagagatctgtactgggctctgtggggaagaggggcaggactccttcccgaaaggatactgggtcccgcacagtcgcagctgtgcagaggactgtgggccagggcccagcctattttgtctctctcatgattgctgatgggacagtggtgtgcaattcccagagaatcccgcacatgttttctcacttgacctcatcagcaacatgaaggcttatcatggatattattgttatctccactttttgatgagaagccaacctcaggggtcagctgcctgctccaagttgcatggaagccttgactctctgctcctaggagacaggatggatgggccgccctggtggatacctgctttttgggaggccaccaggcaggactgggggtgggaagtcccaatgttgcttggggaggctggtctggtg

SEQ ID NO: 74585 - DNA, 754 bp, Homo sapiens
ttccctgcctcttccagtttctgggggctgctggtgttccccggcttgtggctgattcaatctgatctctgcctcagaggttacactgccttttcctccatcgtgtgtcatcgaatctccctctctcacaaggacactgtcattgcatttagggttcacccacaaaatccaggaaaatctccccacttggagatcgttagcttagccrtgtctgcaaagtctaccaaataatgaacattcacaggttctaggggttagaccctgatgtcttcaggggccattatcagtttaccacaggccccgtgccctccctgggaccacagcacccagggcagagatctgtactgggctctgtggggaagaggggcaggactccttcccgaaaggatactgggtcccgcacagtcgcagctgtgcagaggactgtgggccagggcccagcctattttgtctctctcatgattgctgatgggacagtggtgtgcaattcccagagaatcccgcacatgttttctcacttgacctcatcagcaacatgaaggcttatcatggatattattgttatctccactttttgatgagaagccaacctcaggggtcagctgcctgctccaagttgcatggaagccttgactctctgctcctaggagacaggatggatgggccgccctggtggatacctgctttttgggaggccaccaggcaggactgggggtgggaagtcccaatgttgcttggggaggctggtctggtg

SEQ ID NO: 74586 - DNA, 754 bp, Homo sapiens
ttccctgcctcttccagtttctgggggctgctggtgttccccggcttgtggctgattcaatctgatctctgcctcagaggttacactgccttttcctccatcgtgtgtcatcgaatctccctctctcacaaggacactgtcattgcatttagggttcacccacaaaatccaggaaaatctccccacttggagatcgttagcttagccatgtctgcaaagtctaccaaataatgaacattcacaggttctaggggttagaccctgatgtcttcaggggccattatcagtttaccacaggccccgtgccctccctgggaccacagcacccagggcagagatctgtactgggctctgtggggaagaggggcaggactccttcccgaaaggatactggstcccgcacagtcgcagctgtgcagaggactgtgggccagggcccagcctattttgtctctctcatgattgctgatgggacagtggtgtgcaattcccagagaatcccgcacatgttttctcacttgacctcatcagcaacatgaaggcttatcatggatattattgttatctccactttttgatgagaagccaacctcaggggtcagctgcctgctccaagttgcatggaagccttgactctctgctcctaggagacaggatggatgggccgccctggtggatacctgctttttgggaggccaccaggcaggactgggggtgggaagtcccaatgttgcttggggaggctggtctggtg

SEQ ID NO: 74587 - DNA, 625 bp, Homo sapiens
gacagataacactcattctggccatctggtcactctgtgtgcctctatctcaaccccttttaggtgggaggacacaccatgctccccattcgctggatgcctcctgaaagcatcatgtaccggaagttcactacagagagtgatgtatggagcttcggggtgatcctctgggagatcttcacctatggaaagcagccatggttccaactctcaaacacggaggtaaaaagggggtgcgtaggaatcttgattgggggagrgctcataagagctatctcagcccagaacttggacctactgaacaagacattaggtgggatttagagccagcagagtgaatgcaggcattagtgggagcagagagcttcttagtaggaaaaaaaaaatggaactgtaggaaatgtggtgtaattgtcaaaagagcatgaaatcagaggtctaaattgagactcaagtcatgcctctgttaaatctgctacccttaaaaatcacaaatgtttcactatgacaaaaaaggaaaacagaacagctatgagtttttcaattgtgccatcttgtggaaacacccactacttagtatgcccacataatctgggtgcacataggttttaggtatgccaagccc

SEQ ID NO: 74588 - DNA, 778 bp, Homo sapiens
caaagttgataacttaacataagtgactgaggttttagtagaactgggttttaytaatcgtatctcctccttgaggtgctgttcccttcattcctttcctttatgacaggtgaatgcattggctatgctgattttatttgcatcctggcgagtcttggagaatcaatctcgttaaaatgatgactgcatttgcctttggagaagaggtttattgtctaagtaaaactcttatgtgaaggtgtcatttatgtaaaaaaaaaaaaaaattctaacttgataagatggccacaggttagaggggtgtgttctcagttgatattaagggatatgttgaaaaggcaagtgcccaccctctattcttcatctcacccttcctttctccccaacctcaaaagaaaacaaaaaattatttttttaaattgtattagtaatttatgtttaatacaaaaggatgatttaatggtatcaccaaaggttgtttctcccattgtgcatgtccttcagtctcggccccatacccatcaccccattcttcaccctcatgcttccatcccaaggcaaacatgtgtcttcatcggaatctatgggtgttgaagttaaatgtgggggcagagatttaacaccatgacactaatacaaatcaaccattcttcactttcaaatggttaatcactacaggaaggcgaactcttttcttggtttttggttaaaaacattttatacatatatatgtatatatgtgtgtgtatgtatggacataggtatgtatatgcacatg

SEQ ID NO: 74589 - DNA, 778 bp, Homo sapiens
caaagttgataacttaacataagtgactgaggttttagtagaactgggttttactaatcgtatctcctccttgaggtgctgttcccttcattcctttcctttatgacaggtgaatgcattggctatgctgattttatttrcatcctggcgagtcttggagaatcaatctcgttaaaatgatgactgcatttgcctttggagaagaggtttattgtctaagtaaaactcttatgtgaaggtgtcatttatgtaaaaaaaaaaaaaaattctaacttgataagatggccacaggttagaggggtgtgttctcagttgatattaagggatatgttgaaaaggcaagtgcccaccctctattcttcatctcacccttcctttctccccaacctcaaaagaaaacaaaaaattatttttttaaattgtattagtaatttatgtttaatacaaaaggatgatttaatggtatcaccaaaggttgtttctcccattgtgcatgtccttcagtctcggccccatacccatcaccccattcttcaccctcatgcttccatcccaaggcaaacatgtgtcttcatcggaatctatgggtgttgaagttaaatgtgggggcagagatttaacaccatgacactaatacaaatcaaccattcttcactttcaaatggttaatcactacaggaaggcgaactcttttcttggtttttggttaaaaacattttatacatatatatgtatatatgtgtgtgtatgtatggacataggtatgtatatgcacatg

SEQ ID NO: 74590 - DNA, 695 bp, Homo sapiens
tcatacagtcaggaattataggagcagagatcaaaccaaggcagtgtgggtccaagagcttacaacttttcatctgctatggggacaccaagacatccataaaatcaaatattcttccagtaaggttggcttgttctaaatgattcccacttcataaggattactgttactgtctttctaggagtttctgggaaccatgacccagaatctccagcttagaatccagtgccttactacttgctgccagacctgtttatgacccacacctgtgtgtcataaacacacaggattttagcatacttaccccatcatrtcctagacactctgttctgtctcctaccagaacctgaagtgggtcatccttgactcagactatcactcgtttgcctcttctgaacattctcccaggataatgcactgcttgattagataagacttgctcctgctgcctgcagctgcattccacatcatctccaaaggctcacctcccctaagtgagcatctggttatctgtctaggtttctcttggtctggaatgacctatttcctaattctaaattccctttctgacttcactcattcatacttttattaggtgcctaacaagtgccaggtactgtcacacaggacagcacacaggcacacaggacagcaggatgaacagaaaggaacactcctggagctctacattagta

SEQ ID NO: 74591 - DNA, 1320 bp, Homo sapiens
tccgcgttcaggggaagccgtgtccctgcggtcatgagacrtgattgttcagaccaatggatgaggctgagcagaatcatttcatttcccccgcacttgccaaaggcagggactttcctgtttgtccctgcctgatatgcaggaagggctcagaactacttaagaacaaatcaatgaacctatggctttatggcaaataccacagaaacaaccttagaaatgggctgaggaggctgtctggcctctaacaaatgacctcatctctctgaaccttaacttcctcatcagtaaagtggcagtgcagcccctccctcacaggacgctccctggcagagtgcagccctgccgtgcagcagccggtatgacctcgtccttgtgatcaggagggccctgctgaactgtttccgccccgcaggtgcctacgaagcctgggaaatgatgtggccttcctggagccatgcaatggctttgttgtcaccaggaaaagggcctgtggcacccgcctggccactcatgtcctaaatgagacaggccctcttcatcggcctcagtggctcattgagatgaggacttgggaattttgctgtttaacagagcaactgagcacccaggtggctgccccagcagaccctggagacgtttcaggagacctggcagggacccaagcctctgccactgcaccaggccctggccagagggctgggctcagagccctttatttttttatttttattttttattttttagagacacagtattgccctgtctcccaggctggagcacagcagttgaaaccatacctcactgcagcctcgatctcccaggcttaaatgattctcctgcctcagcctccaagtagctgggaccacaggcatatgccaccatgccagccttattgttaagtgttttgggtagatcccatctccctatgttgctcaggctggtcttgaactcctgggctcaagcgttcctcacatctcagcctcttgagtagctgagaccacaagtgtgtgccaccgcacctggccccagagccccttttaaactgcaactcacagtctccaagttagactcacacagagaagatctaaatatgtgtctccttgagggaggctgaggagtggaggaggatgaactcttacaaaacatcaacctttttaaaaatgtgttttcagtaattgctgttctgcgccaagttttatcctagtgggagtttcatgtcagaattactaagtaggagttcataacagagaagttaatcgcccttgtgtaggggcgaggcaccgagcgatgatctctgtgcccaggtaggtgcttcct

SEQ ID NO: 74592 - DNA, 1320 bp, Homo sapiens
tccgcgttcaggggaagccgtgtccctgcggtcatgagacgtgattgttcagaccaatggatgaggctgagcagaatcatttcatttcccccgcacttgccaaaggcagggactttcctgtttgtccctgcctgatatgcaggaagggctcagaactacttaagaacaaatcaatgaacctatggctttatggcaaataccacagaaacaaccttagaaatgggctgaggaggctgtctggcctctaacaaatgacctcatctctctgaaccttaayttcctcatcagtaaagtggcagtgcagcccctccctcacaggacgctccctggcagagtgcagccctgccgtgcagcagccggtatgacctcgtccttgtgatcaggagggccctgctgaactgtttccgccccgcaggtgcctacgaagcctgggaaatgatgtggccttcctggagccatgcaatggctttgttgtcaccaggaaaagggcctgtggcacccgcctggccactcatgtcctaaatgagacaggccctcttcatcggcctcagtggctcattgagatgaggacttgggaattttgctgtttaacagagcaactgagcacccaggtggctgccccagcagaccctggagacgtttcaggagacctggcagggacccaagcctctgccactgcaccaggccctggccagagggctgggctcagagccctttatttttttatttttattttttattttttagagacacagtattgccctgtctcccaggctggagcacagcagttgaaaccatacctcactgcagcctcgatctcccaggcttaaatgattctcctgcctcagcctccaagtagctgggaccacaggcatatgccaccatgccagccttattgttaagtgttttgggtagatcccatctccctatgttgctcaggctggtcttgaactcctgggctcaagcgttcctcacatctcagcctcttgagtagctgagaccacaagtgtgtgccaccgcacctggccccagagccccttttaaactgcaactcacagtctccaagttagactcacacagagaagatctaaatatgtgtctccttgagggaggctgaggagtggaggaggatgaactcttacaaaacatcaacctttttaaaaatgtgttttcagtaattgctgttctgcgccaagttttatcctagtgggagtttcatgtcagaattactaagtaggagttcataacagagaagttaatcgcccttgtgtaggggcgaggcaccgagcgatgatctctgtgcccaggtaggtgcttcct

SEQ ID NO: 74593 - DNA, 1320 bp, Homo sapiens
tccgcgttcaggggaagccgtgtccctgcggtcatgagacgtgattgttcagaccaatggatgaggctgagcagaatcatttcatttcccccgcacttgccaaaggcagggactttcctgtttgtccctgcctgatatgcaggaagggctcagaactacttaagaacaaatcaatgaacctatggctttatggcaaataccacagaaacaaccttagaaatgggctgaggaggctgtctggcctctaacaaatgacctcatctctctgaaccttaacttcctcatcagtaaagtggcagtgcagcccctccctcacaggacgctccctggcagagtgcagccctgccgtgcagcagccggtatgacctcgtccttgtgatcaggagggccctgctgaactgtttccgccccgcaggtgcctacgaagccygggaaatgatgtggccttcctggagccatgcaatggctttgttgtcaccaggaaaagggcctgtggcacccgcctggccactcatgtcctaaatgagacaggccctcttcatcggcctcagtggctcattgagatgaggacttgggaattttgctgtttaacagagcaactgagcacccaggtggctgccccagcagaccctggagacgtttcaggagacctggcagggacccaagcctctgccactgcaccaggccctggccagagggctgggctcagagccctttatttttttatttttattttttattttttagagacacagtattgccctgtctcccaggctggagcacagcagttgaaaccatacctcactgcagcctcgatctcccaggcttaaatgattctcctgcctcagcctccaagtagctgggaccacaggcatatgccaccatgccagccttattgttaagtgttttgggtagatcccatctccctatgttgctcaggctggtcttgaactcctgggctcaagcgttcctcacatctcagcctcttgagtagctgagaccacaagtgtgtgccaccgcacctggccccagagccccttttaaactgcaactcacagtctccaagttagactcacacagagaagatctaaatatgtgtctccttgagggaggctgaggagtggaggaggatgaactcttacaaaacatcaacctttttaaaaatgtgttttcagtaattgctgttctgcgccaagttttatcctagtgggagtttcatgtcagaattactaagtaggagttcataacagagaagttaatcgcccttgtgtaggggcgaggcaccgagcgatgatctctgtgcccaggtaggtgcttcct

SEQ ID NO: 74594 - DNA, 1320 bp, Homo sapiens
tccgcgttcaggggaagccgtgtccctgcggtcatgagacgtgattgttcagaccaatggatgaggctgagcagaatcatttcatttcccccgcacttgccaaaggcagggactttcctgtttgtccctgcctgatatgcaggaagggctcagaactacttaagaacaaatcaatgaacctatggctttatggcaaataccacagaaacaaccttagaaatgggctgaggaggctgtctggcctctaacaaatgacctcatctctctgaaccttaacttcctcatcagtaaagtggcagtgcagcccctccctcacaggacgctccctggcagagtgcagccctgccgtgcagcagccggtatgacctcgtccttgtgatcaggagggccctgctgaactgtttccgccccgcaggtgcctacgaagcctgggaaatgatgtggccttcctggagccatgcaatggctttgttgtcaccaggaaaagggcctgtggcacccgcctggccactcatgtcctaaatgagacaggccctcttcatcggcctcagtggctcattgagatgaggacttgggaattttgctgtttaacagagcaactgagcacccaggtggctgccccagcagaccctggagacgtttcaggagacctggcagggacccaagcctctgccactgcaccaggccctggccagagggctgggctcagagccctttatttttttatttttattttttattttttagagacacagtattgccctgtctcccaggctggagcacagcagttgaaaccatacctcactgcagcctcgatctcccaggcttaaatgattctcctgcctcagcctccaagtagctgggaccacaggcatatgccaccatgccagccttattgttaartgttttgggtagatcccatctccctatgttgctcaggctggtcttgaactcctgggctcaagcgttcctcacatctcagcctcttgagtagctgagaccacaagtgtgtgccaccgcacctggccccagagccccttttaaactgcaactcacagtctccaagttagactcacacagagaagatctaaatatgtgtctccttgagggaggctgaggagtggaggaggatgaactcttacaaaacatcaacctttttaaaaatgtgttttcagtaattgctgttctgcgccaagttttatcctagtgggagtttcatgtcagaattactaagtaggagttcataacagagaagttaatcgcccttgtgtaggggcgaggcaccgagcgatgatctctgtgcccaggtaggtgcttcct

SEQ ID NO: 74595 - DNA, 1176 bp, Homo sapiens
tcagcttaatctctcccactctaggttcccatgcctcccctaatcccactcgaagcagccctgagaaacatcacccattatctctccatagcaccccccaaaattttcaccaccccaacacttcaacactattttgttttatttttctttttaatataagaagacaggaatgtcaggcctctgagcccaagctaagccatcgtatctcctgtgacctgcacgtatacatccagatggcctgaaacaagtgaagaatcaaaagaagtgaaaatggctggctcctgccttaactgatgacattactttgtgaaattccttctcctggctcagaagctcccccactgagcaccttgtgacccccacccctgcctgccagagaataaccccctttgactgtaattttccactacctacccaaatcctataaaacggccccaccccatcttccttcactgactctctttttggactcagcctgcctgcacccaggtgaaataaacagtcttgttgctcacaaaaaacctgtttggtagtctcttcacactgatgcactgatgcatgacaatgccatgctgtcagtaagcatgtctatgagtcctgggccccaggttgccacaggagaatccaatggatccttacaggctgcttaaaagggatagtttgttgtagtcctgaattaataaagtaatgtcctattctccacttaccatgtagtactgcttttgttaaataatccactggggcttgggtagtttaggtggcaggcaggatatgccccactgttatggcttgaattctgagttgtcaaagagtatgtcccctcaggcaatggtgatttttgtgctacaagaagtcgggggstcaataccaataatgcactcacaagtgagaaccatggtcactgacatccaatatggaccaaagccatatcacaggtagataagcactactggtcaatgcattcattctaaaaccttccagtgtcaccagtttttctccctaagaggacctggaagtattatgtggactcctgtatcaaaaaaaaaagtctgaatttctttcttttctcctcttaccttgacagaaatataaggcctttggcctccatttggggaccccgagaacttggtcccatttctgactctgccattcagcccaagacattggatttgcaat

SEQ ID NO: 74596 - DNA, 1176 bp, Homo sapiens
tcagcttaatctctcccactctaggttcccatgcctcccctaatcccactcgaagcagccctgagaaacatcacccattatctctccatagcaccccccaaaattttcaccaccccaacacttcaacactattttgttttatttttctttttaatataagaagacaggaatgtcaggcctctgagcccaagctaagccatcgtatctcctgtgacctgcacgtatacatccagatggcctgaaacaagtgaagaatcaaaagaagtgaaaatggctggctcctgccttaactgatgacattactttgtgaaattccttctcctggctcagaagctcccccactgagcaccttgtgacccccacccctgcctgccagagaataaccccctttgactgtaattttccactacctacccaaatcctataaaacggccccaccccatcttccttcactgactctctttttggactcagcctgcctgcacccaggtgaaataaacagtcttgttgctcacaaaaaacctgtttggtagtctcttcacactgatgcactgatgcatgacaatgccatgctgtcagtaagcatgtctatgagtcctgggccccaggttgccacaggagaatccaatggatccttacaggctgcttaaaagggatagtttgttgtagtcctgaattaataaagtaatgtcctattctccacttaccatgtagtactgcttttgttaaataatccactggggcttgggtagtttaggtggcaggcaggatatgccccactgttatggcttgaattctgagttgtcaaagagtatgtcccctcaggcaatggtgatttttgtgctacaagaagtcgggggctcaataccaataatgcactcacaagtgagaaccatggtyactgacatccaatatggaccaaagccatatcacaggtagataagcactactggtcaatgcattcattctaaaaccttccagtgtcaccagtttttctccctaagaggacctggaagtattatgtggactcctgtatcaaaaaaaaaagtctgaatttctttcttttctcctcttaccttgacagaaatataaggcctttggcctccatttggggaccccgagaacttggtcccatttctgactctgccattcagcccaagacattggatttgcaat

SEQ ID NO: 74597 - DNA, 1458 bp, Homo sapiens
tgtcattttcaaaatatacagttgtgcataacaaaaagaggcgggaaaaacatggatctgtgccatattgtctgaatccgaagttccttgcatactttatactaaataagctttatctgtgagctatattactagtattttctttgcctataattgtttcaggtgtcacatttaagagtttgcttgattatgatatttaaatattacagaatgtatttgcagaatatatttgcagaataacaatattctgmaaataatgcccttgatattaaaattgaaaatcacttttcgtaatagatcaaggaaattagaacctaatgatttaatggtgtacacaattgcagcattagttttctattcaaagcaacataaaataaatgacaaattgaaagaaaaataggactttatttactctattcaaatattaaaataaataataatatgtctattgaaatgtcataatcaggatatcatttattccaattaattgattaaatatgtaatcagttaaatgtcatagattttatttttatttttatagagggaagatgtcattctgtcaccaggctggagtacagtagctggatcataactcactataacctcaaaaaagcctcccaagtatctgggattacaggtgtgagccaccacgataggctaattaaattttttaattttctatagagatgaggctctccctgttacccaggcttgtcttgaactcctgggctcaagggatcctcccacctcagcctcccaaagtgataggattacaggtataagccatcatgcctggccctagaatttttaaattaatggtggttgatacacatatttacattgtattttagccagatttactgaggtataatttacttatgcaaaatttactaatttatttatttatttatttatttattttttgagacagagtctgtctctgttgctcaggctggagtgcagcagcgcaatctcggctcactgcaagctccgcctcctgggttcacgccattctcctgcctcagcctcctgagtagctgggactacaggcgcctgccaccatgcccggctaattttttttgtattttgagtagagatggggtttcaccatgttaaccaggatggtctcaacctcctgaccttgtgatccgcccgcctcggcctcccaaagtgctgggattacaggcgtgagccactgcgcccggccgaatatttccattatagcatatactcgaatgcatcttaaagtatttataaaggtaatactcattgtatttacttatatgactttttaattagattataaaatccagttaccttttagtatgctcaaaattgtgtcaaataatattaattcttgagttaattatgcattataaattattgtctcttaataaaatttcacgtacactttcactctgtaaagctggaatgcatgtggagttgcttcaatttttc

SEQ ID NO: 74598 - DNA, 1458 bp, Homo sapiens
tgtcattttcaaaatatacagttgtgcataacaaaaagaggcgggaaaaacatggatctgtgccatattgtctgaatccgaagttccttgcatactttatactaaataagctttatctgtgagctatattactagtattttctttgcctataattgtttcaggtgtcacatttaagagtttgcttgattatgatatttaaatattacagaatgtatttgcagaatatatttgcagaataacaatattctgcaaataatgcccttgatattaaaattgaaaatcacttttygtaatagatcaaggaaattagaacctaatgatttaatggtgtacacaattgcagcattagttttctattcaaagcaacataaaataaatgacaaattgaaagaaaaataggactttatttactctattcaaatattaaaataaataataatatgtctattgaaatgtcataatcaggatatcatttattccaattaattgattaaatatgtaatcagttaaatgtcatagattttatttttatttttatagagggaagatgtcattctgtcaccaggctggagtacagtagctggatcataactcactataacctcaaaaaagcctcccaagtatctgggattacaggtgtgagccaccacgataggctaattaaattttttaattttctatagagatgaggctctccctgttacccaggcttgtcttgaactcctgggctcaagggatcctcccacctcagcctcccaaagtgataggattacaggtataagccatcatgcctggccctagaatttttaaattaatggtggttgatacacatatttacattgtattttagccagatttactgaggtataatttacttatgcaaaatttactaatttatttatttatttatttatttattttttgagacagagtctgtctctgttgctcaggctggagtgcagcagcgcaatctcggctcactgcaagctccgcctcctgggttcacgccattctcctgcctcagcctcctgagtagctgggactacaggcgcctgccaccatgcccggctaattttttttgtattttgagtagagatggggtttcaccatgttaaccaggatggtctcaacctcctgaccttgtgatccgcccgcctcggcctcccaaagtgctgggattacaggcgtgagccactgcgcccggccgaatatttccattatagcatatactcgaatgcatcttaaagtatttataaaggtaatactcattgtatttacttatatgactttttaattagattataaaatccagttaccttttagtatgctcaaaattgtgtcaaataatattaattcttgagttaattatgcattataaattattgtctcttaataaaatttcacgtacactttcactctgtaaagctggaatgcatgtggagttgcttcaatttttc

SEQ ID NO: 74599 - DNA, 1458 bp, Homo sapiens
tgtcattttcaaaatatacagttgtgcataacaaaaagaggcgggaaaaacatggatctgtgccatattgtctgaatccgaagttccttgcatactttatactaaataagctttatctgtgagctatattactagtattttctttgcctataattgtttcaggtgtcacatttaagagtttgcttgattatgatatttaaatattacagaatgtatttgcagaatatatttgcagaataacaatattctgcaaataatgcccttgatattaaaattgaaaatcacttttcgtaatagatcaaggaaattagaacctaatgatttaatggtgtacacaattgcagcattagttttctattcaaagcaacataaaataaatgacaaattgaaagaaaaataggrctttatttactctattcaaatattaaaataaataataatatgtctattgaaatgtcataatcaggatatcatttattccaattaattgattaaatatgtaatcagttaaatgtcatagattttatttttatttttatagagggaagatgtcattctgtcaccaggctggagtacagtagctggatcataactcactataacctcaaaaaagcctcccaagtatctgggattacaggtgtgagccaccacgataggctaattaaattttttaattttctatagagatgaggctctccctgttacccaggcttgtcttgaactcctgggctcaagggatcctcccacctcagcctcccaaagtgataggattacaggtataagccatcatgcctggccctagaatttttaaattaatggtggttgatacacatatttacattgtattttagccagatttactgaggtataatttacttatgcaaaatttactaatttatttatttatttatttatttattttttgagacagagtctgtctctgttgctcaggctggagtgcagcagcgcaatctcggctcactgcaagctccgcctcctgggttcacgccattctcctgcctcagcctcctgagtagctgggactacaggcgcctgccaccatgcccggctaattttttttgtattttgagtagagatggggtttcaccatgttaaccaggatggtctcaacctcctgaccttgtgatccgcccgcctcggcctcccaaagtgctgggattacaggcgtgagccactgcgcccggccgaatatttccattatagcatatactcgaatgcatcttaaagtatttataaaggtaatactcattgtatttacttatatgactttttaattagattataaaatccagttaccttttagtatgctcaaaattgtgtcaaataatattaattcttgagttaattatgcattataaattattgtctcttaataaaatttcacgtacactttcactctgtaaagctggaatgcatgtggagttgcttcaatttttc

SEQ ID NO: 74600 - DNA, 1458 bp, Homo sapiens
tgtcattttcaaaatatacagttgtgcataacaaaaagaggcgggaaaaacatggatctgtgccatattgtctgaatccgaagttccttgcatactttatactaaataagctttatctgtgagctatattactagtattttctttgcctataattgtttcaggtgtcacatttaagagtttgcttgattatgatatttaaatattacagaatgtatttgcagaatatatttgcagaataacaatattctgcaaataatgcccttgatattaaaattgaaaatcacttttcgtaatagatcaaggaaattagaacctaatgatttaatggtgtacacaattgcagcattagttttctattcaaagcaacataaaataaatgacaaattgaaagaaaaataggactttatttactctattcaaayattaaaataaataataatatgtctattgaaatgtcataatcaggatatcatttattccaattaattgattaaatatgtaatcagttaaatgtcatagattttatttttatttttatagagggaagatgtcattctgtcaccaggctggagtacagtagctggatcataactcactataacctcaaaaaagcctcccaagtatctgggattacaggtgtgagccaccacgataggctaattaaattttttaattttctatagagatgaggctctccctgttacccaggcttgtcttgaactcctgggctcaagggatcctcccacctcagcctcccaaagtgataggattacaggtataagccatcatgcctggccctagaatttttaaattaatggtggttgatacacatatttacattgtattttagccagatttactgaggtataatttacttatgcaaaatttactaatttatttatttatttatttatttattttttgagacagagtctgtctctgttgctcaggctggagtgcagcagcgcaatctcggctcactgcaagctccgcctcctgggttcacgccattctcctgcctcagcctcctgagtagctgggactacaggcgcctgccaccatgcccggctaattttttttgtattttgagtagagatggggtttcaccatgttaaccaggatggtctcaacctcctgaccttgtgatccgcccgcctcggcctcccaaagtgctgggattacaggcgtgagccactgcgcccggccgaatatttccattatagcatatactcgaatgcatcttaaagtatttataaaggtaatactcattgtatttacttatatgactttttaattagattataaaatccagttaccttttagtatgctcaaaattgtgtcaaataatattaattcttgagttaattatgcattataaattattgtctcttaataaaatttcacgtacactttcactctgtaaagctggaatgcatgtggagttgcttcaatttttc

SEQ ID NO: 74601 - DNA, 1458 bp, Homo sapiens
tgtcattttcaaaatatacagttgtgcataacaaaaagaggcgggaaaaacatggatctgtgccatattgtctgaatccgaagttccttgcatactttatactaaataagctttatctgtgagctatattactagtattttctttgcctataattgtttcaggtgtcacatttaagagtttgcttgattatgatatttaaatattacagaatgtatttgcagaatatatttgcagaataacaatattctgcaaataatgcccttgatattaaaattgaaaatcacttttcgtaatagatcaaggaaattagaacctaatgatttaatggtgtacacaattgcagcattagttttctattcaaagcaacataaaataaatgacaaattgaaagaaaaataggactttatttactctattcaaatattaaaataaataataatatgtctattgaaatgtcataatcaggatatcatttattccaattaattgattaaatatgtaatcagttaaatgtcatagattttatttttatttttatagagggaagatgtcattctgtcaccaggctggagtacagtagctggatcataactcactataacctcaaaaaagcctcccaastatctgggattacaggtgtgagccaccacgataggctaattaaattttttaattttctatagagatgaggctctccctgttacccaggcttgtcttgaactcctgggctcaagggatcctcccacctcagcctcccaaagtgataggattacaggtataagccatcatgcctggccctagaatttttaaattaatggtggttgatacacatatttacattgtattttagccagatttactgaggtataatttacttatgcaaaatttactaatttatttatttatttatttatttattttttgagacagagtctgtctctgttgctcaggctggagtgcagcagcgcaatctcggctcactgcaagctccgcctcctgggttcacgccattctcctgcctcagcctcctgagtagctgggactacaggcgcctgccaccatgcccggctaattttttttgtattttgagtagagatggggtttcaccatgttaaccaggatggtctcaacctcctgaccttgtgatccgcccgcctcggcctcccaaagtgctgggattacaggcgtgagccactgcgcccggccgaatatttccattatagcatatactcgaatgcatcttaaagtatttataaaggtaatactcattgtatttacttatatgactttttaattagattataaaatccagttaccttttagtatgctcaaaattgtgtcaaataatattaattcttgagttaattatgcattataaattattgtctcttaataaaatttcacgtacactttcactctgtaaagctggaatgcatgtggagttgcttcaatttttc

SEQ ID NO: 74602 - DNA, 1026 bp, Homo sapiens
gctactttgttaataaataaaattttaaaaataatcaatggaatgttcatttcaaactactttgttatttcatttcatttaaatttagcataaactttacttcggcagccaattccttagttgttcttctccattaactcatgactactttagctcttgatgctaagcatgatgatgtttggtttcagaagttgccacattaacaataggatccttcaagctacaatcatgctaaccaattttgacaattttatattttatagggcctagttctaacattctattgttatttaattttataaatatttttaaaaatcttgttactaaattaaaaatagacctctggaaaataaatcgaaaggtttttttgttttttgttttttgagacagagtctcactcactctatcactcaggctagagtgcagcagcctgatcttggctcactgcaacctctgcttcctgggttcaagcgattctgctgcctcagtctcccaagtacctgagaatacaggtgcccacaaccatgcccrgataatttttgtacttttagtagagatggggttttgccatgttggccaggctggtctcaactcctgacctacatgatccactcgtctgggcctcccaaagttctgggattacaggcatgagccactattccctgccaaattaaaagtttttatatgaaaaagatatacacaaagcaaagatacttttacagtatgaaagtgaattataattgagaaaaatatctgcaggccataatagaatagttctatttcaatagttcgcaaacaatttgttagttctgctaaataaaaaaatttccaacacttgttaaaatggttaaggatcactttatttaagattaaaatgataggtgtcaagatgattctaacaggcaagagagataaggttcaactctgaacacagcaaagatatctgggaagtgcagctaatgagcagagtgaaaggttgtcaatgaatacaaattactaagaggagacatcaagggtaggggattt

SEQ ID NO: 74603 - DNA, 1026 bp, Homo sapiens
gctactttgttaataaataaaattttaaaaataatcaatggaatgttcatttcaaactactttgttatttcatttcatttaaatttagcataaactttacttcggcagccaattccttagttgttcttctccattaactcatgactactttagctcttgatgctaagcatgatgatgtttggtttcagaagttgccacattaacaataggatccttcaagctacaatcatgctaaccaattttgacaattttatattttatagggcctagttctaacattctattgttatttaattttataaatatttttaaaaatcttgttactaaattaaaaatagacctctggaaaataaatcgaaaggtttttttgttttttgttttttgagacagagtctcactcactctatcactcaggctagagtgcagcagcctgatcttggctcactgcaacctctgcttcctgggttcaagcgattctgctgcctcagtctcccaagtacctgagaatacaggtgcccacaaccatgcccagataatttttgtacttttagtagagatggggttttgccatgttggccaggctggtctcaaytcctgacctacatgatccactcgtctgggcctcccaaagttctgggattacaggcatgagccactattccctgccaaattaaaagtttttatatgaaaaagatatacacaaagcaaagatacttttacagtatgaaagtgaattataattgagaaaaatatctgcaggccataatagaatagttctatttcaatagttcgcaaacaatttgttagttctgctaaataaaaaaatttccaacacttgttaaaatggttaaggatcactttatttaagattaaaatgataggtgtcaagatgattctaacaggcaagagagataaggttcaactctgaacacagcaaagatatctgggaagtgcagctaatgagcagagtgaaaggttgtcaatgaatacaaattactaagaggagacatcaagggtaggggattt

SEQ ID NO: 74604 - DNA, 1026 bp, Homo sapiens
gctactttgttaataaataaaattttaaaaataatcaatggaatgttcatttcaaactactttgttatttcatttcatttaaatttagcataaactttacttcggcagccaattccttagttgttcttctccattaactcatgactactttagctcttgatgctaagcatgatgatgtttggtttcagaagttgccacattaacaataggatccttcaagctacaatcatgctaaccaattttgacaattttatattttatagggcctagttctaacattctattgttatttaattttataaatatttttaaaaatcttgttactaaattaaaaatagacctctggaaaataaatcgaaaggtttttttgttttttgttttttgagacagagtctcactcactctatcactcaggctagagtgcagcagcctgatcttggctcactgcaacctctgcttcctgggttcaagcgattctgctgcctcagtctcccaagtacctgagaatacaggtgcccacaaccatgcccagataatttttgtacttttagtagagatggggttttgccatgttggccaggctggtctcaactcctgacctacatgatccactcgtctgggcctcccaaagttctgggattacaggcatgagccactattccctgccaaattaaaagtttttatatgaaaaagatatacacaaagcaaagatactttyacagtatgaaagtgaattataattgagaaaaatatctgcaggccataatagaatagttctatttcaatagttcgcaaacaatttgttagttctgctaaataaaaaaatttccaacacttgttaaaatggttaaggatcactttatttaagattaaaatgataggtgtcaagatgattctaacaggcaagagagataaggttcaactctgaacacagcaaagatatctgggaagtgcagctaatgagcagagtgaaaggttgtcaatgaatacaaattactaagaggagacatcaagggtaggggattt

SEQ ID NO: 74605 - DNA, 1026 bp, Homo sapiens
gctactttgttaataaataaaattttaaaaataatcaatggaatgttcatttcaaactactttgttatttcatttcatttaaatttagcataaactttacttcggcagccaattccttagttgttcttctccattaactcatgactactttagctcttgatgctaagcatgatgatgtttggtttcagaagttgccacattaacaataggatccttcaagctacaatcatgctaaccaattttgacaattttatattttatagggcctagttctaacattctattgttatttaattttataaatatttttaaaaatcttgttactaaattaaaaatagacctctggaaaataaatcgaaaggtttttttgttttttgttttttgagacagagtctcactcactctatcactcaggctagagtgcagcagcctgatcttggctcactgcaacctctgcttcctgggttcaagcgattctgctgcctcagtctcccaagtacctgagaatacaggtgcccacaaccatgcccagataatttttgtacttttagtagagatggggttttgccatgttggccaggctggtctcaactcctgacctacatgatccactcgtctgggcctcccaaagttctgggattacaggcatgagccactattccctgccaaattaaaagtttttatatgaaaaagatatacacaaagcaaagatacttttacagtatgaaagtgaattataattgagaaaaatatctgcaggccataatagaatagttctatttcaatagttcrcaaacaatttgttagttctgctaaataaaaaaatttccaacacttgttaaaatggttaaggatcactttatttaagattaaaatgataggtgtcaagatgattctaacaggcaagagagataaggttcaactctgaacacagcaaagatatctgggaagtgcagctaatgagcagagtgaaaggttgtcaatgaatacaaattactaagaggagacatcaagggtaggggattt

SEQ ID NO: 74606 - DNA, 580 bp, Homo sapiens
cccaggcacagacaagggtgaaataggagccaaggtgtactatgagccaaggattatgattaatccaattttgtgcacttaagccatttgaaaaacagaaaagcaaaacaacaaaataatttttaagaaattgaatatagggtgctatgctctgaatgtgtccccctaaaattaatcacmaatgtcataggattaggaagtagggcttttaggtagtgattcagtcatgaagggagagtcttcacaaatgggtgtaggatccttacacaaggactggagggagtgggcttcccctgttttacccttccgccttctgccatgtgaggacacagtgcctctcctcctgaagacacagtgcacaaggtaccatcttggatgcagagaccaggccctcaccagacaccaatcctgctggcaccttgatcttggacttctagcctatggaactgtgagaaatacatttctgttcttcagaaattacccagcctagtgtattttcttatatagaagcacaaactcattaaggcacaatgcctcttgtcattttcttctacaattttctttgtggcctctttagcac

SEQ ID NO: 74607 - DNA, 580 bp, Homo sapiens
cccaggcacagacaagggtgaaataggagccaaggtgtactatgagccaaggattatgattaatccaattttgtgcacttaagccatttgaaaaacagaaaagcaaaacaacaaaataatttttaagaaattgaatatagggtgctatgctctgaatgtgtccccctaaaattaatcacaaatgtcataggattaggaagtagggcttttaggtagtgattcagtcatgaagggagagtcttcacaaatgggtgtaggatccttacacaaggactggagggagtgggcttcccctgttttrcccttccgccttctgccatgtgaggacacagtgcctctcctcctgaagacacagtgcacaaggtaccatcttggatgcagagaccaggccctcaccagacaccaatcctgctggcaccttgatcttggacttctagcctatggaactgtgagaaatacatttctgttcttcagaaattacccagcctagtgtattttcttatatagaagcacaaactcattaaggcacaatgcctcttgtcattttcttctacaattttctttgtggcctctttagcac

SEQ ID NO: 74608 - DNA, 580 bp, Homo sapiens
cccaggcacagacaagggtgaaataggagccaaggtgtactatgagccaaggattatgattaatccaattttgtgcacttaagccatttgaaaaacagaaaagcaaaacaacaaaataatttttaagaaattgaatatagggtgctatgctctgaatgtgtccccctaaaattaatcacaaatgtcataggattaggaagtagggcttttaggtagtgattcagtcatgaagggagagtcttcacaaatgggtgtaggatccttacacaaggactggagggagtgggcttcccctgttttacccttcygccttctgccatgtgaggacacagtgcctctcctcctgaagacacagtgcacaaggtaccatcttggatgcagagaccaggccctcaccagacaccaatcctgctggcaccttgatcttggacttctagcctatggaactgtgagaaatacatttctgttcttcagaaattacccagcctagtgtattttcttatatagaagcacaaactcattaaggcacaatgcctcttgtcattttcttctacaattttctttgtggcctctttagcac

SEQ ID NO: 74609 - DNA, 580 bp, Homo sapiens
cccaggcacagacaagggtgaaataggagccaaggtgtactatgagccaaggattatgattaatccaattttgtgcacttaagccatttgaaaaacagaaaagcaaaacaacaaaataatttttaagaaattgaatatagggtgctatgctctgaatgtgtccccctaaaattaatcacaaatgtcataggattaggaagtagggcttttaggtagtgattcagtcatgaagggagagtcttcacaaatgggtgtaggatccttacacaaggactggagggagtgggcttcccctgttttacccttccgccttctgccatgtgaggacacagtgcctctcctcctgaagacacagtgcacaaggtaccatcttggatgcagagaccaggccctcaccagacaccaatcctgctggcaccttgatcttggacttctagcytatggaactgtgagaaatacatttctgttcttcagaaattacccagcctagtgtattttcttatatagaagcacaaactcattaaggcacaatgcctcttgtcattttcttctacaattttctttgtggcctctttagcac

SEQ ID NO: 74610 - DNA, 671 bp, Homo sapiens
atcccaatggacctggacatcacaggacagaattttaatttgggtacataagctatgactttttaagattttattttcatatcataaagcaaatgaacataaagactgtagtagagtacaaattcaayggttcatagaggaaaagcttgagggaaacgatgaaacctgaaggagagaagacctgggaccaggtacaagatgaatgctatagaaagaaagaattcaatatacgggaaaattttctaaaggttataaaatcacttaaaacataatgggctaccttattaagtggtgaactccctaacactaaaaacttattaagagaaggcagcccttgtcagtgatgctgtgaggtcattcttacaatggggcaggagggtggaccagatgcccttcaaaggctggaagagtcaggggctccattttatgctccatcctggctctcaggaaaagaaatgctgcacgtgcttggataagcacagctctgtcaaaccaggaggtgttaaaccattattccagagagcatgttaattctgaatagcacagggaccctggagattagtgaataataaataaagcatttcttcttttgttggtagcgtctgtccctgttcattaactctctatttctggccagccgaggggtattctgggaggcacgatgcctttgg

SEQ ID NO: 74611 - DNA, 671 bp, Homo sapiens
atcccaatggacctggacatcacaggacagaattttaatttgggtacataagctatgactttttaagattttattttcatatcataaagcaaatgaacataaagactgtagtagagtacaaattcaacggttcatagaggaaaagcttgagggaaacgatgaaacctgaaggagagaagacctgggaccaggtacaagatgaatgctatagaaagaaagaattcaatataygggaaaattttctaaaggttataaaatcacttaaaacataatgggctaccttattaagtggtgaactccctaacactaaaaacttattaagagaaggcagcccttgtcagtgatgctgtgaggtcattcttacaatggggcaggagggtggaccagatgcccttcaaaggctggaagagtcaggggctccattttatgctccatcctggctctcaggaaaagaaatgctgcacgtgcttggataagcacagctctgtcaaaccaggaggtgttaaaccattattccagagagcatgttaattctgaatagcacagggaccctggagattagtgaataataaataaagcatttcttcttttgttggtagcgtctgtccctgttcattaactctctatttctggccagccgaggggtattctgggaggcacgatgcctttgg

SEQ ID NO: 74612 - DNA, 671 bp, Homo sapiens
atcccaatggacctggacatcacaggacagaattttaatttgggtacataagctatgactttttaagattttattttcatatcataaagcaaatgaacataaagactgtagtagagtacaaattcaacggttcatagaggaaaagcttgagggaaacgatgaaacctgaaggagagaagacctgggaccaggtacaagatgaatgctatagaaagaaagaattcaatatacgggaaaattttctaaaggttataaaatcacttaaaacataatgggctaccttattaagtggtgaactccctaacactaaaaacttattaagagaaggcagcccttgtcagtgatgctgtgaggtcattcttacaatggggcaggagggtggaccagatgcccttcaaaggctggaagagtcaggggctccattttatgctccatcctggctctcaggaaaaraaatgctgcacgtgcttggataagcacagctctgtcaaaccaggaggtgttaaaccattattccagagagcatgttaattctgaatagcacagggaccctggagattagtgaataataaataaagcatttcttcttttgttggtagcgtctgtccctgttcattaactctctatttctggccagccgaggggtattctgggaggcacgatgcctttgg

SEQ ID NO: 74613 - DNA, 575 bp, Homo sapiens
tccaaactattcatggtgttgtgtgatattaacccacacaacattgtcgggaatatctttctataataaatctcaacacgaccctttataacagctgtatagtattttattttatgaatgtaagaatttaagcaaatcctgattgatggacattaggatgttccaccttttccagttgcagacagtccctcttggtgcacttgtgctaagtacagcatagcactagggcaagttcctagacaaggaactgctggtcacaggccgaagaatgagtcagtagttgaaaatactggttctgggccaggcatggtggctcacccctgtaatcccagcaytttgagaggccgaggtaggcggatcacctgaggtcaggagttcgagagccaggcctggctaacatggtgaaacactgtctctactaaaaatacaaaatattagccaggcgtggtggcgggtgcctctaatcctagctctcctcctaagggaggagaatcacttgaacccgggaggcggaggttgcagtgagctgagatagtgccattgcactccagcctgggcgacaacagtgagactcc

SEQ ID NO: 74614 - DNA, 1102 bp, Homo sapiens
tacataaaaatcagctaaataatgtgtaatagaacttgtaacaagactcaaaatggtgatagtggtgggtgagttatttttattccaagccttaggcccattttgacaaagatgcacacagaccggcacatagtagactctcggtgcatatttgttggataaataaatgggtgagaatatgtttggccactcatttgttgaacgagtgaatgctgttcaagagataactcatggacctttagagaagaatctcaaactcaatgcctgatggtacctggttggcaatgttagcgaatgaagcaggctgggctggggagacgtgaaggagcagtggagtctgaggcaaactagaactgctcatctcaaaggggcagctcctgcgcagcttgactcaagtgaggtttgaaggcccaggctgctagatcctccaatttttaaagagaagttggaaatctagatttttatgtcataacggtttaaaaagacattgttggctaacacaaggtggtgggtgagcaaacaaaacatgtttgtaggttgccagttttcaacctctgttccaaatccttccagtcttagttcatgggctctgttagaaaggggagggctttgtctggtctgatacctggcccctccccagtcttcctccagccgtgaatttgatcagcactcctcatgtacctttcctgttgcatctcacctccaggtctttgtctgggttggaaaggattctcaagaagaagaaaagacagaagccttgacttctggtgaggacccgagtgcctgggggcggggggaggggtccgttgcttgtggggtgctgggagtggctcctgtacaggtctgggaatgagcatctttccaggggactgatggacaagatagggtggggacttcctcctctgtgggccagcccctcataaatcctgcctgggatagtgaagaacacatcagttccttcagaaaccctgaggcttctcgaagaaggctctcctctgttccaggagaaggaagggacagatgagaagtcacttcaasttcccagaatactcaggagctgaacttgtcaaggtttagatgtggcaaagcaggccaggcatgg

SEQ ID NO: 74615 - DNA, 1832 bp, Homo sapiens
ctcatgcttgcttacgtccatctctatgcacaccccatagctgaccacgcatctgctttctggctctttgttgttttattgttgtattttttgtcacccaggatggagtgcagtggcgtgatctctgctcactgcagcctcaacttcctgggctcaagcgatcctcccacctcagcctcccgagtaggtgggaccacaggcacacaccatcatgcctggctaatttttgtattttttgtagagatggggacttgtggtgatgcccaggctgatcttgaactcctgaactcaatggattcctcccgcctcagccttccaaagtgctgggattataggcatgagccacctcacctggcctgctttctgtctctccgaagatccagagctgtgttcattccagctggccctgtgacctcatgcaaattattgcccttccattactcctctgtatgagagggaataatcctaccctccttgtagggggttgtttgaatttcactaatgtgcacagtgtctgacgcacccgaggagctgggcacgtgggaggctggtacgcagggcacaggacataacacagatgcccaggtacggttggcacaggcctagcaaacattttaaagcactcactctgtgccagcttcttagattaagcatcttacatgcattacctactttaatcctcggtgaatgtgagtatcagtttcattttataactgaagaaacgggcactgagacgggaagtcacttttacaggctcacatagatgatagttgatagggctgggagtccatctgagagcctgtcctccctaaacatcatcctgtccccttcctgatgtgaatcaccaagcaagggacaacacaattcatagatccaggacaaggtttatggcacatacttctaaggggtgggacctggtatcatggacacggcattcaagagatagtacatggtatagagtctgtcacaaaacagacatcacatggtgcatgaagcatgacccaggggtaagaggcatgggatgccgctaaagggagacacacaggacaaagcaagaggaacgcagggcctgctacgtggcacagtcacagggtatgtgacactgggcatgacaaactctatgatgcagagacatggtacttaggatttgagacttgagctatggcaactgggcaggctcttggccacagtgggaccctttgtcatcagggatcctccattatgttggtgcctggggccccagcaagcaacrgcaggaaccaagttcctcctcctcacaaaggcagtctgttttttttttcttttttttctttttttctccctcctcctccctgtctctttggatgccaaagagtgggaggggcccagcggagtggtggccagagtaaccccccgccatcccatcagctcagacaagggtcaaagcttggggccaagcccacggctcaggaagggtttgccaggcccccagatcccctctctctgagatagctgtgagcaccagtgttggctggggtgaaagccgggtaattttcctctaagctgtcctccctccgctcccctccctgcctgctggtgctggctgtgagcacgtctgcattccagagcttaggagagagagaacctgctgctgttaaggttgaggaagtagattgctaacagctgctgtaggaggggttggatgtgcggaagaggaggccgtggattgcaggctaacatttcttgagcctcttggcacctggcactcactacctcatcttgtctcatttgcataaagccccagtagcccggtgaggagacaggcccagagaggcaaagaacttgcctaaggt

SEQ ID NO: 74616 - DNA, 2266 bp, Homo sapiens
taagtggggaaatggaattgtagtcaaaagaggcttaatcttagcaaaatactataaaatgtatcagtctaatgatgatgacacttaatagcatatattaaatttatttcagttacaacattgctttagaaattaaaatgaactatagatttttaataaatgatatattaattatatctcaatttaaaaataaaataaaataaattggacaattacaaaaagccagtgagattggcctgtttagctctttgacaagcaagagagaaaactataattgcagaacatttttgttgtgaaggaaggggaataaaattcttttactcatagttgaaaagaaacacatgtaagtgagatattaattacaggacacagtggactttattgttactgttttaaattgtggttataaaaatgggtaggtaaacacgagatcttttgaatgaggtctataaaacactgcatgggcaacaaatgcgataccttaaataaggtataaatgatgttgaaaagtgtctattttcaggaaggcagaggaaaatgtcaaactttagacaacttgtgtgtgtatttttttaaaatcaaccacttatttttatattattgatactattgacatgaaatgataaaaaatcttgcatacgtggttggacacctggagtaaccttagcatccagtgtccaacagtacattattgtaacatcttcctcactttgcaggcctgccaaatttcagaattcctgggtcaatttggaagaaaaccaaatcgattcgtaaggaataaccagcgatttcatgagtgattcatgtggacatgaatgtatattgtgaagagtaagaggaatattggatatatttttaaaagctgagcagtggtgccagttagccttagtcataaaagtcttattttaaaaatggtgacgtcaatagcaaggtcatggaatcaacacaagtgcccatcaacagtggattagataaagcatggaatactatgcagccataaacaagaatgaaatcatgtcctttgcagcaacttggatgcagctggaggccattatcctaagtaaattaatgcagaaacagaaagttaatatcatatgttctcacttataagcgggagcaaaacaatgggtacacatgcacataaaaatcggaacagtagacatcagataccctaaaaggagggaggaggagggggaagggtggaaacaccacctattgagtactgtrttcactatttgggtgatgggttcaccagaagctcaaacttcagcattacatgatatatctgtgtaacaaatctgcacatgcatcccctgaatataaaatttaaaaaaaaaattcaaaaaaatttaaatggtgaagtgtattcatttattttggaaacatcacttttcttccacacatgagatggaatggaactggaacacattatcgaaatccacaaaagctgtgaaaattttatattaaataatcctgtaacttgaaaagattttaaaaagtcctcattaaagataggctcatgaaaattagcgtatttttgtgtctgccaaaacttctttgcagaggaaatggggatgaaattccagatgatgtctttgtctaactgtacgggcaagggctgcattggctgaattgatgacttcgctgaagctattgaatttctagtgttgcctcagatcacgtcatcatttttgctgtgagctctgatagttgcaattgtgttcaactcctggtgagtgcagcacatgcctcaagtcatgagagatggaaaaggactactgttttctgcaggtaggtggccaccactaaagctttgaaatggtgtccacattcttggaagctagtgaactgaagcaaagaggaaaagaaccctccaactattttgggggctgatctgtgtcattcataaaagaatggctttcaaaactgcttagtaatctaggggaaaacctcagtccttaccaacaagatggttcactgggttcaaaagaacgtgccacacacccggaggcgtgccttgctttgcaaccctttgcatgctggctgcagggtccgtcctttgctggcgatcagtgggaagtatggttgccagactatgagctgaaagacatagtagccctatttttggatcgccagggaaaaaatcaaattgtttgtacttaagaaaagtcctcaggtggagcattgtgtatttggtagaaagactggaaactccaaatacacagaaatagaaatttcaagggataaaaacaaacattatagttca

SEQ ID NO: 74617 - DNA, 836 bp, Homo sapiens
agttaaaggcgcccagccacgttgctgctaaccccgaccacgctttgcactgccgttcattcaaaaacggttatctcctcgatttgggttttcaaaaatgctttggtacagtaaacaacgacaaaaataagcccgatttcctttttcagcgctgcatttgacatgttggtgcattttttcatctgtgacaatgcaacgttcaaaatcatatttatgctgttgtttcatattcacaggtgccaagatgcagagacagggatattaaatctttatagggatatgcttctaacaggctgatatcgcaaaaayaagccagtggattctagctggttaggattcaggaagttctaacacaatctgtgctattccaaggcttgaattatttgaggggggtagcaactatcttgaagaaccaggcagagcaggatggcgttaagccacaggcattataaaatctagaattagagctctcctcattcagatctcaagaccgccctctataacctgtggccactgtactacctcttgggatacccagggtaaataaataaataatcactaagtagcctatggaatttatatttacataatcaaaatgtattactgtcaaccaattcactaatgttctgtggtttttatttttaattgggaaaggcacttctagttcaatgtcttctttcctgtaagagaactgctaagaacagaaagattacagctttagaagttatagaaggcacttttagttcaatgtcttctttcctgtaagagaactgctaagaacagaaagattacagctttagaagttatagaaagctagctgtataaagcagggatcc

SEQ ID NO: 74618 - DNA, 555 bp, Homo sapiens
ctgccccaaccagagagaactaacagagacccccagaagggcagcaggtcagaagtcaagtgcaggggccctgcacccactccctcgctgtgggaccttggggtgtgactgaagccacggactcactgaagccacttttctcacctaaaaactggggacctgggtcgtacctccaggatggctgagggaagtgcctcgacacggcagcagttactgctgttcggagatgcagctgacgaaacacaccctgggaagagcaggccagcttaggaatgaaaccagggtgggctcctatagatggtggaaggaacaaaagcatttaatcacccgctccagaagcccagtgcagggagcagcaggggacttttaatggcattaatccagaaagacaaagagagccaggagaggctgcagcagccagggttgtgcaaggggaactcccagcagayccaagaaagctgactcctcagccaggagcccatgcagcccagaagcagcctggctacctgggggaggcttgggaggtgcaggcgagggtggctccactgcctctgg

SEQ ID NO: 74619 - DNA, 543 bp, Homo sapiens
gatcagtttgcttttggacaagcaagtttgagaggcctaatgtacatctggatgtgtragtctagagtccaggggaagatccaagctggagatacatgcagtcacacactggacctttctggagtgtctgagccaaccagcccctccctcctccatataaggttcatctccctgctgataatgcccatcacaccctgctggtgttgattacacctctttggcttagtcagacatctcattgtggttccctgactcctcctgcatcctcacctgctttgtccctccacacgccccatgctcaatcatacttcttcccatgatgtcagccaccacctctgcagatgattctcaaacctaagtgttaagtgaggaccgcttacctgaactaggagatcaaatgtctaactgatgccaaggcaacccccagagatgtcctatgagcactcaagtccaatcctctgtagagaagctcatcctctcttccttagcatactactaaatattgccccagccaggctgagtacaactccttaaatcctagct

SEQ ID NO: 74620 - DNA, 544 bp, Homo sapiens
taaaaacagaaatgccaggcaggtgctgctttttacttcttaccaaattgacaagtttttaaaagtgtaagcacaatttttgagggcaacttcaaaatgactattaagtatttttaaatgtgaattctctttcacccacccctaggattttatcctaaaaataaataagcaaaagtgcataatttaactatgagaatagtcattacaacataatttgtaatttataatagtgaaaaactttttttaaaagcctgaaatagttaaatgtgcaatgagatagtatgtaaatactaaaattactgtgtaagtgaatatttaataatgrggaaaaaagctcaagcaaagaatgtttaacactatgttacgaagccctgtgcatacaatggtctatttttataaaaatttttgatatggtttggctctctgtccccacccaaatctcatcttgtagctcccataattcccacatgttgtgggagggacccagtggggcgatgactgaatcatgggggtgggtctttcctatgcgattctcgtgatagtg

SEQ ID NO: 74621 - DNA, 1091 bp, Homo sapiens
cccctcatgaatgtgattcatgcctttatgaaagagactgaagggaatgtctttgcctctttaggtctttccagagacacatagaaggtgccatctatgaggaacaggccttcaccagacatcaartctgttggcatcttgatctttgacttctccaccgccagaactgtgagcaataaatttctgttctttacaaattaattagtctaaggtcttctgttataggtggctatctaatggggcagattgttgggaacaagtttctatactctttatttttcttatactacatgactaaattctccactttaatgttttattgcagtggtaacaatgtataggcttatcatgtttttgcacttagaacacttctaatgcttcaccactaagtatggtgtttgcttgaggtttctggtaagtaacttttttcaaaatattgaaattgccttctattcttaggtatccaggatttttaaaatgttataactgaacgttgattatcatttggttattattgcgtattctcttgctatggtgagtggtatcttttcctaagatttttattgttctcgcatttctgggataaattgtacttatcataatgtattagtattttcatacacttggatttgattagccaatattttatttatcttttgttcacaattatgatggcttctaatttcctttcttgtgctgtttctgttttatagtatcagttttgtatttgaccataaaagaatttagtcagtaatagttttttagtgcttgagatagaaaggcatttcagagacctggacatgtttgtttgaccaagcagagctttcagaaagtctagctgtttggaaatttatgaattacttcatgtgtattacaggagggtcgttttctgttttcagagatcaagacatgaaacccatgttcaagatactttccagtgtgtcttcatgtgatcctctgagtccagccatcaggctaccagcagctcttggaaaccctgacatacttattcttagaagactgctttccggactcaaagtggaacctcaaattttcaattttcttagtttttaaagcctacacataggtga

SEQ ID NO: 74622 - DNA, 656 bp, Homo sapiens
aagaatgagttcatgtcctttgcagggacatggaagaagctggaaaccatcattctcagcaaactaacacaggaatagaaaaccaagtgctgcatgttctcattcataagtaggagttgaacaatgagaacacagggaggggaacatcatacactggggcctgtcaggggctggtgggcaaagggagggagagcattaggacaaatacctaatgcatgcagggcttaaaacctacatgaagagttgataggtgcagcaaaccaccatggcacatgtatacctatgtaacaaacctgcatgttctgcacatgtatcccagaacttaaagtacacacacacacacacacaaagcttccaaatgcaacaatcatttctcttgcaattttgttataattcttggtatagtatactacgtataacccaaaaaacctttagaatagtataytataaagttttacccaaaatgttcagcaaataaattaggtttatttgcccccagcatttttatgagaacaagtgttttattttccagtgtcaaggcactgcagtaacatctgtttggtataaataaaacctgccaggtagtaaggagtatctcatgatgcctcattcacccattagtagggaatattaagcaaatttggaattaatcatgt

SEQ ID NO: 74623 - DNA, 2038 bp, Homo sapiens
agcctactatgattcccagaactttctcataatccaccaaacaatgggttaatgcctactcccagaacaacagccattacaattactcacagtgttaaacattttaaatatcacccctctttgatagattctatacagcaggatctaaatcaagttcatccaaccaatggcctgtgggccgcatgtggcccaggatagctatgaatggaacccaacacaaattcgtaaactttcttaaaacctgatgagactttttttgtgattttttaagaaatctcttcagctattgttagtgttagtgtattttatgtgtggcccragacaattcttcttcttccaatgtggcccacagaagctaaaagatcggacaccccgactctagattattagaaataaacattcacatgaacaaagatcccttcatattctagcttaagcttcaaaaccaaaagttatttgcaattttagaggtttatcaaaatctctcctttaaataactatctagagttaaataatttgtgtttttctttttgaaaggcgttaccattctgaaagtagagtaaactactttcactgaactgatcttcagccagttttggtgttcattaaaaaaatttacagtgttatgcattcaaatatggtaactgagcctttaggttcccacggcaacttgatcatttcagtagaaaacttttcttttctttcttttttaacttataggtatgcctgttctctaacagtttcacttagcttatcatttcagttatttccaaccgagatatccacctttgggaattcacatattctgatacattcccaggtggctatttataaaaacacaagaaacatcatgctaacattaccaagtcctgagaaaactggtcttgcattatgtcattctaaggagaaacaccatctttctctccatatcacggacttttattttacatccctggagaaatttcatacacttggcaggtaactcacagaagctttattggtataccgcaaatacctaagtattggtggtccaaatgccccagtgccacatataaatagacaaacgagttttctttgtgatgagtttatcacccaatacttggttcctaaacttagatccaacttaattggttacatcaaagtcatctggggtctttgttaaaacagattcccaggcttctctccaataactgaattggaatattcaagaatggatgcaagaaatctgaatttttaagaagtactctgtaggatgttcatgcccagccagtctggaaaattcataacctattaattaataaatcattcacgaaactggcatgatggtttttaattaacaacttggttgactgacaaatgttacaatcaaatacaaatggaaaaaccagaatattgaccaaaagggttagcacaaaactgtcataaatatcttactgtcagcaatgcaacatactgatattttctattatgttttatttccttttaaaaatgtgttcattacaaaccacttcatttcatttcctatttaataaatctcatccacaattttaaacacaatgacctaaggacatttttcaaacatgcatggctgacccagcctacctgactctgtaggatccaggtgatgcctcggcgaataggtgtgcctgaaagataaacccaaaacagtgctgtcatcagaccacaggagatcaatctattgttgaaatattagatagtgagaaatcacaacaaaatgaatttggcaccatgttccaaatagagatttccctcttataaggaccagactaccagaatccatgcagcaacaaaatctcttctctatatagtggggaatagacactgactacttttatatttgggggtatctcaattctttgtttcccgtatttcatcttctaattgaatgcaataaaatcaattagattataacatctaagtaacttttcagttttactttctaaaattataagcatcttattgtaattggtgcttagagttttttccaatgttagattcaatcattagtaaataatct

SEQ ID NO: 74624 - DNA, 856 bp, Homo sapiens
aattcccttctcccagatggcaaacatcatcatcctcaacaacataaatggactgtccccaggcgaccagagctatggtccttcttcttcttacccattatttataccagacaaacattcttaatacaattttattaaggcttcaattaacagaaattattatattaaacattaagttggtaaagtacaaatagaccctgaaaataacctgtataatcccagtctaataaacccatagccttcatctgccatctttgatgctctttttctttacctggaacatgagaactttatagacataattttctctattcagaaaatatcttcgtgggatttccttttacatttacttttatccttaacaaaaatttatatacatcatcaagctacaaagggaaattccctttacctagggtgagtcctcacacatagcacaaacacagccgggaaaccttgtagctacatgaacaacaatttttcttctcaagcatcactaccacaattcctggttgttcctgcacctcttcaccttctgtctccagtcagccatgaccacaaaaacccaatgtctatgagtctagctcatgttacagactcaccacctaggacttccatgtcactgatgttctctttaaacttggatgaaacaacataactcagttccctcttgcttctctttcctwctataacttttcctttattcctctggatggcttaccatttccatcaactttttcctttggcttcctttatgaaaggacaattattggtgcctaaactcgtaagagtaccaaaaggttctaatagctcatttaaaataagaattacccagaagaagtgctctttgagaaaattc

SEQ ID NO: 74625 - DNA, 648 bp, Homo sapiens
tgcactttaaaatagcatcactgagtagtaaaaagagttctagaatagaatttgtctcagctccactgctaataagctgtgtaactttgaattaaatattaaatttaaatagttttcagaaaatatttgcctgtcaaatgagagtataggcctatgtaatctctatggtttcttaatacttttctgcgaaacaaaacactaggagataatcttaacagccataatgttaaatgtgatcctcttatgtttaaagaaatgaggtcattgggaatcaatgacttctgattttaaaataacacataaaccagtcaatttaattgaaatagacttattaaaattattgttcttggtgatactaataagagggtaggtgacmaggtatttcatcaaggtatttcatggaggagtggtaattcaggtttgtttttttttaaactctctactgataatttgccgtgtagacataggccacataaaactggcttcagttaatcaagtggctttaaaacagttcagtctgatgtgcaggtaacaggtccatcaattagaggtcaattagatacagttacctcaaagttaattccataatcagactaagatgaccaaaatagagaagttgaataaagtctatttataatagagcatgaa

SEQ ID NO: 74626 - DNA, 1052 bp, Homo sapiens
ttgttgtttttgttgttttgtttttttgagacagagtctcactctgtcagccaggctggagtgcagtggcatgatctcggctcactgcaacctccgagtcccgggctcaagcaattctcctgcctcagtctcctgaatagctgggattataggcgtgtgccaccactcccggctaatttttgtatttttggtagagacagggtttcaccatgttggccaggctggtctcgaactcttgacctcaggtaatccgcccacctcaggctcccaaagtgctgggattacaggtgtgagccaccacgcccagcccacatcctgtttttttaatactttccataaagagttttcctcttgtatctagcagctttaattacatatattaattacaatgttaaatcttagtaagcactatttccagtgagaaaactggaagtgatttgaactgttttatgtcagtatcaatagattaaaaccatttcataattttgagaaaaatgtctgctcattttttattagcagatctaagtatattgagtttttraatattaaacataagatgccaaagtatataaactttaccttatgtttaataattagtgttttaatattttaacttatctagaaatgactcagactctttatgcttaccattacttaatttaacataactttttaatattttaaattactaataaaaagtttctgtgcttcttgtttccacagttttacctagtttcctgccaatgttaacgttttgcaaaactggagttcaatattactgaaaggttcttgtatcagttcgaaccctgagagcatgccagcagacaacacgaggcggtgtggagcaacacactgttttattgagcgcttgggtgcaggtgggctgaggcctaaaatggcgtcagcgccagatgaggccagggcaggggttttatagtctcctgcaaacacaaagtgtgtcagtcggatgtaactgctatgcacggtacccggacggcctctctctcagtcttcagggggtacgtgtcttccagccagctctctttctgctt

SEQ ID NO: 74627 - DNA, 1052 bp, Homo sapiens
ttgttgtttttgttgttttgtttttttgagacagagtctcactctgtcagccaggctggagtgcagtggcatgatctcggctcactgcaacctccgagtcccgggctcaagcaattctcctgcctcagtctcctgaatagctgggattataggcgtgtgccaccactcccggctaatttttgtatttttggtagagacagggtttcaccatgttggccaggctggtctcgaactcttgacctcaggtaatccgcccacctcaggctcccaaagtgctgggattacaggtgtgagccaccacgcccagcccacatcctgtttttttaatactttccataaagagttttcctcttgtatctagcagctttaattacatatattaattacaatgttaaatcttagtaagcactatttccagtgagaaaactggaagtgatttgaactgttttatgtcagtatcaatagattaaaaccatttcataattttgagaaaaatgtctgctcattttttattagcagatctaagtatattgagtttttaaatattaaayataagatgccaaagtatataaactttaccttatgtttaataattagtgttttaatattttaacttatctagaaatgactcagactctttatgcttaccattacttaatttaacataactttttaatattttaaattactaataaaaagtttctgtgcttcttgtttccacagttttacctagtttcctgccaatgttaacgttttgcaaaactggagttcaatattactgaaaggttcttgtatcagttcgaaccctgagagcatgccagcagacaacacgaggcggtgtggagcaacacactgttttattgagcgcttgggtgcaggtgggctgaggcctaaaatggcgtcagcgccagatgaggccagggcaggggttttatagtctcctgcaaacacaaagtgtgtcagtcggatgtaactgctatgcacggtacccggacggcctctctctcagtcttcagggggtacgtgtcttccagccagctctctttctgctt

SEQ ID NO: 74628 - DNA, 1052 bp, Homo sapiens
ttgttgtttttgttgttttgtttttttgagacagagtctcactctgtcagccaggctggagtgcagtggcatgatctcggctcactgcaacctccgagtcccgggctcaagcaattctcctgcctcagtctcctgaatagctgggattataggcgtgtgccaccactcccggctaatttttgtatttttggtagagacagggtttcaccatgttggccaggctggtctcgaactcttgacctcaggtaatccgcccacctcaggctcccaaagtgctgggattacaggtgtgagccaccacgcccagcccacatcctgtttttttaatactttccataaagagttttcctcttgtatctagcagctttaattacatatattaattacaatgttaaatcttagtaagcactatttccagtgagaaaactggaagtgatttgaactgttttatgtcagtatcaatagattaaaaccatttcataattttgagaaaaatgtctgctcattttttattagcagatctaagtatattgagtttttaaatattaaacataagatgccaaagtatataaaytttaccttatgtttaataattagtgttttaatattttaacttatctagaaatgactcagactctttatgcttaccattacttaatttaacataactttttaatattttaaattactaataaaaagtttctgtgcttcttgtttccacagttttacctagtttcctgccaatgttaacgttttgcaaaactggagttcaatattactgaaaggttcttgtatcagttcgaaccctgagagcatgccagcagacaacacgaggcggtgtggagcaacacactgttttattgagcgcttgggtgcaggtgggctgaggcctaaaatggcgtcagcgccagatgaggccagggcaggggttttatagtctcctgcaaacacaaagtgtgtcagtcggatgtaactgctatgcacggtacccggacggcctctctctcagtcttcagggggtacgtgtcttccagccagctctctttctgctt

SEQ ID NO: 74629 - DNA, 1052 bp, Homo sapiens
ttgttgtttttgttgttttgtttttttgagacagagtctcactctgtcagccaggctggagtgcagtggcatgatctcggctcactgcaacctccgagtcccgggctcaagcaattctcctgcctcagtctcctgaatagctgggattataggcgtgtgccaccactcccggctaatttttgtatttttggtagagacagggtttcaccatgttggccaggctggtctcgaactcttgacctcaggtaatccgcccacctcaggctcccaaagtgctgggattacaggtgtgagccaccacgcccagcccacatcctgtttttttaatactttccataaagagttttcctcttgtatctagcagctttaattacatatattaattacaatgttaaatcttagtaagcactatttccagtgagaaaactggaagtgatttgaactgttttatgtcagtatcaatagattaaaaccatttcataattttgagaaaaatgtctgctcattttttattagcagatctaagtatattgagtttttaaatattaaacataagatgccaaagtatataaactttaccttatgtttaataattagtgttttaatattttaacttatctagaaatgactcagactctttatgcttaccattacttaatttaacataactttttaatattttaaattactaataaaaagtttctgtgcttcttgtttccacagttttacctagtttcctgccaatgttaacrttttgcaaaactggagttcaatattactgaaaggttcttgtatcagttcgaaccctgagagcatgccagcagacaacacgaggcggtgtggagcaacacactgttttattgagcgcttgggtgcaggtgggctgaggcctaaaatggcgtcagcgccagatgaggccagggcaggggttttatagtctcctgcaaacacaaagtgtgtcagtcggatgtaactgctatgcacggtacccggacggcctctctctcagtcttcagggggtacgtgtcttccagccagctctctttctgctt

SEQ ID NO: 74630 - DNA, 1052 bp, Homo sapiens
ttgttgtttttgttgttttgtttttttgagacagagtctcactctgtcagccaggctggagtgcagtggcatgatctcggctcactgcaacctccgagtcccgggctcaagcaattctcctgcctcagtctcctgaatagctgggattataggcgtgtgccaccactcccggctaatttttgtatttttggtagagacagggtttcaccatgttggccaggctggtctcgaactcttgacctcaggtaatccgcccacctcaggctcccaaagtgctgggattacaggtgtgagccaccacgcccagcccacatcctgtttttttaatactttccataaagagttttcctcttgtatctagcagctttaattacatatattaattacaatgttaaatcttagtaagcactatttccagtgagaaaactggaagtgatttgaactgttttatgtcagtatcaatagattaaaaccatttcataattttgagaaaaatgtctgctcattttttattagcagatctaagtatattgagtttttaaatattaaacataagatgccaaagtatataaactttaccttatgtttaataattagtgttttaatattttaacttatctagaaatgactcagactctttatgcttaccattacttaatttaacataactttttaatattttaaattactaataaaaagtttctgtgcttcttgtttccacagttttacctagtttcctgccaatgttaacgttttgcaaaactggagttcaatattactgaaaggttcttgtatcagttcgaaccctgagagcatgccagcagacaacacgaggcggtgtggagcaacacactgttttattgagcgcttgggtgcaggtgggctgaggcctaaaatggcgtcagcgccagatgaggccrgggcaggggttttatagtctcctgcaaacacaaagtgtgtcagtcggatgtaactgctatgcacggtacccggacggcctctctctcagtcttcagggggtacgtgtcttccagccagctctctttctgctt

SEQ ID NO: 74631 - DNA, 1052 bp, Homo sapiens
ttgttgtttttgttgttttgtttttttgagacagagtctcactctgtcagccaggctggagtgcagtggcatgatctcggctcactgcaacctccgagtcccgggctcaagcaattctcctgcctcagtctcctgaatagctgggattataggcgtgtgccaccactcccggctaatttttgtatttttggtagagacagggtttcaccatgttggccaggctggtctcgaactcttgacctcaggtaatccgcccacctcaggctcccaaagtgctgggattacaggtgtgagccaccacgcccagcccacatcctgtttttttaatactttccataaagagttttcctcttgtatctagcagctttaattacatatattaattacaatgttaaatcttagtaagcactatttccagtgagaaaactggaagtgatttgaactgttttatgtcagtatcaatagattaaaaccatttcataattttgagaaaaatgtctgctcattttttattagcagatctaagtatattgagtttttaaatattaaacataagatgccaaagtatataaactttaccttatgtttaataattagtgttttaatattttaacttatctagaaatgactcagactctttatgcttaccattacttaatttaacataactttttaatattttaaattactaataaaaagtttctgtgcttcttgtttccacagttttacctagtttcctgccaatgttaacgttttgcaaaactggagttcaatattactgaaaggttcttgtatcagttcgaaccctgagagcatgccagcagacaacacgaggcggtgtggagcaacacactgttttattgagcgcttgggtgcaggtgggctgaggcctaaaatggcgtcagcgccagatgaggccagggcaggggttttatagtctcctgcaaacacaaagtgtgtcagtckgatgtaactgctatgcacggtacccggacggcctctctctcagtcttcagggggtacgtgtcttccagccagctctctttctgctt

SEQ ID NO: 74632 - DNA, 1523 bp, Homo sapiens
aaaaacaggggttgttattcccattttagagctgatgaaattcaagcctcgaaagcataagtaacttgccagctagccagttaaaaagctgatagctaacccagggctatccaaatccaaagctcttaccctagtcatattacctgatggagacaggaatatagaactacttgagtgaatgactgccagtaattttacaggttaaaaaggtgttgatgtatcagactagcccctgcaaacacacacttggtgactccaacttataagcacatactctggagccaggctgcctgggttggaaccctagcacttccacttattagctgtgttaccttgtgttaaacaaggcaggtctcttcatctctccatgcctcggtcttctcacccgtaaaatggggataattctggtatctctctcacagtgtggttgtaaggattaaatgaggtaagaaagttaaagcacttagaatcgtgtctggcacacaggaagtgctatttaagtgtatgttgttaaatgcattgcacttcgtgatttacaaagtgttttcatattttgtttaacatttgtgacaagctttgaggtagatawcggcctcattctcatttggaagtgctcttgagatcatgcagctggcccatggaggagatgggattcaaccccaggtctatctgactccacacgcatgcacagctgttcataactctctctggcagctggtcagcctggctctaactgccagagatgattccctaggtaccaggaccaagtgtgaaaaggctccagtcagcctgattttcttcaggccactttctcccagtttgctctgtgagaaggatccttcttctggaagaaactctccctcaaataaatagccaaatccttttggtcccaaacaccgaagagggattttctttctgccattgctcagcagcctggcttctaaatgagtttgctgtacttagtttgtgtagtacctaaactacaaaacaaattgctttcctgaatgtgcctccaaaaaggaaataagtgtatggaacaaaccaggttcaaagcatggtataaacaaagggaaattgtttgcaattccagctgcttgtaaagatgcaagagggaggagagaagagccctcatgggtgtgaagtgggctatgaaagtgcaaaagaaggtgcttcaaatgggaaccaaatgggctaagtcagaagttagacagcaattagaagtgaggtgcctccaggcgtctctctctcactctacatgcggcctcacctggtagcaaaaagagggaaaccgcttaagcccaaaggatttgcccttctctctacctgcatccacagccttcaataatttataaccccagcactagagctagtgctaaaagatggattttattttgaaaaaagatcgtgtcacttttttccccagatttcaaaagctcttcaagagtctgctctggcagcctggccattattattcacatttagggagtgcataatagctcacaatgccctttaatacctgacat

SEQ ID NO: 74633 - DNA, 653 bp, Homo sapiens
cttctcaggacggccttgtagttctttctctagtcatcctccttcatgcaataactcttagagagtgattataaactttgtgagaaattctgttagagcgcactgctagtgctgataatgaaagtggagagaaaaatgaaatgatgcgtcctgagtaggggggaaragccgtgtccaaatgactctcacagtgggccagtgctacttggtccatagttgtattgatgaactggggactgggggagggaattgtgctgcccagtgactgtctgtgtgctgctcccattcagcaatctgtgccaggcaaggtgctagtgctgcctggctgcaggaaggctaactggacctgacgtggtctctacctcaggggctcatggtatacagaagacagacacctacgtaggcatacatcagtgctgaggactcttctgggtaaccatcagccagagaatccgcagaagaaatccagctctgcttgagcaactggataaaatgatgcctaaggtcccctgaggttctaagcaccgaccaagggagatctgggatgggaccacagacagaagaatgcccaccagaatggcccctgcccatcctgtaacatggttttcaggagttccagtggcaaaagaggcaacttaaaggttgtggagtca

SEQ ID NO: 74634 - DNA, 653 bp, Homo sapiens
cttctcaggacggccttgtagttctttctctagtcatcctccttcatgcaataactcttagagagtgattataaactttgtgagaaattctgttagagcgcactgctagtgctgataatgaaagtggagagaaaaatgaaatgatgcgtcctgagtaggggggaagagccgtgtccaaatgactctcacagtgggccagtgctacttggtccatagttgtattgatgaactggggactgggggagggaattgtgctgcccagtgactgtctgtgtgctgctcccattcagcaatctgtgccaggcaaggtgctagtgctgcctggctgcaggaaggctaactggacctgacrtggtctctacctcaggggctcatggtatacagaagacagacacctacgtaggcatacatcagtgctgaggactcttctgggtaaccatcagccagagaatccgcagaagaaatccagctctgcttgagcaactggataaaatgatgcctaaggtcccctgaggttctaagcaccgaccaagggagatctgggatgggaccacagacagaagaatgcccaccagaatggcccctgcccatcctgtaacatggttttcaggagttccagtggcaaaagaggcaacttaaaggttgtggagtca

SEQ ID NO: 74635 - DNA, 854 bp, Homo sapiens
tgcatattgtgaattctgtttctttagttttggacatttcagcctggttaagaatcattgctggggaactagtgcagtcaattggagatgagaagaccccttggctttttgaaatctcaaagttattgcactagttctttctcatctgtgtgggctgatgttccttcagtctttcaagttgctatccttccaatgggtttttttgattttatcttgtttgatgcscttgggggtttgattttggtataaggtggattcactcaactagccttgtttcttgaagattttagagggccaagactcagcttggcacttttgggctgtgtgctgtaactcttggaaactagtactgggcccctgcctttgttctagaggttaggaacctgctgcattggaggggctgaggtgttcccagttcactggccacaacactccaatgggtggtgccagccagagcacctcatcagggaaggggcagcaggatccatttcacttgcacatgtcagtagctgtagcagcatggcagggtacccatgtgttggctggggcagagtactcacaggagtgaaccccaacattcctgtgtgcatttgcactggcaggagtgaggtgctggcaggcacaaagctgctggcttctgtgcacacgtttacagaaggggaggtgcagggccactagtgtttgtatgtgctttcatgccagcaagggcagcacaaccaggtacccatgtatcagtgggggggtggggatggcagggtgtgctcatgccagctagtgcagtggggtatgcttgcacacatgtgctggtgggggtggggaagccaggtgcaccctggatgcaccagaaaagcagg

SEQ ID NO: 74636 - DNA, 854 bp, Homo sapiens
tgcatattgtgaattctgtttctttagttttggacatttcagcctggttaagaatcattgctggggaactagtgcagtcaattggagatgagaagaccccttggctttttgaaatctcaaagttattgcactagttctttctcatctgtgtgggctgatgttccttcagtctttcaagttgctatccttccaatgggtttttttgattttatcttgtttgatgcgcttgggggtttgattttggtataaggtggattcactcaactagccttgtttcttgaagattttagagggccaagactcagcttggcacttttgggctgtgtgctgtaactcttggaaactagtactgggcccctgcctttgttctagaggttaggaacctgctgcattggaggggctgaggtgttcccagttcactggccacaacactccaatgggtggtgccagccagagcacctcatcagggaaggggcagcaggatccatttcacttgcacatgtcagtagctgtagcagcatggcagggtacccatgtgttggctggggcagagtactcacaggagtgaaccccaacattcctgtgtgcatttgcactggcaggagtgaggtgctggcaggcacaaagctgctggcttctgtgcacacgtttacagaaggggaggtgcagggccactagtgtttgtatgtgctttcatgccagcaagggcagcacaaccaggtacccatgtatcagtgggggggtggggatggcagggtgtgctcatgccagctagtgcagtggggtatgcttgcacacatgtgctggtgggggtggggaagccaggtgcwccctggatgcaccagaaaagcagg

SEQ ID NO: 74637 - DNA, 722 bp, Homo sapiens
tgttcaaaaaggttattgctcttaccttcttccaacaacagtgataggaattttcagaagcaaaaaacaaggttttatgtttgccacttgtatcttagggcaacatttataataatgggatttttaatcaatcttagagcataaaataaaccctatcattttagactgacctgttggactaatttcaatgactttagctggtaggtaattgaaataggatgacagtacactggggtgaataagaggtttcaaaaatagacaaagataacaattagacatatttggagcatcaacagaagttagtataaaattacaggaattttagaaattaataaagaggtcttatttatttaatattgaaataataccatttaaataattttaayagcaaaggtcaatataaggcatgctatcaccaagcactattctaagagctttatatacctcttgttacttgcaactaccgtgttttacaaataaaaaaaactggagattacagaggttaagtgacttaagtagcttacccaagatcacaagagcagtatataatggagttggtattcaaacccttatagtctggctccagagtccatgctctcatcccctctactattaccagtctcaatgactggcaaaataagccatcagcattatattgccttcagattctgagtagttctctagagaatgaatgagtcataagggatgaggatgcttggctg

SEQ ID NO: 74638 - DNA, 722 bp, Homo sapiens
tgttcaaaaaggttattgctcttaccttcttccaacaacagtgataggaattttcagaagcaaaaaacaaggttttatgtttgccacttgtatcttagggcaacatttataataatgggatttttaatcaatcttagagcataaaataaaccctatcattttagactgacctgttggactaatttcaatgactttagctggtaggtaattgaaataggatgacagtacactggggtgaataagaggtttcaaaaatagacaaagataacaattagacatatttggagcatcaacagaagttagtataaaattacaggaattttagaaattaataaagaggtcttatttatttaatattgaaataataccatttaaataattttaacagcaaaggtcaatataaggcatgctatcaccargcactattctaagagctttatatacctcttgttacttgcaactaccgtgttttacaaataaaaaaaactggagattacagaggttaagtgacttaagtagcttacccaagatcacaagagcagtatataatggagttggtattcaaacccttatagtctggctccagagtccatgctctcatcccctctactattaccagtctcaatgactggcaaaataagccatcagcattatattgccttcagattctgagtagttctctagagaatgaatgagtcataagggatgaggatgcttggctg

SEQ ID NO: 74639 - DNA, 548 bp, Homo sapiens
gtaacttaatttattttgtctttttaatttttgtcaattttgtattgttcagtgtagagatcattttaatttctatttctcgataatttttaatacaactgaaaattacatrgtttttaaaatttatttttctagttatttggtttaaattataaaattgatttttacatatttaatgtgtatcctattactacgctaaaaccattttattaattttaataatttatagagtctttaaaattttttatttcacaattctattttgagaataatgacagcttggatcctttatttctaatccttattcctttgccttcttttaattgccattttgcactgtgctgaatacccagcacaattcagggtaaagtctcaacaatttactataaaatatgatgcctctgataattctttgttatatcaagaagcttttcttccatatgtactttgccaagagttgtggtttttattatgaatgctttctgaatttatcaagtgctgttactaaatttatcgatataatcattcaatttttcttcctttttgtg

SEQ ID NO: 74640 - DNA, 548 bp, Homo sapiens
gtaacttaatttattttgtctttttaatttttgtcaattttgtattgttcagtgtagagatcattttaatttctatttctcgataatttttaatacaactgaaaattacatggtttttaaaatttatttttctagttatttggtttaaattataaaattgatttttacatatttaatgtgtatcctattactacrctaaaaccattttattaattttaataatttatagagtctttaaaattttttatttcacaattctattttgagaataatgacagcttggatcctttatttctaatccttattcctttgccttcttttaattgccattttgcactgtgctgaatacccagcacaattcagggtaaagtctcaacaatttactataaaatatgatgcctctgataattctttgttatatcaagaagcttttcttccatatgtactttgccaagagttgtggtttttattatgaatgctttctgaatttatcaagtgctgttactaaatttatcgatataatcattcaatttttcttcctttttgtg

SEQ ID NO: 74641 - DNA, 751 bp, Homo sapiens
ggagtataattgaagaatggtaaatcatgcagacatataaaacgaaaggtcggtaaaatacagagacaaaacatatgcagtggaccttctagaaagtacctggcggaggcaaaagtgacccaaaagcagaggtgaggatatmtttcctcttagaaagggaacctttttttgagggagaaaggggaaaacagtcatcaacaaagcatctctttaaatcttagtaagtataaattaataaataagcagatcaataccttacagttagggatttatgatttggaagaatcatacatatctccacaaagtagctacactgtacacctatgcatttgtaactctgaaccatcgctactcatttcccatatggtttcaatgatgaaaatgagcaaaataagtgtgtagattacagtgaaacaaaagtcaaaccaatggttgcaggaacagcaaaatatttacaggttgtggaagttaaggccaacagaattttatgttgatgtattaagtgataatgggataataaatgtgtgagactgattttcggcctaagtgtagaaaggagaagttgtcatttctttttcaagtacacatcattatgctaattaccttgatctgatcactattacattatatatatcaaaacatcattacataccctattaatagatacaattattatatgtcagtcaaaaaataaaattaaatacaattttttaaaaatattcatcacaactttttcctataatgtgaaggc

SEQ ID NO: 74642 - DNA, 751 bp, Homo sapiens
ggagtataattgaagaatggtaaatcatgcagacatataaaacgaaaggtcggtaaaatacagagacaaaacatatgcagtggaccttctagaaagtacctggcggaggcaaaagtgacccaaaagcagaggtgaggatatctttcctcttagaaagggaacctttttttgagggagaaaggggaaaacagtcatcaacaaagcatctctttaawtcttagtaagtataaattaataaataagcagatcaataccttacagttagggatttatgatttggaagaatcatacatatctccacaaagtagctacactgtacacctatgcatttgtaactctgaaccatcgctactcatttcccatatggtttcaatgatgaaaatgagcaaaataagtgtgtagattacagtgaaacaaaagtcaaaccaatggttgcaggaacagcaaaatatttacaggttgtggaagttaaggccaacagaattttatgttgatgtattaagtgataatgggataataaatgtgtgagactgattttcggcctaagtgtagaaaggagaagttgtcatttctttttcaagtacacatcattatgctaattaccttgatctgatcactattacattatatatatcaaaacatcattacataccctattaatagatacaattattatatgtcagtcaaaaaataaaattaaatacaattttttaaaaatattcatcacaactttttcctataatgtgaaggc

SEQ ID NO: 74643 - DNA, 1177 bp, Homo sapiens
tgtagtgaagttttctcctagcacgttaatgttctgtgttgatgacacatgtaatcagaacgccttcgccatatatgaagacctttaggaaaaagccaagaatagtgtagaagggccttcttttggtacaagaagtggctgatttcgtggcctcaagaaccactttggtttctactgtgtttggggaagctacaagtacagataaagacactgtgaatatatgtctttctgtgtttaaaagaagaggaaagaaaagagttgatgcagaggggacccctggaccttatttttagtgttgacaaatctggtatcatttagaagtggatgttttcaagggctttccccttaaaggaggaagcagaggcccagggaaggagcttgcattgggtgggccattgtgatgctgtggctgggcctgggagattcgactggactcatgtttttattgggattgttttcgattttgcaaagaccctggttacaaagtccggtgggtcctcagtggtctgcccagccctgcttttcccattggcccagtttttcttagggtgtgatcttccaggatcatatagtattctagaagarattcctgtatcatacttgggaggtaatgtgaatggaaagttcttatagacacaaatcttataggaaagatctggatgaagccttgagtgtttgcctttctgggatccaaggaaactcatgaaacagggaggatttaaaggaggaggaaagggaagtgaaaagagaattcccaaagcctggaattgacccacacagtttggcatgaaatggtcacttccgcatctagagcacacattatttttctgaagcaccctgttgaatgagaggaatacatacgtgccatcataggttgaaaaagtgatcttttcagcataaattggtgggtgtttgagagcattacttgcacagttcaacaatacagagctggaaatgcataaagaggacattccctgctagtcaacgaatacatagatctgtagctggaaattagttttaactttcaagtagtcaagaaacttttatgtccaataagactctctctacgtaattttaggctgtacactggttaaaataattctatttggggaaaatcttgtggttgtttgtcccaaatcgccctgacatgttctctgccttgagtccccaaatccct

SEQ ID NO: 74644 - DNA, 1177 bp, Homo sapiens
tgtagtgaagttttctcctagcacgttaatgttctgtgttgatgacacatgtaatcagaacgccttcgccatatatgaagacctttaggaaaaagccaagaatagtgtagaagggccttcttttggtacaagaagtggctgatttcgtggcctcaagaaccactttggtttctactgtgtttggggaagctacaagtacagataaagacactgtgaatatatgtctttctgtgtttaaaagaagaggaaagaaaagagttgatgcagaggggacccctggaccttatttttagtgttgacaaatctggtatcatttagaagtggatgttttcaagggctttccccttaaaggaggaagcagaggcccagggaaggagcttgcattgggtgggccattgtgatgctgtggctgggcctgggagattcgactggactcatgtttttattgggattgttttcgattttgcaaagaccctggttacaaagtccggtgggtcctcagtggtctgcccagccctgcttttcccattggcccagtttttcttagggtgtgatcttccaggatcatatagtattctagaagagattcctgtatcatacttgggaggtaatgtgaatggaaagttcttatagacacaaatcttataggwaagatctggatgaagccttgagtgtttgcctttctgggatccaaggaaactcatgaaacagggaggatttaaaggaggaggaaagggaagtgaaaagagaattcccaaagcctggaattgacccacacagtttggcatgaaatggtcacttccgcatctagagcacacattatttttctgaagcaccctgttgaatgagaggaatacatacgtgccatcataggttgaaaaagtgatcttttcagcataaattggtgggtgtttgagagcattacttgcacagttcaacaatacagagctggaaatgcataaagaggacattccctgctagtcaacgaatacatagatctgtagctggaaattagttttaactttcaagtagtcaagaaacttttatgtccaataagactctctctacgtaattttaggctgtacactggttaaaataattctatttggggaaaatcttgtggttgtttgtcccaaatcgccctgacatgttctctgccttgagtccccaaatccct

SEQ ID NO: 74645 - DNA, 1177 bp, Homo sapiens
tgtagtgaagttttctcctagcacgttaatgttctgtgttgatgacacatgtaatcagaacgccttcgccatatatgaagacctttaggaaaaagccaagaatagtgtagaagggccttcttttggtacaagaagtggctgatttcgtggcctcaagaaccactttggtttctactgtgtttggggaagctacaagtacagataaagacactgtgaatatatgtctttctgtgtttaaaagaagaggaaagaaaagagttgatgcagaggggacccctggaccttatttttagtgttgacaaatctggtatcatttagaagtggatgttttcaagggctttccccttaaaggaggaagcagaggcccagggaaggagcttgcattgggtgggccattgtgatgctgtggctgggcctgggagattcgactggactcatgtttttattgggattgttttcgattttgcaaagaccctggttacaaagtccggtgggtcctcagtggtctgcccagccctgcttttcccattggcccagtttttcttagggtgtgatcttccaggatcatatagtattctagaagagattcctgtatcatacttgggaggtaatgtgaatggaaagttcttatagacacaaatcttataggaaagatctggatgaagccttgagtgtttgcctttctgggatccaaggaaactcatgaaacagggaggatttaaaggaggaggaaagggaagtgaaaagagaattcccaaagcctggaattgacccacacagtttggcatgaaatggtcacttccgcatctagagcacacattatttttctgaagcaccctgttgaatgagaggaatacatacgtgccatcataggttgaaaaagtgatcttttcagcataaattggtgggtgtttgagagcattacttgcacagttcaacaatacagagctggaaatgcataaagaggacattccctgctagtcaacgaatacatagatctgtagctggaaattagttttaactttcaagtagtcaagaaacttttatgtccaataagactctctytacgtaattttaggctgtacactggttaaaataattctatttggggaaaatcttgtggttgtttgtcccaaatcgccctgacatgttctctgccttgagtccccaaatccct

SEQ ID NO: 74646 - DNA, 577 bp, Homo sapiens
cgtggttctggtcccacagaggtcctattgtctgtaagaatttgatgttggctaaaagagacatcaggagtcactggggagggagaaattatgctgtaatggtcagggaaagtggttagactttttcaaaaacaaacaaaatgtaaaattttacatcttcactttaccctatatagccaacttaaactccaagatagatctaacagtaactctttttgtaaaaaaaaaaaaaaaaaaaaaaaaaagcaagagaaaatagaaaaaaaaatttgtgaaattcagtgtatagaattttctaagattcaatgaaatcactaaagaacatactgacagatttgagttaaactcatatacttcataaaaggtaatcaaaatgtaaagatcattaacctttagaggaatttgcagaaaagaaytaacatcttcagtataaggaaaataaacaaattttaaaactgatactataatcgagttctcatattctggcccaagaataggttgcatcagatttagtttcaagtgtagattcctgtcctctgtcaaactcttctgccaagtcttcagcctccaaaggttg

SEQ ID NO: 74647 - DNA, 1183 bp, Homo sapiens
gcataacatataaagcatttgacactttgggtccttgttaaagacaaggatagcaaagaaattaattgtgkaagagttctgatgtgtaatttcagtgatgacttttagtacagtttctaataaataaattcttttaaaaagctaacaaaaatcttgaaaataacacagttgacttactagagcatatatttgcctagtctgatgaaagtattaacaggcaatgaaatgaccccaagtctatcatgagatgagaaaatgtggaactagggtatccattaattcctgactggtctcagcctgtttttattcccctgctccagttccacctaaattacagcaatggagagttaagacccagagggcttgatttatttaacataagacagtggtcaggaaattgcactttgatggattcaggaaaaatttcccaaatgctgagaaccaatgttgtttccctagtgccattgtatgtttaaattctttttttaaaattatgaaaaaaaagcatggtaaagtaattcacatgattcttgcaattcagtgtctgctaaagatgactggaaaaattgagagcctccaagacatctttctcagagacataaaattagatgtgtgttaatgataggaaaacctattctaccctgaatgaaaggatcaggtgaacattttgttgaactttgccattagaggaaaaaggtatctgaaatattgcctccctttcagttactaaaaaattgctcgataaatttttattttgcttaacatataatagccatttcatagtagaatgaaaaaacaataattcaggccaaaataaaatgcaagttctataatattcatatgtatctttatattctcttgacaaaatgaggaagaaagaaggagagggacagggaagaagggtaggaggaagagagagagagagagggaacctttctccatctcacaaattaccttggctcagtgcctgaaagaaattagtctactctaaagaaatcctgctgtagtcaaataaaaatgtaacaaaacttgaaatgtaatacctagatccaagactgcagttctcgccagtgctgtcacttactgcccatatatatatatatatatatatatatatatacacactttattcactgccaggcattgaaaaatgtatgcaggtctggagacaaatgttatgggc

SEQ ID NO: 74648 - DNA, 1183 bp, Homo sapiens
gcataacatataaagcatttgacactttgggtccttgttaaagacaaggatagcaaagaaattaattgtggaagagttctgatgtgtaatttcagtgatgacttttagtacagtttctaataaataaattcttttaaaaagctaacaaaaatcttgaaaataacacagttgacttactagagcatatatttgcctagtctgatgaaagtattaacaggcaatgaaatgaccccaagtctatcatgagatgagaaaatgtggaactagggtatccattaattcctgactggtctcagcctgtttttattcccctgctccagttccacctaaattacagcaatggagagttaagacccagagggcttgatttatttaacataagacagtggtcaggaaattgcactttgatggattcaggaaaaatttcccaaatgctgagaaccaatgttgtttccctagtgccattgtatgtttaaattctttttttaaaattatgaaaaaaaagcatggtaaagtaattcacatgattcttgcaattcagtgtctgctaaagatgactggaaaaattgagagcctccaagacatctttctcagagacataaaattagatgtgtgttaatgataggaaaacctattctaccctgaatgaaaggatcaggtgaacattttgttgaactttgccattagaggaaaaaggtatctgaaatattgcctccctttcagttactaaaaaattgctcgataaatttttattttgcttaacatataatagccatttcatagtagaatgaaaaaacaataattcaggccaaaataaaatgcaagttctataatattcatatgtayctttatattctcttgacaaaatgaggaagaaagaaggagagggacagggaagaagggtaggaggaagagagagagagagagggaacctttctccatctcacaaattaccttggctcagtgcctgaaagaaattagtctactctaaagaaatcctgctgtagtcaaataaaaatgtaacaaaacttgaaatgtaatacctagatccaagactgcagttctcgccagtgctgtcacttactgcccatatatatatatatatatatatatatatatacacactttattcactgccaggcattgaaaaatgtatgcaggtctggagacaaatgttatgggc

SEQ ID NO: 74649 - DNA, 541 bp, Homo sapiens
gtactggtatgtgtggctttcagataggaaagtgaccatgattgaaaccaccttttttatttgaatgaaccatggaagaattacttcagcttccccatgtggctttcatattattcacatttcttgctaattcactaaggcaggtgtctaaagctttctagaaaaacacacattgtggtctagggaacagtcatatcttaacaaaaataataatggtataggaaaaattaaggaactgacagattggttttagcaagtcttgtggaaaacaacgtagaaataatttctctcaactgcttggctgaataaaaaagaagaagaaaaaatcttgaaaggtttttgttttttatgcattctcagaactagattttccrctgtcattcattatgggtttagcattacatcttttccataaagctaatatacagaccatttgtaactgtgtcattatctaaaaaccttacattgatttagtgaagacataattttaatatttcaattaattattttgtttacaaagccattttgaagaccaagctct

SEQ ID NO: 74650 - DNA, 1397 bp, Homo sapiens
tcacttcagcttcctaagtaattggcatgacaggcacattctaccatgcccagttaattttttaatattttgtacagatggagtcttgccgtgttgcccaggttgactttgaactccttgcctgaggctatcctcctgttgcagcatcccaaagcactgggatttcagacatgagccaccaggtctagaccattagtagcttttaagaagaaatttatgtgaatctttatcatgtcttttcacctggttcagccatttattagatttgtagtcttaggcaagttaccttatctcactgtgcttgagtttcctcatctctaaagtgggcataaggatagtacttatttcatagtgtcatgatgattaaaaaagtaaaaatatgtaatgtatttagagtagtratataatattactatatacgtacatatatgtgtgtatatacatatgtatatgcatacacacgtgtcactatttcctctaccctgcattgctgataaaggcctacacaggaatataagaccacgtgctttttatcaccacttataagacgtgagattttaggttctatgtgacctttggtataaagaagaacaatgcaaaaaaacaaaggaactttgggactgtaattgcgtacaaatagtttcaatactattatccatttaagcaatagtttggcaactgctaagaaagtttgagtgttacggtcatgtcacaagattctaaagttctccaaggtacttatggtagtagtgatgtcatctggaggaaagccagttacacaaaatatattgttttattaaatctatttcaggcagccatgtttgaggataatgacaagggatcccatatactgataaagttagataagtgtttgccaaagtgtgttgcatcccacacttgtcttcaggaatgctatcgaataaaactattttatgagcaaataaattttgaaggctgcctactatagcctcctcttggcagttaagaatgcacaagagtacattaagggcccctgaaagtcatgtagtttcacccaattctgtcttttttcaacttgtaatatatttgaccacagaatcctgttttggcatagttctcctagtgttctgtagaactgatagtccattgaccacattttgggaaatactgagttagaccatatttctggatctaaactcagcaggtgcattttgtcctgaaaagaccttgacatatcagattcatcagttgtaggcatttaattaccattttatgttgtgtgctacaggagaattagtcaagagccctaagcagttatgtcaactcgttttgacttggggccagttgctgaaactttctggattttatttcctcatctgttaatcacataatcagatcaaacagtttctaagatggtt

SEQ ID NO: 74651 - DNA, 692 bp, Homo sapiens
cttttccggcattggcacctggcatagtgactgtagaaacagtagttaaagcatctggcttgtgattcattttcctctcattaccaagtgatgttcccaaagaaagaatgcaggtaatctagtctactttacttttaaacatgctgataatgataactaatgataatggcttggaagagattccttatcagtagaatgctcttatcaaggtgtctctgttttaggattacatataataaatatgaatagatttatgaagcaaatttccctgcagaatatcatgtaagccatgtaatgatttaacttaattatcataaaatggagataattaataacctaactgttccttgcttgctgagaaaatagcttatgtaccttacttagagaccacctgtgttactttggatgggccagagtscatgtttaaaatggaaaagatgtggggaaccacatggatggcccagatctctatttcacatgtgactcttaattgtgtcctttaaattattagtaaagcttgatactagctgtggtaggcagaataatgtcccatcaaagatgtccaggtactaaactccagaatatgggcttatattaggttacatgacaaagaggaactaaagctgcagctgaaattaggattgctcatctggtgaccttgagatggggagattatcctggaatatctggct

SEQ ID NO: 74652 - DNA, 756 bp, Homo sapiens
taatagcagtcagccataactaaaaattttgcaaaaattacttttctagaaattagctgttaaaaattataagcagaaaaggaacataattattttgaaacatataatttgtcaaatgttaatatataagtctctctcagctcacccccttccactgatatgctggtcagattatgttagaaacctggataggttacattggaaaccagggattgaaaagattgaagtttgtctggctgattttcagagatagtgccccagatacatagcaaaactaccattagcaaaactaccatttcccgctgtgccacctgacttacattcacaggcagtaaactcctgactctattgacacatctttgtcattccaattattttaaaagcagaggtctttattaatttctgcaaataacttacctatctgaaactcttggttatgtctctgtactccttcttaggcaggatcttctatatttcctctgtctcattcatcttgcttcacacctgcatggagctaatctttcccatgtgttaaaactttctttcccaaatattcaagtcatcttttgtagggtttttgtcataatcataatttctagtaagaataattttaggagttcaataacacttggccaatgaatgaatttgttgtgccaggcattgtgtaaagtagtttatatcatctaatttttatagaaatgctatggattaggttctgttattatcccatatcttatttcaaacartggaaataga

SEQ ID NO: 74653 - DNA, 735 bp, Homo sapiens
acaggaaaatagcttctgttgtggatttgaggaacttacaacttctctagaaactctatactcaaataaatacattaaataactgggggcttgatagagtaggtgtttctgactattcagtgaggcaagatttagagtagggagaggtcytggatagttttatgtaatagctttttattttctttttccttttttcctttcaatgttttaattggcctataataactgtacatatttcttgggttcactgtggtatttcaatacatgtatactatgtgtaataaaccagccagggtaattagcatatctatcccttcaaacatgcatcgtttcttttgttgggaatattcaaaactcactcatctagctattcaaaaatttacacaaaattgttataaattatagccgccctgtagtgctataggacattagaacccattcctcagatgtggctgtacttttgtattccttaaccaagctttcgctgtcttctccgtccccttctgtgactatagtaaccactatttcactctctactgctatgagatctaaattgttagcttccacatttgagctagaacatgtggtatttatctttctgtgcctggtattttcctgaatctttttgtgtctttcatttctctgaacaagtgctgagacatgagaaagggtgaggtgggggccctaagtttctgctcttccaaggctcctccaatatttcaagttatttgacca

SEQ ID NO: 74654 - DNA, 696 bp, Homo sapiens
ttcgtgtcctccctggtgaggagcattagtaacagctactcatacatctggattgggctccatgaccccacacaggtgcgagtatatcctcccctctctgttacctctcaaggtactgttgttgcccaggcgcactccctgtccccagtccctgcccaggaagtactttagggagcactggagctcagattctgggggacatttgggagaataggaagtccatgaggcagctgaagagctgaattctacggagatccctagtctttaaagaaaattagtcggactcttgtaaaacttttacataattctcaagggaatccttacaaatcaattwtctgagcttcagggagtctgtatctattattctgagggaattctaaattaagataggatcaaattttgcccccatacagaatagacattatctttgaggttcgcaggctaatcacaaatgctacaccaattattgttctgcaagtaacatattaccttgagtgattccaaagttcttgtgtttattggttgggattttcccaaagcaatgaggagttaaggaaaagattccagtgcagaggactctagggcagcatctggaagatcagaccaaaatccctgatgctggggaggaatcaggtgttacagctcaggggccatgcaaagagacctgcaatggccattttcttcacctggctgcct

SEQ ID NO: 74655 - DNA, 771 bp, Homo sapiens
  misc_feature (1)...(771): n = A,T,C or G
tannnnnnnnnnnnnnnnnnnnnnnnnnnnnnnnnnnnnnnnnnnnnnnnnnnnnnnnnnnnnnnnnnnnnnnnnnnnnnnnnnnnnnnnnnnnnnnnnnnngaattcctaccttcacagaaggagacaaaaatagcaaaaatgtattctatgttccccagtatgggatggccctcattgggaaggtgacttacgagtagcaagaaaacatcagggtgtgggagagtccaagggtatgagcactcctggcatgagaggcagcaggcctgagtgggcacttgcctggcagggtccagggagcygatggggagtgagcaagggggccactggccttagccatggccgcatgcttagcccaggtcagtggagcatgggaagcacggcgggaagcgctgcagggaatcaaccaggctggctgctccaaaccgctccccctggtgatcatccagacaaatgccccaggtcccttccactctttgcagccaccgtgaagctcagagtccccccaaactttcttcccttggtggcaggcttctctgcacattctgagctggtttcctccatatttgttctcctgcacgtccaatgcagtctgcctttttatcctcaggaattctgcaacatgttaatatattccacttttatggttttattcttatttcttttccaaaactatccattttaagcagctagtccccagagatgactagccacactaccttatctcgaaacagtgctatgaatactcaccaacaaaacaatacatgcatt

SEQ ID NO: 74656 - DNA, 771 bp, Homo sapiens
  misc_feature (1)...(771): n = A,T,C or G
tannnnnnnnnnnnnnnnnnnnnnnnnnnnnnnnnnnnnnnnnnnnnnnnnnnnnnnnnnnnnnnnnnnnnnnnnnnnnnnnnnnnnnnnnnnnnnnnnnnngaattcctaccttcacagaaggagacaaaaatagcaaaaatgtattctatgttccccagtatgggatggccctcattgggaaggtgacttacgagtagcaagaaaacatcagggtgtgggagagtccaagggtatgagcactcctggcatgagaggcagcaggcctgagtgggcacttgcctggcagggtccagggagctgatgggsagtgagcaagggggccactggccttagccatggccgcatgcttagcccaggtcagtggagcatgggaagcacggcgggaagcgctgcagggaatcaaccaggctggctgctccaaaccgctccccctggtgatcatccagacaaatgccccaggtcccttccactctttgcagccaccgtgaagctcagagtccccccaaactttcttcccttggtggcaggcttctctgcacattctgagctggtttcctccatatttgttctcctgcacgtccaatgcagtctgcctttttatcctcaggaattctgcaacatgttaatatattccacttttatggttttattcttatttcttttccaaaactatccattttaagcagctagtccccagagatgactagccacactaccttatctcgaaacagtgctatgaatactcaccaacaaaacaatacatgcatt

SEQ ID NO: 74657 - DNA, 771 bp, Homo sapiens
  misc_feature (1)...(771): n = A,T,C or G
tannnnnnnnnnnnnnnnnnnnnnnnnnnnnnnnnnnnnnnnnnnnnnnnnnnnnnnnnnnnnnnnnnnnnnnnnnnnnnnnnnnnnnnnnnnnnnnnnnnngaattcctaccttcacagaaggagacaaaaatagcaaaaatgtattctatgttccccagtatgggatggccctcattgggaaggtgacttacgagtagcaagaaaacatcagggtgtgggagagtccaagggtatgagcactcctggcatgagaggcagcaggcctgagtgggcacttgcctggcagggtccagggagctgatggggagtgagcaagggggccactggccttagccatggccgcatgcttagcccaggtcagtggagcatgggaagcrcggcgggaagcgctgcagggaatcaaccaggctggctgctccaaaccgctccccctggtgatcatccagacaaatgccccaggtcccttccactctttgcagccaccgtgaagctcagagtccccccaaactttcttcccttggtggcaggcttctctgcacattctgagctggtttcctccatatttgttctcctgcacgtccaatgcagtctgcctttttatcctcaggaattctgcaacatgttaatatattccacttttatggttttattcttatttcttttccaaaactatccattttaagcagctagtccccagagatgactagccacactaccttatctcgaaacagtgctatgaatactcaccaacaaaacaatacatgcatt

SEQ ID NO: 74658 - DNA, 771 bp, Homo sapiens
  misc_feature (1)...(771): n = A,T,C or G
tannnnnnnnnnnnnnnnnnnnnnnnnnnnnnnnnnnnnnnnnnnnnnnnnnnnnnnnnnnnnnnnnnnnnnnnnnnnnnnnnnnnnnnnnnnnnnnnnnnngaattcctaccttcacagaaggagacaaaaatagcaaaaatgtattctatgttccccagtatgggatggccctcattgggaaggtgacttacgagtagcaagaaaacatcagggtgtgggagagtccaagggtatgagcactcctggcatgagaggcagcaggcctgagtgggcacttgcctggcagggtccagggagctgatggggagtgagcaagggggccactggccttagccatggccgcatgcttagcccaggtcagtggagcatgggaagcayggcgggaagcgctgcagggaatcaaccaggctggctgctccaaaccgctccccctggtgatcatccagacaaatgccccaggtcccttccactctttgcagccaccgtgaagctcagagtccccccaaactttcttcccttggtggcaggcttctctgcacattctgagctggtttcctccatatttgttctcctgcacgtccaatgcagtctgcctttttatcctcaggaattctgcaacatgttaatatattccacttttatggttttattcttatttcttttccaaaactatccattttaagcagctagtccccagagatgactagccacactaccttatctcgaaacagtgctatgaatactcaccaacaaaacaatacatgcatt

SEQ ID NO: 74659 - DNA, 584 bp, Homo sapiens
tctgaagcctagatgtggcatttcctcattagaaaccttgaactcaaatccaactgcacccctctccccaccaagggagggggtaagggaggggataagatcctcacctggatcttatcaggaatactggtcacccaaaattcaagggctccattcaatggactccctaaggtgaaagtgcgccacctggtggagagcactttgacttcactacacatttgcaaatgattgaccagctggtagcagcactaccaaaagcatcttggttgacattaaatattagataaaacagaggaaggaatcaggggggcaaaatgaatttgatgcaaccaatatagttcatggggtagtgcmtgagacgtgaacatttaataatcaagaagacattatctaacaaactagatagtatttgcatagaattcaagaatagaaggtagtaattcacctctgatggaactttctttaaaaatctgggtgcagtgtgggtgcacactagacctgggctcccaataaccaaagaagatgaaattatataaacgtttgaatgggaagaaactctgttgttccaataacatacatagaaa

SEQ ID NO: 74660 - DNA, 666 bp, Homo sapiens
tgttccgtttaattgtttcaattttaaatttggtttttgtttcctagaaacatacttttctgagaaagcagtcagaaacagtggtctggaaacaatggattgcttatgaacaattctgcaaatctgcccagagatttaagaaatcctaagaggatcgagaagtggaattctaattggcctttaaaactcccaataacaaagtgctacaaaccaggcggcatgaccacaatatttatagaagatggagctcagaatccccatgtctaactcccaggttaaatgcagaaattaaagtgctttcactgggaataaaagagtgtttattcaagctaaatttacacatttattgttttaaagggataataaaaagtctttcaagccctgaagtaacacttaactctctaataaaagtttattaaagaaaagcttcagtatacaaagtaagtagttcttttttgcaggtcctcaagaccaggsatcaaagagagttgacagcaaaatggcccggagtccctctgcatgaatggcggctctcccagtctccagctgccggcgccctggtggccgggccacacacacacacacacacacacacacacacacacacacacacacaccccttcttgtacttcggggaagcagcctttgttcccaggacccaaactg

SEQ ID NO: 74661 - DNA, 568 bp, Homo sapiens
ctggctgtgtgcatgtgagaatgtgtggtgggtttttttttttttggagacagggtcttgctctgttgcccagctgtagtgcagtggtgcagtcacagctcactgtagcctcaactcctgggctcaagtaatcctcccacctcagcctcctgagtagctaggactataggaacatgccaccatgcccagatagctttttttggtaaggacagaggtcttgctaggttgcccaggctggtctcaaactcctcggctcaagaaattctaccgcctcggcctcccaaagcacttggattacaggagtgagccactgcacccagctaacagtgtgttcttggggtagaaggaaagagctataagaaagctaaattctcatattctacagtaagaatgaaaagatggcctagacacaaacaataaattgcaacaccagttgttatttggaaataaagaggtaattccagagaagaagaaaaaaaggaaagaatttaaaartggttttaaatttcgtcaatttaaaaatggttgtctctaggaagcaggaattgggatagaaataggtttttca

SEQ ID NO: 74662 - DNA, 793 bp, Homo sapiens
ctatccaaacactggggacaatgcaaacacacatgagctggtgaatgggaaaatgttgtcgtgtctgtacagtggaacagcactcaacagtaaaaggaacatacttccgatacacacaacacaacagacggctgctcagtgaggtcaaacacacgaacgcacactgggctctcacccatatgaccttctggaaaagccagccctcagggagggaatggagatcagcagtgccaagggctggggtggaggggktgctgagagggaggggctcaggcgagactttgggtgatggaaaggctctacatcgtgatcgtggtagtggctgcacaactgtgtgtgttgatcagaactcacagctgtctaccctaaaggtgaattttactctttgtaaatcatacctcaataaacctgagttcagaaagagcccatttcaccctaggacaccgtcagtctacagaagggtgaggttccacgcccaggacacggtgtcaccaagagccacccgggaagggctctgcgagccagcccagaacctaaccccaggctctggtttgagcattctcagctgctccatggatctcccaaagcctttgtatttgttcatcagttatctgtcaacatgctttatagactcctggtcagcaaaactgcaaacagtaagaccttttcccacttcccaactcaaacgctgtagtgggtcagagcacgcatatgggtcaataacagacacacgtggacatcagctggcctttctgaagaggacagagattgatggatgtgcagacttcccata

SEQ ID NO: 74663 - DNA, 676 bp, Homo sapiens
ttgagccattctacaattcttttaaaaaagaagtagtttgatttttaaaataattgcacttgaatttttattagaagggcattacattgctagatttattgaggggaaatacatttcttcacaatcccaagttgccttatccatgaatttggtatatatcttggctttttaaacatgtaatttcatatcatttaatagatttttaaaagtattttcataaaactcttacatatttaaygttaagctaattgttttatcatttgtagctattgttgtagtacacaatgagaaaattgtgatgactacattctacatttaataactacacagcaggctgggcatggtggctcacatctgtaaccccagcatatttttttggctaaggcaggtgaaacactagaagccgggagttcaagactagcctggacaacatagtaaaaccccgtctttactaaaaatacagaacttagccggctgcagtggaatgtgcctgtaatcccagctacttagggggctgagacatgagaatcgcttgaacctgcagaggctgcagtgagccaagactgtgccactgcactccagcctgggcaacaaagcaagactctgtctccaaaaaaataataatgataataataataactatacagcagacagtgtcacattgtagttaagaaca

SEQ ID NO: 74664 - DNA, 634 bp, Homo sapiens
agaagtccctgggcatttggcaattagtagtaacaattccccaattaataacatataatattcctaatgccaagtgtgttatatgttagtaagcaaaaagggttctgaataagtcttggtttaaaaaaaaagaacaggcttgactgaggtgcagcttcacttcacttcagtttcatgacgattcaacattcaatgcgaatgtattaatgggctgaaatcaaactgtgcttccaggatgtgaaggagaggtctggagtgtcattctgcttacaatcactgactggctcaaaacggtcttgagccacaaccaagaagcaggcattagctatgggtcatcagttttcactggaatggtggcaatgtcagttagtatttgtcaaaaccctaaataccttgtagtaaaatattgcaacagactgtaaatgttcgtcttggaaacacttggggaagtgtgcatgtggaactagaaaattgtctgagaaagtgactaataaagctgcttccatgcagagaggctcctgagcttggaacatgtcccaaattagatgtattgagatccccaggctgtgttttgcaattcaaatataccgggactttccgtsgcagcctcttaggcttcccggtggtggggtcc

SEQ ID NO: 74665 - DNA, 1125 bp, Homo sapiens
ttcaagttgagaaagactattttcacttcacactgtacagtattctatcattctatagtaaactattctttgtttttcttgtcagcattcaagttacagttactttttgaaacatattaggatattaaacccaagatgatatttcatggtgattgtttaactaatgtccaaacccatcatcaacaacaaagtatcagaagataaacagaacagcaacactctgtttttaaaagtaatttttgaaaggtaggaatcacttttttttgagatgaagtcttgctctgtcacccaggctggagtgcagaggcatgatctcggctcactgcaacctctgtctcctgggtttcaagcaattctcctgcctcagcctcccaagtggctgggattacaagcattcctggmtaatttttgcatttttagtagagacagggattcaccatgctggccaggctggtcttgaactcctgatctcaggtgatccacccaccttggcctcccaaagtgctgggattatagtcgtgagccaccgtgcccagtggcctttcagtataatggtttagcgatctggattatagatgctagtaaacataaatgaatatcaaagcttactggataataagatagaaataggatctacaatcttcaaatgctgttaattcctctccaaaagatcaaaaaaaagtctaaagttgatttatttctgagtttattaattatattaaggaaataatagaacttttggaaactacgtgcaactttttaccaccaagtcattcggagactccatctagacttcatgcaacattaaaataatttgaaatattccaaggttcaaaattgtttttaaaaagtgtaattataagaagatttcattcataatgttcagcatatcttccttaaattgtcttccccattttattttctattcactcatgtaaaagtataacagttcttttatcttcctattttatgaactccttacaaacatttatgctaactagtacccccaggtccttgagcttctcctacacatcctccttttcaatattaacactattcccttctcactgccaatcagttccacccacctagattgccctcaattcattgctgaattaggcctgc

SEQ ID NO: 74666 - DNA, 1125 bp, Homo sapiens
ttcaagttgagaaagactattttcacttcacactgtacagtattctatcattctatagtaaactattctttgtttttcttgtcagcattcaagttacagttactttttgaaacatattaggatattaaacccaagatgatatttcatggtgattgtttaactaatgtccaaacccatcatcaacaacaaagtatcagaagataaacagaacagcaacactctgtttttaaaagtaatttttgaaaggtaggaatcacttttttttgagatgaagtcttgctctgtcacccaggctggagtgcagaggcatgatctcggctcactgcaacctctgtctcctgggtttcaagcaattctcctgcctcagcctcccaagtggctgggattacaagcattcctggataatttttgcatttttagtagagacagggattcaccatgctggccaggctggtcttgaactcctgatctcaggtgatccacccaccttggcctcccaaagtgctgggattatagtcgtgagccaccgtgcccagtggcctttcagtataatggtttagcratctggattatagatgctagtaaacataaatgaatatcaaagcttactggataataagatagaaataggatctacaatcttcaaatgctgttaattcctctccaaaagatcaaaaaaaagtctaaagttgatttatttctgagtttattaattatattaaggaaataatagaacttttggaaactacgtgcaactttttaccaccaagtcattcggagactccatctagacttcatgcaacattaaaataatttgaaatattccaaggttcaaaattgtttttaaaaagtgtaattataagaagatttcattcataatgttcagcatatcttccttaaattgtcttccccattttattttctattcactcatgtaaaagtataacagttcttttatcttcctattttatgaactccttacaaacatttatgctaactagtacccccaggtccttgagcttctcctacacatcctccttttcaatattaacactattcccttctcactgccaatcagttccacccacctagattgccctcaattcattgctgaattaggcctgc

SEQ ID NO: 74667 - DNA, 1062 bp, Homo sapiens
aaaatagatgatcgaaattgatttgccccacattggtatctcagggatggaactgggcatagtcccagtgatggaccctgtctcttgataagttgatacctgtcaaacttaaatgtcctctatacccaatctttcccaattgataccaccacatgttagggtacggcttccagatccaagctatatcattgcctgatttcctgaggagttggctcataaattacatgttcataggacatgtattcctgttctggaatcaaataattataaagacttagaagattgattttaaagtataatcttagtcctctgagtttaggtcagaaaaagtccaaaacattcagtctaagtagctgtctattctcaccaaaaaaagacacactgtaaagrtcattcagggaaaagataatggaaaagaaaaaatgtaaaataaagttgaaaggcaaaataagaaaaaataaaataaaaccaacaggtagctgatgctagcactcaattgttcagatgtctaggcttgtcaattgactgttcacacaaaaatcagcatgaaggatgttacttagggctgatattgcctcatcaagtagtaccaggtcagcaatatctaatttttgcaccacatgagacagtcagaataatgtgtgagctgaatattttacagaagcttaatatgagtctaaatggaggtatacaacctaaggagttccactccctccctccagtgacagctctgtattagcccacaaaggcctgcccatgtacaaagatatgatttttttccagttccattttgtctatgccacatcagaaatggcatacatatcaaagtgccattaggaagtttgactgactgctttttggtgtggaaaactgtttaatataaagaaactaaccatctgctcaaaatactcagtttttttagccaatataatttagctcagcttgtccagcagtcaccagaatattcaaaacaaacctgcataaatttcacaacttctcccaaaacacggttataaatttttccattagctacatgtgcaaaaaggattgtgcatacacaca

SEQ ID NO: 74668 - DNA, 1926 bp, Homo sapiens
ttagctagcagagcaaagtaaacctaaacttaggttttctgttgaatgcaacataagaaattctaactggtagacctattgtgtacatagcaatgtcatatacatagtagacactgaagtcatttataacaatctaattaaaaattcttataataaatggatgactgatttgattgctagtgcagacttgccatctctgatgtgaggtttttaattttaactacaccttttccatctagggattaatgtatttctcctactaattctacttaagtagatatcaagaaataaaaggaaggtgctatttcataagaataattttctttggtaagactaaatatttaaaatatttgtctgcagtgagcgtagatcacgccactgcactccagcctgggtgacagagygagactccatctcaaaaaaaaaaaaaaaaaaattgtctgcattttctctttgaaaccaaaattgtctgcattttctctttgaaaccaaattttgcttgggttgccttgtaaatttcttttctagccagccacacttagaaactatgtattggtgtaaagggaaggaaggcattagtattagttaatgtactgccaaactgacagccattaagatcatttactctgctacacagtgtttatgtcaaatccatgggtgagactatgtcttttacaaccaaggtgagaactatcagatatagagtttgttattatgagtatccccaaaatattaggtatattttgtaatgttcatgctgaaatatacattttttctagtattattaaaatttgatgcattttggtaagatatggatcctactggctacttattatactgcatgacaattgctgggaaaaaaacaacactggaattgccatgtaaatggataagaaatcatatcactgcaaatataattatatagtttatctatgatacagtgcatagagctgtgtattataccttgggattgctaagtgagaagtgaaacacaccagtttttctatacgattttaatcataaatacacctaagtagataatcgaaaggacttacgtgttgcttttcaattttttttaaaaaagtaaggaaagtaggaaactttcagtgctactttgtatcactatctgtaatataacatatatgaaatgtagaaaagtattaataagataaataagcatatattcaggaattttgcttttagattttattcaaacaggtgatattacaatcaaatgttccaataaatttggtcaacttttataaaaattcaccacacacacacgtatacaggtacatatacacatgcagttctgtatttatacagaactaggaactgctactgctgaatttttgactcaaaatacagttttaaggtttttttaataccacttaagtattcaaattgtgtttatatatttatgcttactgttcattacagatagattggttggcttaaaaccctaagctatgatacaaattaaatatggcaacaagagtgacctcaaaccggttttgtattacatttaatgcaatctctctttaaccacttctataatactgtcaaaacagttcattccatttggagaattccagttatatttctgcaataaaattatctttcttgaaaattcccgaagtcatataagtaaaagactctttagcactggtatatcaataggctgatagcctccatatactgacccctacctagtttatttcttcacagcaggctatgacctgttaagctcaaaacccagccagttccaaactcaaattcacatccatttttgaaaaaatatatcccaaataagcagaattttagtcagtagcatccttctgtcttttcaagaaactacactcaacatctgctaccatagataataagtccaggcactataaagtccctcagctgctgctgcccttt

SEQ ID NO: 74669 - DNA, 693 bp, Homo sapiens
ttttgcaattgtaatatggatagtgagtgaatgaacttatctccttatctctcttctaaaattacatttctgaaaaacacaacrtctatgcttaattgggtcattggggactgttgccaattactaaaaaacctaatgtgattttgctcatcaattttcagtaaattatattggaatgtacaaggagaatcaagcagtatgtgaatttcatttgcattaaaacagcattttggggtagaagaatatatatattgaaaaatttacatttttctcaaagtaccaaatgaggaggtatggtgtagaattaataacttatagagtttaacaaggtgtctaaaaataagcttatatttcttcaaataataaagagatatcgataatttaaaaattttatattgtcttctagtgggctttcaaaagaaaatttttatccaaggtatgaaaatacagggcaggttaatcataggtgttcttgaagcttccagagccattaataaaggcaatagatttaatgtatatctcaaaatacccagtgagatgagactgtgtggaatataaataggtataatggttgtaaaactctcctgtcaccgattaaaaaaacatcatcatttttttcttaatgctagcttatttgatccagaactgtccattactataggtttgtttttacatttgttcttctagcattga

SEQ ID NO: 74670 - DNA, 693 bp, Homo sapiens
ttttgcaattgtaatatggatagtgagtgaatgaacttatctccttatctctcttctaaaattacatttctgaaaaacacaacgtctatgcttaattgggtcattggggactgttgccaattactaaaaaacctaatgtgattttgctcatcaattttcagtaaattatattggaatgtacaaggagaatcaagcagtatgtgaatttcatttgcattaaaacagcattttggggtagaagaatatatatattgaaaaatttacatttttctcaaagtaccaaatgaggaggtatggtgtagaattaataacttatagagtttaacaaggtgtctaaaaataagcttatatttcttcaaataataaagagatatcgataatttaaaaattttatattgtcttctagtgggctttcaaaakaaaatttttatccaaggtatgaaaatacagggcaggttaatcataggtgttcttgaagcttccagagccattaataaaggcaatagatttaatgtatatctcaaaatacccagtgagatgagactgtgtggaatataaataggtataatggttgtaaaactctcctgtcaccgattaaaaaaacatcatcatttttttcttaatgctagcttatttgatccagaactgtccattactataggtttgtttttacatttgttcttctagcattga

SEQ ID NO: 74671 - DNA, 693 bp, Homo sapiens
ttttgcaattgtaatatggatagtgagtgaatgaacttatctccttatctctcttctaaaattacatttctgaaaaacacaacgtctatgcttaattgggtcattggggactgttgccaattactaaaaaacctaatgtgattttgctcatcaattttcagtaaattatattggaatgtacaaggagaatcaagcagtatgtgaatttcatttgcattaaaacagcattttggggtagaagaatatatatattgaaaaatttacatttttctcaaagtaccaaatgaggaggtatggtgtagaattaataacttatagagtttaacaaggtgtctaaaaataagcttatatttcttcaaataataaagagatatcgataatttaaaaattttatattgtcttctagtgggctttcaaaagaaaatttttatccaaggtatgaaaatacagggcaggttaatcataggtgttcttgaagcttccagagccattaataaaggcaatagatttaatgtatatctcaaaatacccagtgagatgagactgtgtggaatataaataggtataatggttgtaaaactctcctgtcaccgattaaaaaawcatcatcatttttttcttaatgctagcttatttgatccagaactgtccattactataggtttgtttttacatttgttcttctagcattga

SEQ ID NO: 74672 - DNA, 593 bp, Homo sapiens
ccctccctcttccagctctgggggctccacgcccctgctgcggccgacgctccagtccctgcctctgtcctcacagggcctgctctgtgcatctgtctctattctgctctgctcttcatggagsaacaccagtgactgacttgggactcagcctcaatccagggtgacctcgtccccagatccttaattacatctgcaaagccctactaccagggaaggttgcattctgaggttctgggcggacatgaattttgggggcaggacactgtccagctcagtgccgggcgccgctgtgggccaggccctttgactcttgcaagcccacgatggctacagagctccaaggaggaggcttcctggaggaggcggcccagctcatcagagaaccagcatgtcttccccttgggttctgggaccagcacttttaacgataagtccttttggaccacgctgatccgggctgagacctgtcgcctgccgcgcgccttgggcggaggttagacaggccgcgcacctccaagctttgacacgtccttcctccaaagggtggaggccccacagggtgagtgcaggttggggatgggccgtggggt

SEQ ID NO: 74673 - DNA, 1507 bp, Homo sapiens
tgcatgactgtaatgtaccttacaggaccattgtgagaattaaatgagataatccacagagagcacttagtgctgtggctgggatgtagtcaacattttaataaatattagctattaattatttttaattttttgcccaggctattcagccctttcatcctttggatgctgcatgaagataacctatagtagttaattttgtcaacctgaactgggccatgggatgcccagatatttagttaaacattatttctgggtgtgtctgtgaggctgtttctgcaagagattaacatttgaattggtggactgagtaaagcagatggccctcctcagtgtggggagacctcacgttgttcttccggccctcatccaatctgttgaggcctgaatagaacaaaaaggcagaggaaagttgaattctagatctgcctgactgagctgggacccatcttctcctgtccttggtgctcctgtttctcatgcttttacactcggactggaatctacaccattgcctctccacctttcaggccttcaaactgtacccccagcttttctgggtctctagcttgtggactggatcatgggacttctctcagcctccatcattaggtgatctaattctttataacaattctctttatacatatatgggctgggtgcagtggctcacacactttgggaggccaaggcaggagaggccagaagtttgcaaccagcctgggcaacatagtgaaatataatccccactctactaaaaaaaacgaacaaacaaacaaaaacaacaacaacaacaacaaaaaatctctctctctgtctctatatatagtgagagagattgtgtgtacattatatctatatgtaatctctctctctctctctctctctctctctctctctctmtatatatatatatatatatatatatatatattctattgggtctgtttttctggagagccctgactaatgtgtggtttgcagccagtagcattggcataatctgggagcttattatgaatgcatactctcaggccctgcccctgtaatttaaacaagatctctaaatgagtcatatacatattagaacacacaattcccctactgtctatgaaaattccatgtttatagtgatgcttcatcaactagggaacagccacagtctcatactacatattaagaggaacatctgtcagttaaacaatgatcatttcagcaaagacagagagttcacatagatctagcctcgtttcaaatgatgaagttactaggaaataaattatagtattttaaggcctattcaagaactctcagagacattagactggagggccatatctttactctgagtacacttgcatacccaaaagtaagggaggtgcaggggaagagagacctaatcaggcacatttttatttgccttgctctcaaaaagagagcagcctacaaggaaactgggttgggagaggggtagggctaggagtacctaggagtcaaatatctcctg

SEQ ID NO: 74674 - DNA, 1197 bp, Homo sapiens
cagaagagaagtctcccaaggggcagccctaggctgcagtgacccaggcagaaatgatatagggaaggtgtccagaaacctccagcatggagccgccctgagcatttgttttgttaggatgggatgatccaattccatttggagagaaattatagttccatyctaattaattcaggcattacagcagttgatacggcagaaattaagagaatatttttcttgacatttgaagtgtgagctttgaagcagctaaatgaaggccttgtgaaccaagactaaatcagccacattaatttttttttaactttctttctttccagcgctgcaaatatttaagtcttggcaaaattcaaaactcacaactcactcttcactggtatctgagaaatataatactgaaaaggaaaaggacgaaaataatatggaatgaaatgcatgacatgtactgggaagcaaaataacttccaacgaaacttccatttatggcttagtcaaaaacatatggatatacaagctgaaaaacagagttagtgggaaagctaggtggctggttaaaaatacactttttgtggtaatgttacattattttttaaaagaaagtaacacccccccccgcaaaaaatcccctgctccaggatctttagacaattccttagtttgataaaagcaaaccatgtcaaaattgtattttttaagaaatgtttatattttattcagaaacattccaaagaaactggaaaagtgaggaaattaaaggtgggcacaaaaatgtatgtgtgtgcaagaaaatgtattgaaacatcatttataatgataaaaaatagaatcaacctatatgtctctcaatagaagaattggttaaataaattatggcattattggttaaataaattcacaaaaggactactgtgcagccattaacatgatgtgatggtttatgaacaaaagaagtatgtccaagtctattcataagttaaaaaaaaagaacatactgagaatctagtttgtagctatcagaatagtaaaggctataagtttaatcatagatattattggccagggtacggggaagaaaacacactttattggtaggggtgtcaattggtatacctttttggaaagaaatggaacaacagttttaaaaactttaaatgtacatactctttgatccaggaattccacttctgcaaaattatc

SEQ ID NO: 74675 - DNA, 785 bp, Homo sapiens
cttcctctttctccattcctgttgcctccaccctactgtgtgatgtgatcatttatttgtagactgcagcacactagcctctgacttcagtcctttgcacaccacagccaggctaatcttccttcatgatggctctcatcacccttttcctgctacagaactcttcttggtgtcctgtcctgtcagggctgatctcctgcctggttcctaaacctctagaatctgacagtgtgaccctgctcatcsagcctcacttcccttgcaacccatttgctgccacccacagctcctggcagtgcttgtaccccttccctggagcaccctcactcacctcttccctgaccctccatcagttcattctgccatggatttccttctaggtctcacctcctgcctgactacacagctcttagtgtccgctccacccctgaacccagtctacaggctgttggatttcattgttcctggcttcaaaaagcctgattaggtttaaactctttgggggtctaccattatacctagcactgagctgggtcccaaaggacattgttgagtactgggattagtaggtaggacgcttgcctaatattggactttttacttggtttcctcacccttaaatgaagaacttaaaggagataatggccaagtttccttttaatttgcttaaccaattacacttgcatatatattttattttttagagacaagttctcacttgtcacccagagtgtaatgcattggcacaatcatagctcactataacctcaaactcgtgggctcaa

SEQ ID NO: 74676 - DNA, 1095 bp, Homo sapiens
atattactgtcttcccacccatgctaattatgatgactctcctgtttttacaaatgaaggagtcacttgtctgtggactggctactagggcccaagtcctgtggaaaaaaaagagactgatttgtcttgttgcctgacgtatgcccagattctagaatggtgcttggcataaggaggccctaagtatatattattggtatgcgtgaataagctagtcactcccaagggctctaatactctcaagggactctagcactttaatacatcctgccacaaatcagacctgcaattccttcttccttgaatatatcgtgaaaatgcagaacacgtttagggatactgatctggatttgaagagactcaaatgatgaaatctacccggattcatgatggacatcgtttcttatgtatatctggtaccttgaaattccgtcagaacattctccaactctcccatacccatgggaaatgattataaaccagctacctggacacgctaattgtgggtgcatattgaacaatttcagaaaatgtgtaaaagcagggaagtttcagactaaaatgtttaatatcagatttgctctaaacattcaaattctggcaatactgggcacacagtcttgggtatcaattagctagctagctttaagaggctgtatccccagttagatggaatatttctctccagtttactactgtccctgccccttcttactgtcttcctgcagtgtaaagaagtatcagttgcaatttatcattgcaattgtgcaatctttcctaagattggaaatctctctttttttttaatcaagagaaacaatttcttagtttacatagtcatgtttcatagttcaggaacacaggtcagtgacaaamttctatgtaactcaacccaaagactttctttatattcccaaatcactttgtcctctgaaagataccagccttcctcatctcctcaaaatctttcatggaatcataatttctgcagaaatctgtgtatgccttctttcttggttcagccacagcaaacttaaagagagctacaacccccagggatacaacaaatactccaataatatgaaatcgcagatg

SEQ ID NO: 74677 - DNA, 1095 bp, Homo sapiens
atattactgtcttcccacccatgctaattatgatgactctcctgtttttacaaatgaaggagtcacttgtctgtggactggctactagggcccaagtcctgtggaaaaaaaagagactgatttgtcttgttgcctgacgtatgcccagattctagaatggtgcttggcataaggaggccctaagtatatattattggtatgcgtgaataagctagtcactcccaagggctctaatactctcaagggactctagcactttaatacatcctgccacaaatcagacctgcaattccttcttccttgaatatatcgtgaaaatgcagaacacgtttagggatactgatctggatttgaagagactcaaatgatgaaatctacccggattcatgatggacatcgtttcttatgtatatctggtaccttgaaattccgtcagaacattctccaactctcccatacccatgggaaatgattataaaccagctacctggacacgctaattgtgggtgcatattgaacaatttcagaaaatgtgtaaaagcagggaagtttcagactaaaatgtttaatatcagatttgctctaaacattcaaattctggcaatactgggcacacagtcttgggtatcaattagctagctagctttaagaggctgtatccccagttagatggaatatttctctccagtttactactgtccctgccccttcttactgtcttcctgcagtgtaaagaagtatcagttgcaatttatcattgcaattgtgcaatctttcctaagattggaaatctctctttttttttaatcaagagaaacaatttcttagtttacatagtcatgtttcatagttcaggaacacaggtcagtgacaaaattctatgtaactcaacccaaagactttctttatattcccaaatcactttgtcctctgaaagataccagccttcctcatctcctcaaaatctttcatggaatcrtaatttctgcagaaatctgtgtatgccttctttcttggttcagccacagcaaacttaaagagagctacaacccccagggatacaacaaatactccaataatatgaaatcgcagatg

SEQ ID NO: 74678 - DNA, 635 bp, Homo sapiens
ttctctactagggggtgccatgcttcgtctcaaccagtagcaaaaggcaacgatccccttgcccaaatatcacttggttaaggtaagcagctacttagacacagaatagtgcatttttcccagtggtgagaatattataaaagtaatattcataattcttttttattttttttgagacagagtctcactctgtcaccaggctggagtgcggtggcatgatctcaactcactgcaacatctgccttccgggttcaagcaattctcctgcctcagcctcccgagtagctgggactgcagatacacaccaccatgcccaggtaatttttgtattttcagtagagacagggtttcaacatgttggccaggatggtctcaatctcttgacctcgtgatctgcccgccttggcctcccaaggtgcygggatcgcaagcgtgagccaccgcacccagcccataattcttgatgaataatcaagagtagagatgccaaggaaagaaaaaaagaggaaaaaaacctagattcttcctaaggcatagacagggcattctaactgttttgcgggccagatcaaattatgatctggtaaaggattaagagtgaaataaccacataccattaaggggttcctctacag

SEQ ID NO: 74679 - DNA, 719 bp, Homo sapiens
ggtctgacagcaaatcctgctgactctaccttcaaaatatagccagtatctgaccccttcttgcttccactactattacaattstgatccaaaacaccttcatctctcctccagattattgcaatagcctaagggtcaacatgggcaaaatctgtcctatgaactgctttggtaaataaagttgtactggaacacagccctactcattagtttaccttgtctgtgactctttcatgctataatgtcagagtcagggagttgcaagagacctcacggactgaaaaaatatttaccatctcttctcttttacagaaaaagtttgctaacccctgtgatagcctatttaaattgcaagttgaataatattattgtcctgctcaaaactcactcagcgttaaagtcttctaaggccctgtgtgaactgaacttccccatccccgcctcccttcccgcccctgccccttgatctctctgatctcatctgctgctgttctcctctttctcactttgggctggccacactgaccactccccgatccccgatcttcctgtaaaaaccaggcatgctcctgttgcagggccttgcatgggccttcccctctgcctgaaacgatctctacattgacatctgcctggcttgcccaccctttactcactttatactcaaatgctatcatctagtgagctttctctgaccaccttatttaaaacagcacccc

SEQ ID NO: 74680 - DNA, 719 bp, Homo sapiens
ggtctgacagcaaatcctgctgactctaccttcaaaatatagccagtatctgaccccttcttgcttccactactattacaattctgatccaaaacaccttcatctctcctccagattattgcaatagcctaagggtcaacatgggcaaaatctgtcctatgaactgctttggtaaataaagttgtactggaacacagccctactcattagtttaccttgtctgtgactctttcatgctataatgtcagagtcagrgagttgcaagagacctcacggactgaaaaaatatttaccatctcttctcttttacagaaaaagtttgctaacccctgtgatagcctatttaaattgcaagttgaataatattattgtcctgctcaaaactcactcagcgttaaagtcttctaaggccctgtgtgaactgaacttccccatccccgcctcccttcccgcccctgccccttgatctctctgatctcatctgctgctgttctcctctttctcactttgggctggccacactgaccactccccgatccccgatcttcctgtaaaaaccaggcatgctcctgttgcagggccttgcatgggccttcccctctgcctgaaacgatctctacattgacatctgcctggcttgcccaccctttactcactttatactcaaatgctatcatctagtgagctttctctgaccaccttatttaaaacagcacccc

SEQ ID NO: 74681 - DNA, 719 bp, Homo sapiens
ggtctgacagcaaatcctgctgactctaccttcaaaatatagccagtatctgaccccttcttgcttccactactattacaattctgatccaaaacaccttcatctctcctccagattattgcaatagcctaagggtcaacatgggcaaaatctgtcctatgaactgctttggtaaataaagttgtactggaacacagccctactcattagtttaccttgtctgtgactctttcatgctataatgtcagagtcagggagttgcaagagacctcacggactgaaaaaatatttaccatctcttctcttttacagaaaaagtktgctaacccctgtgatagcctatttaaattgcaagttgaataatattattgtcctgctcaaaactcactcagcgttaaagtcttctaaggccctgtgtgaactgaacttccccatccccgcctcccttcccgcccctgccccttgatctctctgatctcatctgctgctgttctcctctttctcactttgggctggccacactgaccactccccgatccccgatcttcctgtaaaaaccaggcatgctcctgttgcagggccttgcatgggccttcccctctgcctgaaacgatctctacattgacatctgcctggcttgcccaccctttactcactttatactcaaatgctatcatctagtgagctttctctgaccaccttatttaaaacagcacccc

SEQ ID NO: 74682 - DNA, 778 bp, Homo sapiens
gtgtgggctccaatgtcacagtgcccaaggtccagatacctggtattcaggggctgggaattcaaagcttgcttcttcaactattatggagacagcttcaaatccaaaattagtggaccagatgtctaagagtccagaatgttgaaactgctttctgartatcattttgtgggaatagggtgggtggatatagtttttggtaacctaatttattaaagggcatagatatagcatgatgcttgggaataataatgttaataacctgattttcaatttatagcaaaccaacccctatgaaatattatacggcttggttttaggcttatatagtgttattttctcaggggggaaatgatattcataggatgtttagtaattataggcaattaacaagaaatttttaatttaatgtatttatttatttattgaaaaaatatttatttactacttatcacgtgtcaggcacagtacaagggcctgggaatagagcagtgaatcagaaagacatgattgctgctctcaagttttttatcattttatagagaaagtggcgaaaacaaacaaataaagaaacaaacaaacaaagaaaaaaggccaatttcaattctggcctaagcagtgttaagtagggaaatgtagggtccaaggagaacaaagaggagggtggtgtctgacagggtgacattcattctagcagagggaacagagaccaaagacaacatggaacatggacccaacatcacagatcaactccaaacaggacagtgtgatgggatcc

SEQ ID NO: 74683 - DNA, 456 bp, Homo sapiens
ccacaccctgcctggttgtgtactcttttaaatactaagtttttaatgttaaatgctgcttttagatacactgtaaaaatacacctatcaatgagtttttttattaaaaacattgcaattgtactagactttaaatactaagcaataattcaggcttcaatgttggtttatagttttctcatttctttcatttaatacctctgtaaaatgaagcagttacttccattttcctgaggtgagataagtgccctgcacaatgttataggcccagtaagtgagactggagctctgatctaatccctttgacattaaagtttgtgcagtaaaccagctatgtcagtttgccacatttgtratagtgttcaataaattttcacttaaaggtttaatattaaagtagtagcaagaattcataaccttaattggctttaacagcttttctttccctgaaaacag

SEQ ID NO: 74684 - DNA, 778 bp, Homo sapiens
actatgttccaggtactgttctaggcactgaggatgtggcggtgataaaagatgtttccagcttcttggtgtttattttcttcttgggggaggcagatgataaacaaatgcatatccaatataatgacaggtaataagtgttatgaagaaaaacaacgcagggaagagagaaagatcgacaggggacattgtactgtgaagtgtggcagggaaagcctctctgatgaggggccatctgagaagagagctgaaagaggtgaaggagcaagtgttttagatatcagggagcagaaactattgcatgtattgagggaaaagttttcccataaattaaataaacaagctagagtagctatttgtcaatttactcattcattcattcattcactaattktattcaaatatttacagggaacctgctatggtttgaatatttttcccctctaaaactcatgttgaaacttaatccgcaatgtggcagttttgagatgagaagcctttaagaagtgattggaccgagagtgctctgccatcaggagtagattaacttatttatgaattaatgggttaatggattaatgggtcatgagaggaactgatggctttataagaagtggaagagagacgtgggctggcatgttaacacacccaatcctcttgccatatgaggccctgtgccatcttgggacaccacagagattccctatcagcaaaaagactagatgcagtgccttgactttggacttctcagccctcaaagtaagaaagaaattccttt

SEQ ID NO: 74685 - DNA, 860 bp, Homo sapiens
gagtctcattctgttccccaagctggagtacagtggcgcaatctcggctcaccgcaacctccacctcctgggttcaagcgattctcctgcctctgcctcccaagtagctgggattacaggtgccctccagcacacccggctaatttttgtatttttagtagagacagggttctacctggtttggtcaggctggcctagaactcctgacctcaggtgatccacccacctcggcctccaaagtgctgggattacaggcgtgagcctgagcaacacctaattttttttgtatatttagtagagatggagtttccccatgttggtcagtctggtctcgaactcctgacctcaggtgatccatatgccttggcctcccaaagtgctggaattacaggtgtgagccaccacgcccagccttggggatatattaaaatatatacaaggtagtttgttttctgtctttttacaaatggtacactaatgaatacaatgtgtttttaagcatccttacaaactattaagcggtagtttgagaacagaaacaaggttacacataattttatcagaaaaggattgttttctaataatatagggtttagaggtttgaaaacctggaatatgaggtgtttctaaatttaaataaacagtttctccccatgaaacttacctccaaaactyattccaaagtttatactttttactgtaggcacatatcaaattataccctaattaggtctttacggtctacaatatgttctaaaataaaaatgttccattacttttctaaaatgacgggaatttgtagtttacacattatcatttgttaaataaataataagttccaaataattaccatgggatga

SEQ ID NO: 74686 - DNA, 624 bp, Homo sapiens
accaccagtcagataggactgtcttccccatgggaagtgtcctggtcccaaacccccagtgtttccctgacaagatgagagatttgacagaagtttttcttttaggagacctgatgggaatatgggcaggatggagagggctttactactcctcctaggtagaggtcctgtgtcttcctcagaggccactcctctctgcacatrgctgtgtaacaggaataatgcaggcctttctgatcacatctgccctcctgtaggttgacactgaggtggacattcacaggactatacccagtcaaattgaatgccattatctgggaaaaactttcaacttcttcaacctcctgagttattcacttttgtccaggtgggatttacttctctctgtgcttcaagcagctctgaaactttttcagagagaaaagtcaagtatggaaacctggtcagcagagaccctttattgtcggtgcagaaatgtggttctgggtggggaagtgctctgcaatgcacggagctccttaccagcatttaggcttaatagggcagtggaaacatgaaccaggattgagtatctacagaagcaaggcatttttagtttgttttgctctgagtgaggcctagagg

SEQ ID NO: 74687 - DNA, 1781 bp, Homo sapiens
tttaaaataggcatatgaacaaaaagtagacttggtcagcaaaacactgggaatttttgatggcgataggagactagaactaggagcaggaggattgaactttccttaggtcctttaaaaaaatttccatcctctactttcaggtgtacagcctgcctgcagctgatttgggggatatatcaaagccacctgtttcttcttcctttttctaccaatcagagcctaacactagtctagtcatcagtggaatgactatccatttttgaggtatacttggagaggaaagaaaggataagacctggttatctgtctgtgaggacatgggtcatttttcactactattggactggaaaatgtgctctgcggtgatagccacagatagttacttctctatcctcatctgtctcctaggacagctccccagatgatgtgagacttggtgatgattccactggtttctgccaggtggtacgcaccccattcccagtccgccagtcgccatcatccaatggctgcttccctttggctagttggtccccttctaagagtgactattgtggwtaaagggaatacgtgacgaagtatcagagagatcatgaagctgaaataccatagaaatttggtttgcctagaaaatatctcctaggcacaaattttttcttttgttagattattgtctttgcaacaagtgtagcatagaaagcagtggcttgtgttattttctctctgagccccaaaagccatttatgtatttcttgctaaccatttttgtgatggccaaattggacattgttgactttgtcatatcaatcagtgacttgaggcaacaactgtaagccaggtaggctctcttgcttctggaatgttcaaaatgtggataatgctaatattttccttgtgacttgttgcaaactgttatgcgtagctattagagtccttggtctcttctttggggagggtcaggagaggggtacagtggcaggtggcaaattagatgaccaatccttgttatgtttccttagcaataataaacttttgcatttgctccttcatggagatttctttatttattcattcattcaaagaggaacagattctctcaacatcccttctggcccttaaatttgatgattctgtgactcaaatatcagtcttctgtcaaaatcttagttgtacagctgggctaaatgaacctacctttgattgtgcatgaactcccatccatcttgaatttaggaaaaaaatgcttctctaacatgctccagagatactctaataaacctaatggcaaatcacctctcccacaggtcaaggacagcagcttaatgcaaagcttgagcactattgggatttagttgtgacaagattccactaatgctgctttggcaaaactttatttataaagcactgaaatggatggcctctgggttttatgccctagggatgggatacagcttgctatctttaaaaaaatttgagtagattgttactgattgggccaaagggacatagaactagtcatagaaaactaaaataaaagctaaatctattttgatgatatctatggcaggggaggagagtgagtgcaggaaaggagaggagtttcatttaacatttgcctccctgggcagtaaaaactaggtcaaatggttaaaacagctctgtacatctaatgtgctattagaccataccaagcagttttacaagatgtagtctacttatataggggtagctgtaatatataaattccaaattttggattcatggcctatggtgcatgc

SEQ ID NO: 74688 - DNA, 1781 bp, Homo sapiens
tttaaaataggcatatgaacaaaaagtagacttggtcagcaaaacactgggaatttttgatggcgataggagactagaactaggagcaggaggattgaactttccttaggtcctttaaaaaaatttccatcctctactttcaggtgtacagcctgcctgcagctgatttgggggatatatcaaagccacctgtttcttcttcctttttctaccaatcagagcctaacactagtctagtcatcagtggaatgactatccatttttgaggtatacttggagaggaaagaaaggataagacctggttatctgtctgtgaggacatgggtcatttttcactactattggactggaaaatgtgctctgcggtgatagccacagatagttacttctctatcctcatctgtctcctaggacagctccccagatgatgtgagacttggtgatgattccactggtttctgccaggtggtacgcaccccattcccagtccgccagtcgccatcatccaatggctgcttccctttggctagttggtccccttctaagagtgactattgtggataaagggaatacgtgacgaagtatcagagagatcatgaagctgaaataccatagaaatttggtttgcctagaaaatatctcctaggcacaaattttttcttttgttagattattgtctttgcaacaagtgtagcatagaaagcagtggcttgtgttattttctctctgagccccaaaagccatttatgtatttcttgctaaccatttttgtgatggccaaattggacattgttgactttgtcatatcaatcagtgacttgaggcmacaactgtaagccaggtaggctctcttgcttctggaatgttcaaaatgtggataatgctaatattttccttgtgacttgttgcaaactgttatgcgtagctattagagtccttggtctcttctttggggagggtcaggagaggggtacagtggcaggtggcaaattagatgaccaatccttgttatgtttccttagcaataataaacttttgcatttgctccttcatggagatttctttatttattcattcattcaaagaggaacagattctctcaacatcccttctggcccttaaatttgatgattctgtgactcaaatatcagtcttctgtcaaaatcttagttgtacagctgggctaaatgaacctacctttgattgtgcatgaactcccatccatcttgaatttaggaaaaaaatgcttctctaacatgctccagagatactctaataaacctaatggcaaatcacctctcccacaggtcaaggacagcagcttaatgcaaagcttgagcactattgggatttagttgtgacaagattccactaatgctgctttggcaaaactttatttataaagcactgaaatggatggcctctgggttttatgccctagggatgggatacagcttgctatctttaaaaaaatttgagtagattgttactgattgggccaaagggacatagaactagtcatagaaaactaaaataaaagctaaatctattttgatgatatctatggcaggggaggagagtgagtgcaggaaaggagaggagtttcatttaacatttgcctccctgggcagtaaaaactaggtcaaatggttaaaacagctctgtacatctaatgtgctattagaccataccaagcagttttacaagatgtagtctacttatataggggtagctgtaatatataaattccaaattttggattcatggcctatggtgcatgc

SEQ ID NO: 74689 - DNA, 1781 bp, Homo sapiens
tttaaaataggcatatgaacaaaaagtagacttggtcagcaaaacactgggaatttttgatggcgataggagactagaactaggagcaggaggattgaactttccttaggtcctttaaaaaaatttccatcctctactttcaggtgtacagcctgcctgcagctgatttgggggatatatcaaagccacctgtttcttcttcctttttctaccaatcagagcctaacactagtctagtcatcagtggaatgactatccatttttgaggtatacttggagaggaaagaaaggataagacctggttatctgtctgtgaggacatgggtcatttttcactactattggactggaaaatgtgctctgcggtgatagccacagatagttacttctctatcctcatctgtctcctaggacagctccccagatgatgtgagacttggtgatgattccactggtttctgccaggtggtacgcaccccattcccagtccgccagtcgccatcatccaatggctgcttccctttggctagttggtccccttctaagagtgactattgtggataaagggaatacgtgacgaagtatcagagagatcatgaagctgaaataccatagaaatttggtttgcctagaaaatatctcctaggcacaaattttttcttttgttagattattgtctttgcaacaagtgtagcatagaaagcagtggcttgtgttattttctctctgagccccaaaagccatttatgtatttcttgctaaccatttttgtgatggccaaattggacattgttgactttgtcatatcaatcagtgacttgaggcaacaactgtaagccaggtaggctctcttgcttctggaatgttcaaaatgtggataatgctaatattttccttgtgacttgttgcaaactgttatgcgtagctattagagtccttggtctcttctttggggagggtcaggagaggggtacagtggcaggtggcaaattagatgaccaatccttgttatgtttccttagcaataataaacttttgcatttgctccttcatggagatttctttatttattcattcattcaaagaggaacagattctctcaacatcccttctggcccttaaatttgatgattctgtgactcaaatatcagtcttctgtcaaaatcttagttgtacagctgggctaaatgaacctacctttgattgtgcatgaactcccatccatcttgaatttaggaaaaaaatgcttctctaacatgctccagagatactctaataaacctaatggcaaatcacctctcccacaggtcaaggacagcagcttaatgcaaagctygagcactattgggatttagttgtgacaagattccactaatgctgctttggcaaaactttatttataaagcactgaaatggatggcctctgggttttatgccctagggatgggatacagcttgctatctttaaaaaaatttgagtagattgttactgattgggccaaagggacatagaactagtcatagaaaactaaaataaaagctaaatctattttgatgatatctatggcaggggaggagagtgagtgcaggaaaggagaggagtttcatttaacatttgcctccctgggcagtaaaaactaggtcaaatggttaaaacagctctgtacatctaatgtgctattagaccataccaagcagttttacaagatgtagtctacttatataggggtagctgtaatatataaattccaaattttggattcatggcctatggtgcatgc

SEQ ID NO: 74690 - DNA, 1151 bp, Homo sapiens
tgcaaatattttctcccactctgtgtgttgtctgacgattatttcttttactgagcagaagctttttattttaattaggtcccaatcatttatgtttgcatttgcttttgggttcttggtcatgaattctttgactacaccaattagaagagttttcccgatgttatcttccagaatttttagggtttcaggccttagatttaagtctttgaaccatcttgagttgatttttatataaggtgagagatgaggaccagtttcattcttctacatgtggcttgctgttatcccagcaccatatgttgaataaggtgtcttttttccactttatgtttctgtagtaaaccagcttagtatatgaaattatctgatagaaataaaccgtcaaaraagagcagaaagattcagatataaagatatattttgcagaaatatttaacatagtaaaaactgaaagacacctaatatttttacttatgtagtaacttattatattttatatgacactatataaactgtgttttcaaagaataataattggcataagaaagtttatatgatgttaacaaaaatcgggtcacaaaatcatatatactatagggaggcatatacaccaaagtgtttaatgtttctctgattggtaagattatgtaattacgtgtgatcattatgttattctttatatctttcccatgttgtttttggaaatacacatagaattttcacagaaaaaaactaattaaaatttactaagaaacaggggtgaaaattagtaagtttcatgtcggcagcaacagagctaattttcagcaatgctaatcatggttagtggagttggtgacgagcattgattgtgattcttcaacaccccttccatatcagtttttagctcatttaaatgtcgctcctaagaaaggaatgttttactttgtttatatatctaaatcagatcctatgataggttctggcagatattggcctataagaaatgttataactaaataggagttaaataaataattgagtatagaaaatagagctgccctcagaaatacgtcttaaagacacaggatgtattccttgtgaattgaaataagatgtcaatgacacaatctgtgaaaccacattgtgtgtctatcaatttttctgtt

SEQ ID NO: 74691 - DNA, 1151 bp, Homo sapiens
tgcaaatattttctcccactctgtgtgttgtctgacgattatttcttttactgagcagaagctttttattttaattaggtcccaatcatttatgtttgcatttgcttttgggttcttggtcatgaattctttgactacaccaattagaagagttttcccgatgttatcttccagaatttttagggtttcaggccttagatttaagtctttgaaccatcttgagttgatttttatataaggtgagagatgaggaccagtttcattcttctacatgtggcttgctgttatcccagcaccatatgttgaataaggtgtcttttttccactttatgtttctgtagtaaaccagcttagtatatgaaattatctgatagaaataaaccgtcaaagaagagcagaaagattcagatataaagatatattttgcagaaatatttaacatagtaaaaactgaaagacacctaatatttttacttatgtagtaacttattatattttatatgacactatataaactgtgttttcaaagaataataattggcataagaaagtttataygatgttaacaaaaatcgggtcacaaaatcatatatactatagggaggcatatacaccaaagtgtttaatgtttctctgattggtaagattatgtaattacgtgtgatcattatgttattctttatatctttcccatgttgtttttggaaatacacatagaattttcacagaaaaaaactaattaaaatttactaagaaacaggggtgaaaattagtaagtttcatgtcggcagcaacagagctaattttcagcaatgctaatcatggttagtggagttggtgacgagcattgattgtgattcttcaacaccccttccatatcagtttttagctcatttaaatgtcgctcctaagaaaggaatgttttactttgtttatatatctaaatcagatcctatgataggttctggcagatattggcctataagaaatgttataactaaataggagttaaataaataattgagtatagaaaatagagctgccctcagaaatacgtcttaaagacacaggatgtattccttgtgaattgaaataagatgtcaatgacacaatctgtgaaaccacattgtgtgtctatcaatttttctgtt

SEQ ID NO: 74692 - DNA, 1151 bp, Homo sapiens
tgcaaatattttctcccactctgtgtgttgtctgacgattatttcttttactgagcagaagctttttattttaattaggtcccaatcatttatgtttgcatttgcttttgggttcttggtcatgaattctttgactacaccaattagaagagttttcccgatgttatcttccagaatttttagggtttcaggccttagatttaagtctttgaaccatcttgagttgatttttatataaggtgagagatgaggaccagtttcattcttctacatgtggcttgctgttatcccagcaccatatgttgaataaggtgtcttttttccactttatgtttctgtagtaaaccagcttagtatatgaaattatctgatagaaataaaccgtcaaagaagagcagaaagattcagatataaagatatattttgcagaaatatttaacatagtaaaaactgaaagacacctaatatttttacttatgtagtaacttattatattttatatgacactatataaactgtgttttcaaagaataataattggcataagaaagtttatatgatgttaacaaaaatcgggtcacaaaatcatatatactatagggaggcatatacaccaaagtgtttaatgtttctctgattggtaagattatgtaattacgtgtgatcattatgttattctttatatctttcccatgttgtttttggaaatacacatagaattttcacagaaaaaaactaattaaaatttactaagaaacaggggtgaaaattagtaagtttcatgtcggcagcaacagagctaattttcagcaatgctaatcatggttagtggagttggtgacgagcattgattgtgattcttcaayaccccttccatatcagtttttagctcatttaaatgtcgctcctaagaaaggaatgttttactttgtttatatatctaaatcagatcctatgataggttctggcagatattggcctataagaaatgttataactaaataggagttaaataaataattgagtatagaaaatagagctgccctcagaaatacgtcttaaagacacaggatgtattccttgtgaattgaaataagatgtcaatgacacaatctgtgaaaccacattgtgtgtctatcaatttttctgtt

SEQ ID NO: 74693 - DNA, 220 bp, Homo sapiens
ctattaaatttttgttaaattttytaattcgttactcccaacataaaagccagggtttgaagtgagggtttccaatgtaaaatttcacatcctttttgttttatcatgttacctctctcaaataacaatggagaatgcagaccaaatatgcagaaaattataattaaaagcagaagtttacacaaaaactcttcaatgggaaattctctgatgaattttt

SEQ ID NO: 74694 - DNA, 584 bp, Homo sapiens
gcagtttggtgagataagcaaatatctctgcaaaggttcaacatgaagtgctctttaagatttttgcacacaggaagaccaagaatgtatcaacaagggccctgaaatcagaaacccacaactggtatgaaagaaacgaagcagggcattttcagcaaaccaaagaagctccaagaaacagaaacaataagagaggggaagagttgagactgagatagcatagccaatattccttggccatgaaaatgaagagatttttaacagatccttacttagataggcatgaagatggaaaattgaactctgctgactgatatttatggttgttctatagtaaatatagtccccatggtaactgaatactaaaattcatatagttctctcattccagagagtaggtttaaaccttcaacaaatccttctatgatttttaaaacatcctgagttaaaaatcacatcctsgtactgtaattgatagaaatttgaatggactataaacctgactattacagttaagactctggtgtcctgagtaggcaaaaccaggcaagatgctctcttcatcttttggatgaataaagaaa

SEQ ID NO: 74695 - DNA, 777 bp, Homo sapiens
ctagaccttttgtagaaactgagtttctaggatggtgccttggaatctgcactttttcaaagcttccccagtgatttttataaaagttaaagttcaagaactgctgctccaaggaatgaatgaaggactgtagctggagaggttctttctgctccttagagtctggcctcagagcaaggggcatcttctgctcgtgagaccattcaaggatgttctctggggattctgtgccttataggtagtcagggctggaagttgtttcggtcttggatttgaaggcaaccacaaagccctcaccccaacaggcggtctccaggagccacgtattttatcaggattgcgtcctttgtgcctagacatggccctcttttaaaagtagtcactcctaggcatggcttggcaataaacaatgaccagttatttctacctgagtgtaaaccagggctccataccccagctgtcagtgatggcccgcagagagcagacatggataggaatgggaatgtgtattccaggacatgtggccaagatggcttacaagtcttctgggaaaggggaagcgtgacagctgtgacaacattagggcttgggaggagagcaggggagaaagaaggcagagagtagccagaggtcaaagaggttactgggagagtcgggttcttcttcacagctttktctgcatcctgatctactttagactggatgtctttaggacacaatgagcaagtgcagtctccctgtccttctcccactgcaaccagctcacagcacggatcc

SEQ ID NO: 74696 - DNA, 751 bp, Homo sapiens
  misc_feature (1)...(751): n = A,T,C or G
ttcaacaatctgcattacaatgtgtaagtacttgcctaaacaatttaraagttatagagaagaatcacctatgaatctcacccatatgactggttcggtatcctgaactgctgagcttcgcttgatatgcttcaagaaaaacaaaccacagacacacgcacattatcgtcatcatctattgcccttgggaatctatcttggatcaacttctcaaacctgctcattccatctggccaagcttctgttgcagatttatccctttggtacccttcttttctgtaactgctaccctgttaataggagtttagattgctttcgactggtctgttttcctggaatacatggctccattctacccatgcctaatgccagctgcagttcccaagaccaatgaagggcaaagctgttggctccctgcttatttatgactagagatggttaggtattctcctcaaggaaaatgtagtggaatagagattagtactgtaagactgcatgacatatcagccagagtatatatatgtgaatatacattntgatgtatacattagaagtgggctactagtagcataaatatgaatattataatataatttatagatacatgatacatatgtatcacagataccaatcaatctgcctgtgttccctctagatgatgggggccactttttttcaagganaaagactgtattccccatattcacccaaggtaaatgggtgccccatatttcccctttccattaatagt

SEQ ID NO: 74697 - DNA, 571 bp, Homo sapiens
ccagtctctgtagatccaggacctagcatggtttaggatctacaatcattgaaatacaaggcttaggagtcagacccttctgggcttgaatttagactctgccacttagcatgtgtgacagtgacaatttacttattccttggagcctcagtgccctcatctggaaaatggggttaataacaatatccatcctacaggtttaatctggtgattaaatgagataacatttctcttaatgtctggccaattttcgtcaattatttttattattrtttcctccatacattcaacagatacatttctcaaggccctagtatgtgccaaccacaacctgttagggaataagcctgaaatgattggaactcagggtgaatcccaggggcattctaaaaatgttttcttcaacctaataaagttgaccttccatatacacaaattatgtatgattcgaccaaccacaggtcaaaaatatttggaaaatagcaataaaaaataatacaataataaaaaatgcaaataaaaacaatgcagtatcactatttacatagcatttacattgtattaggcatta

SEQ ID NO: 74698 - DNA, 571 bp, Homo sapiens
ccagtctctgtagatccaggacctagcatggtttaggatctacaatcattgaaatacaaggcttaggagtcagacccttctgggcttgaatttagactctgccacttagcatgtgtgacagtgacaatttacttattccttggagcctcagtgccctcatctggaaaatggggttaataacaatatccatcctacaggtttaatctggtgattaaatgagataacatttctcttaatgtctggccaattttcgtcaattatttttattattgtttcctccatacattcaacagatacatttctcaaggccctagtatgtgccarccacaacctgttagggaataagcctgaaatgattggaactcagggtgaatcccaggggcattctaaaaatgttttcttcaacctaataaagttgaccttccatatacacaaattatgtatgattcgaccaaccacaggtcaaaaatatttggaaaatagcaataaaaaataatacaataataaaaaatgcaaataaaaacaatgcagtatcactatttacatagcatttacattgtattaggcatta

SEQ ID NO: 74699 - DNA, 571 bp, Homo sapiens
ccagtctctgtagatccaggacctagcatggtttaggatctacaatcattgaaatacaaggcttaggagtcagacccttctgggcttgaatttagactctgccacttagcatgtgtgacagtgacaatttacttattccttggagcctcagtgccctcatctggaaaatggggttaataacaatatccatcctacaggtttaatctggtgattaaatgagataacatttctcttaatgtctggccaattttcgtcaattatttttattattgtttcctccatacattcaacagatacatttctcaaggccctagtatgtgccaaccacaacctgttagggaataagcctgaaatgattggaactcagggtgaatcccaggggcattctaaaaatgttttcttcaacctaataaagttgaccttccatatacacaaattatgtatgattcgaccaaccacrggtcaaaaatatttggaaaatagcaataaaaaataatacaataataaaaaatgcaaataaaaacaatgcagtatcactatttacatagcatttacattgtattaggcatta

SEQ ID NO: 74700 - DNA, 1305 bp, Homo sapiens
tattcccagagattctaacaggctgtatatgtagcccagaaatctgaattttaataacactttcaggatacaggtgatgccttgattacatgttgagaaacactgatctatacaacctcagaagataataagtaagggggctayattatctgtaacctttgggatatattatctgtaaattccattttttaaaagtccactttgcattttacaaataagtaaacaagatattacactgatttttgtcaacagatatcaataactgaatttcaacttagctagctgacattatgtctagttcaactttgagataccaaagagaatcgccagcacatttacgtgatggtttgaccttgataaaatactatatagtacagacagcgtgtcccagaataagacaacttgttctagctaagacaggagacacctgagcagagaaagaaattgatttgttttcttatcaacaaaatctggaattttgtcccattttatttgtacctaaaacataatcatcaaaacttcactgaatctgtcaaatattagacaaagatacacttgacctggagtgaagtatcacgaatttttaaacatttaactcctagtgtgtattagtgtgaaactaagttgagcagaacccattaatgtcacagtgatcggttaccaatggaaataaataattcatgatgaagggaattagtctaattagcaggcagtttgagtcctttgataaaacccagctctaattccgtgaagggcaggaagtgctgtcatcagtcagccctgaaaagattagcatctattatgaatgaggttcgacaccctagcgaagtcatgtgtgtcctggagacaaacttaatatgttccagaatgggacacagtttgtctcaccaacacatcacggttcctaccaagctattgtatgtaataacaagcaaagatcagcgctctgtcctatcattcgctcccctgtccatcattctgacaactgtgcaaatacattttccatgcaaagcagggaatgtgccctgaatacttgtaaaattgcacaagatgtcaaagaaaatatgtgttactttctcactcaccaaaacaaacacacagaaccaaatgtcagtcctgaaactgacggtttcaaacatggtgggcaatatagtatgtcaggcttggtgtatacacatttcattttaaaaactgttgtcagctctcccaggaaatttgctttcctacttatctttctccagatattgaagttacaagatcaatcataggcttccagcttctgtaactgcagatacatggcgatga

SEQ ID NO: 74701 - DNA, 733 bp, Homo sapiens
cttttttcctttattccctcttcctgattcacttgttaaatacctactgtatgctgagcatttttattgttcctagggtttcaaagatttggcacgttccttcgtacacaagttgctggaagataccaatattcaaatacaaaccataagctagaatgtagtatgataacacagattcatgcacagaatcctctgcaaagaggagtaaataagtagcattttgagggttgtggtggaagaattggggaaaactgcgtataggagactttgmcgtataagtaaaataataacagattttcaagacaggaaaaaaagacaaggcgagaagggatattcatgacaaagagaattcagaagcaaattcacagaggcataaattaggttatatatttagaatagcacaattgccccctatacattatggtcggagcacagaaaagaatggaaaaaaaaatagtctaggcagagtgcacagagctaagtcacgaagatcatgacgattgtgtataacaaacaaatgagtgattggataactctatacaacatcttcacaaatggagtcacggggaggaactaagctcagattcagcacatgcaaacacgtacatgcacagggataggtgagtgcttttctactttaatatgaatttgaatattaattggagcattctttcttgatattggacagttcttcctattatatctgttccaaaataatccatttatattacaa

SEQ ID NO: 74702 - DNA, 733 bp, Homo sapiens
cttttttcctttattccctcttcctgattcacttgttaaatacctactgtatgctgagcatttttattgttcctagggtttcaaagatttggcacgttccttcgtacacaagttgctggaagataccaatattcaaatacaaaccataagctagaatgtagtatgataacacagattcatgcacagaatcctctgcaaagaggagtaaataagtagcattttgagggttgtggtggaagaattggggaaaactgcgtataggagactttgccgtataagtaaaataataacagattttcaagacaggaaaaaaagacaaggcgagaarggatattcatgacaaagagaattcagaagcaaattcacagaggcataaattaggttatatatttagaatagcacaattgccccctatacattatggtcggagcacagaaaagaatggaaaaaaaaatagtctaggcagagtgcacagagctaagtcacgaagatcatgacgattgtgtataacaaacaaatgagtgattggataactctatacaacatcttcacaaatggagtcacggggaggaactaagctcagattcagcacatgcaaacacgtacatgcacagggataggtgagtgcttttctactttaatatgaatttgaatattaattggagcattctttcttgatattggacagttcttcctattatatctgttccaaaataatccatttatattacaa

SEQ ID NO: 74703 - DNA, 675 bp, Homo sapiens
aaagtgttgagcaacatcattcagagggccagggaggagtgcttggatctctccgtgatggggatctcattacactatgacccggccatgcctgacccactagcctgttgggtatgcttgttctctagtgacgatgctttacatttgtgaaggctttacattgtgaaggggcaaggtttccaaaagtcctcctatgtatcccttgtgtcttctttctgcctatgcatgtagcccttcagctgttccttaagaggcagcagtgtccaggctacagtccctccaccccactcccctgctttggatgttccctgccggtcaatgtttccttagcacgtgaccttgacaaatacatgtctagttgcaatgtgacctgcttcaagtaaataaacaataagaaccacactaactggacccttctatatgccagatgttgtgtgctttagtcttcacttgattcccaattagataagcggggagctcctgtgaagtaacctgctcaggatcacacagtcagggagatcggtcttggrttgagagtggtacgctaatgttgtctcctatagccaatacatttctctctgtatctcctgtagtttatactttatataaatggctgctgtgttatttgaagcataaatattcataactgttatatcttcattataaattaagact

SEQ ID NO: 74704 - DNA, 1047 bp, Homo sapiens
  misc_feature (1)...(1047): n = A,T,C or G
aacttaggatatttttgatttccagtggatttattgggacatagccacatcataagtctagaaacatctgtcttagaaacttgaaggctttgtaatcttcaaatatatcttaatgaaatttaagtayctttgaaaaaataatactttagtgaatattcatctacatccaattatttttcatggtattagacaaggagagccatagcaaaaaaaaagggataataataaattatattttgtgagagttgatagggtggagattcattcttttgctgaatatcttaaaaattcctgtataaaatcaagcttcttagcagagcacacagaaccattcataggctgataattctctggcttcattcctttccttcccattcagtcttaaattctaggcaaattgaatactgacttggtactttccaaatctggcatatattctcacatctgtgtgactttttcaccttttgttcctttttttttttattttaaaagaattttttagagacaggctctcactcttttacccaggtgggagtgtagtggcaccatcctagctcactgccgcctgacctcctgggctcgagtgatcctccagtcacagcctgaagagtagcaggccccataggcangcaccaccatatgtacaggtatatatgtaaacccctcctcccacatataatatatatatttaatgtggatatgatatcttgctattttttccatacttcgtatattgtgaacacagttcgtgtttgattattttttctttgtcgttgcaaacctaatcattttggaagtttaattcaggcttatcgcttctataaagcctctcttaatcaatgtctgaatcatttaggtcaagttagatgtcctcttccttggcaataacccatttgcacttaattgctttgcatcgtagtttcctcatttataaaatgggggtatcgacagtgcctactaggagtgttgtaaggattaatacatgtaaagtgtttcaaagggttcctgaaaaataaatgttattttgtatgttatttttattgtagt

SEQ ID NO: 74705 - DNA, 1047 bp, Homo sapiens
  misc_feature (1)...(1047): n = A,T,C or G
aacttaggatatttttgatttccagtggatttattgggacatagccacatcataagtctagaaacatctgtcttagaaacttgaaggctttgtaatcttcaaatatatcttaatgaaatttaagtatctttgaaaaaataatactttagtgaatattcatctacatccaattatttttcatggtattagacaaggagagccatagcaaaaaaaaagggataataataaattatattttgtgagagttgatagggtggagattcattcttttgctgaatatcttaaaaattcctgtataaaatcaagcttcttagcagagcacacagaaccattcataggctgataattctctggcttcattcctttccttcccattcagtcttaaattctaggcaaattgaatactgacttggtactttccaaatctggcatatattctcacatctgtgtgactttttcaccttttgttcctttttttttttattttaaaagaattttttagagacaggctctcactcttttacccaggtgggagtgtagtggcaccatcctagctcactgccgcctgacctcctgggctcgagtgatcctccagtcacagcctgaagagtagcaggccccataggcangcaccaccatatgtacaggtatatatgtaaacccctcctcccacatataatatatatatttaatgtggatatgatatcttgctattttttccatacttcgtatattgtgaacacagttcgtgtttgattattttttctttgtcgttgcaaacctaatcattttggaagtttaattcaggcttatcgcttctataaagcctctcttaatcaatgtctgaatcatttaggtcaagttagatgtcctcttccttggcaataayccatttgcacttaattgctttgcatcgtagtttcctcatttataaaatgggggtatcgacagtgcctactaggagtgttgtaaggattaatacatgtaaagtgtttcaaagggttcctgaaaaataaatgttattttgtatgttatttttattgtagt

SEQ ID NO: 74706 - DNA, 568 bp, Homo sapiens
tgggtcacccaggtgggcccaatgcaatcacctgtccttataaggaagagaggcgagagaaagaaagagagagaacagagaacagagaaggccgacagcaccaggaggtctcagcccggtttttctggctttggggatggaggacgggccacggaacagggcggcctctgcctagcagctggaaaaggtaagggactaggttctcccaacgaacctccggaaagaaacgcagccctgccagcagcttcatttcagctcagtgagacctctttttacyctttgacctccaggactgtaagatcataaacgtgtgttgttggaagccagcaagtttgtggtaatttgtcacagcagtcgtgggcccactaagacacctgtcgtgggcctcgtgtccagaggcctcagctgaaatgcactgggggcctggtggtgtgtgttaggtccacttggcttgctgtgttgttcaagtcctctcatttcctttcttatcttctgtctggttgttctttccattattgaaagtgggggactgaggtctccgacgattattgtagaactacttttccct

SEQ ID NO: 74707 - DNA, 1419 bp, Homo sapiens
ggaggtgaagaggcggccacatgaccctggactggccggcgtggtggggtcggcacgcaggtcttgactgcagcaagttctatgtgtttgtgcacaatcagccagatagcctctcctctggggaaccagttcattccaagccaagagtagatgagtgggccctgtgccagggagacaaatgactggtgacaccgtggtgtttcactgaagctctgctgggggacccatcacagcctctgcctgagctgctggctttcaagtgccctggggcygagccctgggaatatccttgtttatctgcagttgctggcatggctcctcttcccctttctctattcctccctctcttctctggggagcaagcggcccacccccacccctgtaccactgggtcctgaatgtccaaaaagccaaggaggttctggcctcaactcagcctctccttgaggcaaatcacctcacttgggagtgggggttcttcaactttacacatcccggttacccagggggcatggtgagcatcggatgaaaaactgggagggggaacttgaatgctgcttctgaacgcgtatccggggtgagagctcatctccctcctggatcctgtcttcctgcaccaaattgccaaggccaatgctttgccccttgggtaggccagtccaccccccttcctgtccacccaccccagatgccaagtctgtggtggggtggcccatgctggggcatgagaagtttgggggatgaggaggagaaccatatccaccagggaggacccggggtgaggaaaagatgagacaggatgacactcaggagaggccgcctttcaggagatggacctcagaacgatggcttttccttgataactctagaccttgagctacactggcctctctctgagcctgcgccagccacagggatgtgaaggttgagatattccatacgtggttggctgacaggtagctgagtacagccattgtagagggggatctcgctctgcttagtgacattgatacctgtatcattccagtgctagacattttgttcctgggcatatgtcccaaagacttgcacacaaagcgaccgagaagtgatttaccacagtattgtttggggacagtggagttagaggctggcatccatcactggggaatgggtgagtaaaatgagattgtcacatggatgacccacagccacaaacagggtggacacccatcactgtggctacagccttaaaaatagcgtgagtgagaaaagtaagaagcaggacaaaatctctaacactgcatcatttgtaggaacctgaaaatacatacctatcaatcaacttgtcaggtttctcaagtgtgcggagaaaaagaaagataaacattaaatgcaacagtagggatgaatgtgcaaaggtgggagtggagaattggg

SEQ ID NO: 74708 - DNA, 589 bp, Homo sapiens
atatattcatgtaaaaattgtatccaaaacaggaaaataacaaataattggcataagttgcatgtatgtttggattattgctaagctttttctgttgctgtcgaaatggagctgtggctgtatgtctcagaagagtgtctataatcagccaggtttcccaccgtaaaacaattggtttggattctcttctttgattggattgacttttaaagtataaagtgtcagttatttgatgcctcatgcaacctatgtaagcttaaaaaagtttttgtggctaaggtaagtagttacttcttaaggtaacactgasttagtaagatgatacttaacagacttaaaatgttgtgttttcattatatccactaaataaatatagcattctaattattaaattttaaaatagagatatttcaccatcagtgattcttataatttgaggacttgcattactttccttctgttttagtaaataatttgttttaaagttatcttgaagttgtttggtagaaacaatcacaattgtaagaagtggagcaaacgtcactttaaacaacacaaacatgttaatgactgtaaagcaaatattgga

SEQ ID NO: 74709 - DNA, 668 bp, Homo sapiens
tgcatgcagaaggaaactcctaaaaaggagctgagaagaaggggatggagaaataggaggcagaaaagtgagattggtgaggagtccatcgtagtcaggagttaaataacattctcaagcttctgtcttggaggcttcatttttgttcccccaaccaagattaagaataagcgggggaggaaggggacatggatgggatgtagaaaattagtgctttgttttggactcatcaagctccaggtttgtgagacatacaaatagagccatgaatatttggatccccagataaaatgaatcttggtcctatagtaaaaaatatggcgaaatatacccttgatttaaaaatattttgttgggaccttaccatgacattctttacattgtctggaatatcgyatctatctctattgtcacatttcttaagttatcttgagtaaaactacaatccctctcacataaatagatacacatactaacaaacaaacaaccaaaacacactcctggtgaagcacagaaaatgtttttctttgtagaagctgaaatcaggaacttggggtctgacagatccaggtttgagtaccagctctgccacttacatacagagtgaccttgggcaagtcagtccctccagtccaggctagtaatattcaatattacagggtgtttgt

SEQ ID NO: 74710 - DNA, 1360 bp, Homo sapiens
  misc_feature (1)...(1360): n = A,T,C or G
atgtccctacaaaggacatgatctcatccttttttatggctgcatagtattccatggtgtatatgtgccacattttcttaatccagtcaatcattgttggacatttgggttggttcccagtctttgctattgtgaatagtgccacaataaacacatatgtgcatgtgcctttatagcagcatgatttataatcctttgggtatatacccagtaatgggatcactgggtcaaatggtatttctggttctagatccttgaacaatcgccacattgacttccacaatgactgaactagtttacagtcccaccaacagtgtaaaagtgttcctatttctccacatcctctccagcatctgttgtttcctaactttttaatgattgccattctaactggtgtgagatggtatctcattgtggttttgatttgcatttctctgatggccagtgctgatgcacttaaacaagttgaagaaatataaaagggattggttggaaggatgctgggacatttcaaagaactgaagcgcaaaccaaacaaataaactcataaacatctgaaaccagagcagtctttgggacttcagagaaaagagctgaatagttagccatgattatccactttttgtacatattttgactctttctttgtcagcatttaaaaattcccccaagtgtatttctccataatgctaaaatcacaactagagtttatgtaagtttagcaaactcagttcaaactattagaatgaaatttctgcttggcatggattgaattacatactgaaaactgtgtctgttaatgaagtnnnnnnnnnnnnnnnnnnnnnnnnnnnnnnnnnnnnnnnnnnnnnnnnnnnnnnnnnnnnnnnnnnnnnnnnnnnnnnnnnnnnnnnnnnnnnnnnnnnntaaataaataagatctcctacatgataattacaattaataaacaatgaatcttattctcctataaggcaaataataaacttaacagattaatgtaggtataaaatgtacctaatcgattgaaaaattacacatttcaaagcccagggtgtgtggaacacttgataaaaactgctggtttagaaggattctgtgctagcattcttgccattaatccctattccgtccattttaataacattaagtagtttgaaaaaaagagctataagcctttatgtttatttgaactatyataggactcagatatctccctgattctactttggtcagtcaaataaatttgagtcatttgtagtcactttgggggagtattatttttgttgaaaataaagttttaaaaaagttaaggtcatgtatagtttatgtaatgttcaacttagagaaattgaaatatgc

SEQ ID NO: 74711 - DNA, 1206 bp, Homo sapiens
tgtctaacaatgatgtaagaggggttctgcattagccagttctcttatcctattcttcagagattttcttttaagttttacattattaatgataaaaagaatacaaatccctggctgcccagattgctaaatcttactttaaataccacctagatactttgaaatctcaagtgtcttatgattaatatcattttcttttacagtaaattaagaagttgatactgatccattctgcttcattctgccccaggttcccaccttgtgatccaacaatcttgccttaaataaaattatgtttacccctactaaattggctacaactaaatatgtagagaaaaaagtcattttcttataggcctattgtctatcaattttatgtaactgagacagcatttcctctgattcattccaatacttaagacctttaatttccattttaaaacaaaatgaaaataaagtgctgcccttaaaaaagtgttttctaaattgttattaaatgggaatagtacaatatccacatcacatgacacctgaacatcacagaaaatggcagtttggaagctcaagaagttgttccctctactgagacaactattgagctagcaagaactgtgaagtaacaattctggaattttagagtataattgaatacttgcaggatgccagggattgcttgatgaggaacactcagaaatatcaatgaattttgagcttcctattctggctaccataccccatctccagccctatggagatgtcaggccacactgtagtgtgacacrctggtgtcagggtgagaaaaggaatttatcctccaagagtcgaggttttgaattttgattgctgctattgattgtgaagatgctgatacagatgcagaccactagtttttcatatgggttgaaggagtcattggcaggagggaatttaaagagacagacactcttatttaaatttttctttttcttacttgataagtatttaaagaaatcaggttatttgctgactgaggacacagcacaactgaggcttcagtggaccacacacaagagaagcatagcctttccaaaagtggtttggaaaactcactaaacaaattgacaatttgagcattcatcagttaacaacagtgatcctaggagagggggaaaattctgatgtccaatgttaccacattacaatattcaaaatgttcagttctcaata

SEQ ID NO: 74712 - DNA, 1206 bp, Homo sapiens
tgtctaacaatgatgtaagaggggttctgcattagccagttctcttatcctattcttcagagattttcttttaagttttacattattaatgataaaaagaatacaaatccctggctgcccagattgctaaatcttactttaaataccacctagatactttgaaatctcaagtgtcttatgattaatatcattttcttttacagtaaattaagaagttgatactgatccattctgcttcattctgccccaggttcccaccttgtgatccaacaatcttgccttaaataaaattatgtttacccctactaaattggctacaactaaatatgtagagaaaaaagtcattttcttataggcctattgtctatcaattttatgtaactgagacagcatttcctctgattcattccaatacttaagacctttaatttccattttaaaacaaaatgaaaataaagtgctgcccttaaaaaagtgttttctaaattgttattaaatgggaatagtacaatatccacatcacatgacacctgaacatcacagaaaatggcagtttggaagctcaagaagttgttccctctactgagacaactattgagctagcaagaactgtgaagtaacaattctggaattttagagtataattgaatacttgcaggatgccagggattgcttgatgaggaacactcagaaatatcaatgaattttgagcttcctattctggctaccataccccatctccagccctatggagatgtcaggccacactgtagtgtgacacactggtgtcagggtgagaaaaggaatttatcctccaagagtcgaggttttgaattttgattgctgctattgattstgaagatgctgatacagatgcagaccactagtttttcatatgggttgaaggagtcattggcaggagggaatttaaagagacagacactcttatttaaatttttctttttcttacttgataagtatttaaagaaatcaggttatttgctgactgaggacacagcacaactgaggcttcagtggaccacacacaagagaagcatagcctttccaaaagtggtttggaaaactcactaaacaaattgacaatttgagcattcatcagttaacaacagtgatcctaggagagggggaaaattctgatgtccaatgttaccacattacaatattcaaaatgttcagttctcaata

SEQ ID NO: 74713 - DNA, 1206 bp, Homo sapiens
tgtctaacaatgatgtaagaggggttctgcattagccagttctcttatcctattcttcagagattttcttttaagttttacattattaatgataaaaagaatacaaatccctggctgcccagattgctaaatcttactttaaataccacctagatactttgaaatctcaagtgtcttatgattaatatcattttcttttacagtaaattaagaagttgatactgatccattctgcttcattctgccccaggttcccaccttgtgatccaacaatcttgccttaaataaaattatgtttacccctactaaattggctacaactaaatatgtagagaaaaaagtcattttcttataggcctattgtctatcaattttatgtaactgagacagcatttcctctgattcattccaatacttaagacctttaatttccattttaaaacaaaatgaaaataaagtgctgcccttaaaaaagtgttttctaaattgttattaaatgggaatagtacaatatccacatcacatgacacctgaacatcacagaaaatggcagtttggaagctcaagaagttgttccctctactgagacaactattgagctagcaagaactgtgaagtaacaattctggaattttagagtataattgaatacttgcaggatgccagggattgcttgatgaggaacactcagaaatatcaatgaattttgagcttcctattctggctaccataccccatctccagccctatggagatgtcaggccacactgtagtgtgacacactggtgtcagggtgagaaaaggaatttatcctccaagagtcgaggttttgaattttgattgctgctattgattgtgaagatgctgatacagatgcagaccactagtttttcatatgggttgaaggagtcattggcaggagggaatttaaagagacaracactcttatttaaatttttctttttcttacttgataagtatttaaagaaatcaggttatttgctgactgaggacacagcacaactgaggcttcagtggaccacacacaagagaagcatagcctttccaaaagtggtttggaaaactcactaaacaaattgacaatttgagcattcatcagttaacaacagtgatcctaggagagggggaaaattctgatgtccaatgttaccacattacaatattcaaaatgttcagttctcaata

SEQ ID NO: 74714 - DNA, 1206 bp, Homo sapiens
tgtctaacaatgatgtaagaggggttctgcattagccagttctcttatcctattcttcagagattttcttttaagttttacattattaatgataaaaagaatacaaatccctggctgcccagattgctaaatcttactttaaataccacctagatactttgaaatctcaagtgtcttatgattaatatcattttcttttacagtaaattaagaagttgatactgatccattctgcttcattctgccccaggttcccaccttgtgatccaacaatcttgccttaaataaaattatgtttacccctactaaattggctacaactaaatatgtagagaaaaaagtcattttcttataggcctattgtctatcaattttatgtaactgagacagcatttcctctgattcattccaatacttaagacctttaatttccattttaaaacaaaatgaaaataaagtgctgcccttaaaaaagtgttttctaaattgttattaaatgggaatagtacaatatccacatcacatgacacctgaacatcacagaaaatggcagtttggaagctcaagaagttgttccctctactgagacaactattgagctagcaagaactgtgaagtaacaattctggaattttagagtataattgaatacttgcaggatgccagggattgcttgatgaggaacactcagaaatatcaatgaattttgagcttcctattctggctaccataccccatctccagccctatggagatgtcaggccacactgtagtgtgacacactggtgtcagggtgagaaaaggaatttatcctccaagagtcgaggttttgaattttgattgctgctattgattgtgaagatgctgatacagatgcagaccactagtttttcatatgggttgaaggagtcattggcaggagggaatttaaagagacagacactcttatttaaatttttctttttcttacttgataagtatttaaagaaatcaggttatttgctgactgaggacacagcacaactgaggcttcagtggaccacacacaagagaagcatagcctttccaaaagtggtttggaaaactcactaawcaaattgacaatttgagcattcatcagttaacaacagtgatcctaggagagggggaaaattctgatgtccaatgttaccacattacaatattcaaaatgttcagttctcaata

SEQ ID NO: 74715 - DNA, 522 bp, Homo sapiens
actctaataaatactaatattttgtaaatgcacatttatatcactgggtatttttgtgctgacatcagaaactaggctttttcccctgctgtttctgtgcatataatacaatttcttaaaaatatgtacttaagaatgactgaaattctgtgtttgattttttaacaaaagtgtgcaaatccaatcatctaaacttacctaggaaaattattagraagcacataagtgcctgctaaactatatactagttaattctcagacatgcgtgatcttcactactcagttatttgttgaaaataacaagattgttctgtactccttatctattgataatattggaatatgattttcatgcttctttgtcagtttggagtattttctgttacattatttaccagaaatgagaaaagtgggtattgaaatttaatgtaaaaatctcttacttccatttcaaataccttcatttgtttaaatagaaggtgtgttgaggtttccaaaagtcctattgaaaattacttccat

SEQ ID NO: 74716 - DNA, 522 bp, Homo sapiens
actctaataaatactaatattttgtaaatgcacatttatatcactgggtatttttgtgctgacatcagaaactaggctttttcccctgctgtttctgtgcatataatacaatttcttaaaaatatgtacttaagaatgactgaaattctgtgtttgattttttaacaaaagtgtgcaaatccaatcatctaaacttacctaggaaaattattaggaagcacataagtgcctgctaaactatatactagttaattctcagacatgcgtgatcttcactactcagttatttgttgaaaataacaagattgttctgtactccttatctattgataatattggaatatgattttcatgcttctttgtcagtttggagtattttctgttacattatttaccagaaatgagaaaagtgggtattgaaatttaatgtaaaaatctcttacttccatttcaaataccttcatttgtttaaatmgaaggtgtgttgaggtttccaaaagtcctattgaaaattacttccat

SEQ ID NO: 74717 - DNA, 3051 bp, Homo sapiens
tttcaaaacaggaaagcatatctatatctgagaagcaataaaaaaatggcaggcaaatatgagcttagatagctatataacctaaacaaatatattctgtcaaaaaatagtagtaatatcaaattgttggatcatgataatgcrcaggcctataatgaggatgaatatcaaagcattccaatatattttattgtcagatataaaatttgattgttttctgaagttaaatagattatagtaaaatttcaaagaaaacaccaaaaaattgaaaaagatcatatacattcacaaattatcatagaaaataaaggaagaataaatttatcatttagaaagaatattaaacgagagaagaaatgatatattagagcatatttttaacaggacatttttaccaaaaaaagagaaattttaccaaattttccaggaataaatgcacaaaccttacaaagcatagtaaaatggagaacacttatctagttttagcaggcattttactaacactagacaagaaacaaatgtaataagaatactatatgacaggtgcaacaaaccacaatggcacacgtttacctatgtaactaacctacacgtcctgcccatgtatctcataacttaaaataaaattttaaaaataaaaataaattttaaaaggaaagaataagacacctagaaataaaatgaaactatacaacaactcacacgcatgaacatggatacaacgtatttaagcaatgaattggaaaactgaaccaggctatgttttaaaatctaaaagatcatagctaaattagttttatcccttgggggagggtttggattaatatgttaaaaaccattaatgttaccctttcgtaaagtgattaaagataaaatatgatcaagtgaataagaataaataaaattaatatacctcatagaaattttatataccaaatgtcatgaacaaaatttataccaggattgtttgtaatatcaagaaacttaaaacatccttaatgtcctgaaatggaagtatgcataaagaaattatatatctaaacattaaatttaattgcaggagtataaatgatgagccacaatcatgcaaatcaaaatggaccaatctcagaaatatacgtggcttagcaacaacactgcaaaaaagaaaaatgtatccagtatggtatcaattgcatgaagatcaagattatataaaattaagaaaatatatattgatttaacaagactaccgttgatcctcattatttttaaaagtcagtatttgcaagtttgcctatttgttaaaatttgttttctacagtcatttgcagacatgaccagaacaaaaaaatatttgagagaaactgaggcacatgttcctaactgaggtttaggaagggcaggatcttcttgtctcagctttcatacaaagatgaccggaggttgcaaacagtagtgcaatgcagtgtagagtaaaaagctccagctctggggcctgttggaagggtttgaatcccaactttggtgcctgttagtggggcagcttcaggcaagtcccttaatacttctggacattgttagcttttttgtaaaatagggaaaatgatgagtcatttttactgtttaagatcataatccatgtgagattgtgtgtgtgtgtgtgtgtgtgtgtgcgtgtgtacccacatacatatttcccccagaagcattggtcagtattctgtaatcagtgttcaacctgacttcatggaacataaataccaggaataatgagaatcaactactaatgataaaatactgaatgaatagtaattctttctggaataagtaagagtgggaaaaaagagtcatgcaattggaaagtggcaagaggaatttaacagtgttgtaatgatctactggataatgcagatattggatcctcaattactcatttttgtcattgttttactgtatatggcatataacgtttatataacaaaaatcacgtgtataagatattccataacagtaaaatttttttaaaagatgtcttcctttttaatgctagaatcagccaaccatgtcccatgggtgtctgcacaactaaacgtgctcatgcttcatttagtgtagggacagtcaaactgtgacacatcagccagatctacctattgcctgttttagtaaagttgtattggaacacagccaacccgtgcatttttgtatttcctatggttgcttttctgctacaacagtagaattgtttagttccaacatagtctgcaaggcctaaaatactatctggccctttattgaaaaagtttgctgactactggtttaatgtaaattcttgaagtcatgaccatctgggctatggagaaatatcaaaataaaagatttttctcttcataatagaatggtggaagattctgagacatgcatgaaacagctggtgtggggggctgcgtcaatgtgccagcaaacagaacaaaaaataacacaatgagataatgcacatgtattaactcatagagtcttcatgatctttatataagtcaatcgcccatgttcacagatgttggttctagcagatccagggttccatagagtctgacttcctatgtagaatcagccatattcatcagtagcataatctattggaaggtgactctcatgatgagttgtatgctttgagaatgacacagcttctgtaaattgaattcttttggggagtgaaggagacaagacacatttatcttgtgcagaaaaatacagattcaatggaatcaaacattggaaataaaagaggaatgtgagcttcttggccattcatggaggttttggtttctcaccgtatgtaacatggggatttgatatttagtacttaaatattaaaaagcacagtgatatggcatagtagggcttgaagtcacaaaattggctagtatttgatttattttttatgaatataataagctctgtttagtttagcaattagtccatttacaaaaaaccaaaatgtcatggtggcactgtatcttatttttgcttacttttctttaaaactggcagcaaaataatctttac

SEQ ID NO: 74718 - DNA, 3051 bp, Homo sapiens
tttcaaaacaggaaagcatatctatatctgagaagcaataaaaaaatggcaggcaaatatgagcttagatagctatataacctaaacaaatatattctgtcaaaaaatagtagtaatatcaaattgttggatcatgataatgcgcaggcctataatgaggatgaatatcaaagcattccaatatattttattgtcagatataaaatttgattgttttctgaagttaaatagattatagtaaaatttcaaagaaaacaccaaaaaattgaaaaagatcatatacattcacaaattatcatagaaaataaaggaagaataaatttatcatttagaaagaatattaaacgagagaagaaatgatatattagagcatatttttaacaggacwtttttaccaaaaaaagagaaattttaccaaattttccaggaataaatgcacaaaccttacaaagcatagtaaaatggagaacacttatctagttttagcaggcattttactaacactagacaagaaacaaatgtaataagaatactatatgacaggtgcaacaaaccacaatggcacacgtttacctatgtaactaacctacacgtcctgcccatgtatctcataacttaaaataaaattttaaaaataaaaataaattttaaaaggaaagaataagacacctagaaataaaatgaaactatacaacaactcacacgcatgaacatggatacaacgtatttaagcaatgaattggaaaactgaaccaggctatgttttaaaatctaaaagatcatagctaaattagttttatcccttgggggagggtttggattaatatgttaaaaaccattaatgttaccctttcgtaaagtgattaaagataaaatatgatcaagtgaataagaataaataaaattaatatacctcatagaaattttatataccaaatgtcatgaacaaaatttataccaggattgtttgtaatatcaagaaacttaaaacatccttaatgtcctgaaatggaagtatgcataaagaaattatatatctaaacattaaatttaattgcaggagtataaatgatgagccacaatcatgcaaatcaaaatggaccaatctcagaaatatacgtggcttagcaacaacactgcaaaaaagaaaaatgtatccagtatggtatcaattgcatgaagatcaagattatataaaattaagaaaatatatattgatttaacaagactaccgttgatcctcattatttttaaaagtcagtatttgcaagtttgcctatttgttaaaatttgttttctacagtcatttgcagacatgaccagaacaaaaaaatatttgagagaaactgaggcacatgttcctaactgaggtttaggaagggcaggatcttcttgtctcagctttcatacaaagatgaccggaggttgcaaacagtagtgcaatgcagtgtagagtaaaaagctccagctctggggcctgttggaagggtttgaatcccaactttggtgcctgttagtggggcagcttcaggcaagtcccttaatacttctggacattgttagcttttttgtaaaatagggaaaatgatgagtcatttttactgtttaagatcataatccatgtgagattgtgtgtgtgtgtgtgtgtgtgtgtgcgtgtgtacccacatacatatttcccccagaagcattggtcagtattctgtaatcagtgttcaacctgacttcatggaacataaataccaggaataatgagaatcaactactaatgataaaatactgaatgaatagtaattctttctggaataagtaagagtgggaaaaaagagtcatgcaattggaaagtggcaagaggaatttaacagtgttgtaatgatctactggataatgcagatattggatcctcaattactcatttttgtcattgttttactgtatatggcatataacgtttatataacaaaaatcacgtgtataagatattccataacagtaaaatttttttaaaagatgtcttcctttttaatgctagaatcagccaaccatgtcccatgggtgtctgcacaactaaacgtgctcatgcttcatttagtgtagggacagtcaaactgtgacacatcagccagatctacctattgcctgttttagtaaagttgtattggaacacagccaacccgtgcatttttgtatttcctatggttgcttttctgctacaacagtagaattgtttagttccaacatagtctgcaaggcctaaaatactatctggccctttattgaaaaagtttgctgactactggtttaatgtaaattcttgaagtcatgaccatctgggctatggagaaatatcaaaataaaagatttttctcttcataatagaatggtggaagattctgagacatgcatgaaacagctggtgtggggggctgcgtcaatgtgccagcaaacagaacaaaaaataacacaatgagataatgcacatgtattaactcatagagtcttcatgatctttatataagtcaatcgcccatgttcacagatgttggttctagcagatccagggttccatagagtctgacttcctatgtagaatcagccatattcatcagtagcataatctattggaaggtgactctcatgatgagttgtatgctttgagaatgacacagcttctgtaaattgaattcttttggggagtgaaggagacaagacacatttatcttgtgcagaaaaatacagattcaatggaatcaaacattggaaataaaagaggaatgtgagcttcttggccattcatggaggttttggtttctcaccgtatgtaacatggggatttgatatttagtacttaaatattaaaaagcacagtgatatggcatagtagggcttgaagtcacaaaattggctagtatttgatttattttttatgaatataataagctctgtttagtttagcaattagtccatttacaaaaaaccaaaatgtcatggtggcactgtatcttatttttgcttacttttctttaaaactggcagcaaaataatctttac

SEQ ID NO: 74719 - DNA, 3051 bp, Homo sapiens
tttcaaaacaggaaagcatatctatatctgagaagcaataaaaaaatggcaggcaaatatgagcttagatagctatataacctaaacaaatatattctgtcaaaaaatagtagtaatatcaaattgttggatcatgataatgcgcaggcctataatgaggatgaatatcaaagcattccaatatattttattgtcagatataaaatttgattgttttctgaagttaaatagattatagtaaaatttcaaagaaaacaccaaaaaattgaaaaagatcatatacattcacaaattatcatagaaaataaaggaagaataaatttatcatttagaaagaatattaaacgagagaagaaatgatatattagagcatatttttaacaggacatttttaccaaaaaaagagaaattttaccaaattttccaggaataaatgcacaaaccttacaaagcatagtaaaatggagaacacttatctagttttagcaggcattttactaacactagacaagaaacaaatgtaataagaatactatatgacaggtgcaacaaaccacaatggcacacgtttacctatgtaactaacctayacgtcctgcccatgtatctcataacttaaaataaaattttaaaaataaaaataaattttaaaaggaaagaataagacacctagaaataaaatgaaactatacaacaactcacacgcatgaacatggatacaacgtatttaagcaatgaattggaaaactgaaccaggctatgttttaaaatctaaaagatcatagctaaattagttttatcccttgggggagggtttggattaatatgttaaaaaccattaatgttaccctttcgtaaagtgattaaagataaaatatgatcaagtgaataagaataaataaaattaatatacctcatagaaattttatataccaaatgtcatgaacaaaatttataccaggattgtttgtaatatcaagaaacttaaaacatccttaatgtcctgaaatggaagtatgcataaagaaattatatatctaaacattaaatttaattgcaggagtataaatgatgagccacaatcatgcaaatcaaaatggaccaatctcagaaatatacgtggcttagcaacaacactgcaaaaaagaaaaatgtatccagtatggtatcaattgcatgaagatcaagattatataaaattaagaaaatatatattgatttaacaagactaccgttgatcctcattatttttaaaagtcagtatttgcaagtttgcctatttgttaaaatttgttttctacagtcatttgcagacatgaccagaacaaaaaaatatttgagagaaactgaggcacatgttcctaactgaggtttaggaagggcaggatcttcttgtctcagctttcatacaaagatgaccggaggttgcaaacagtagtgcaatgcagtgtagagtaaaaagctccagctctggggcctgttggaagggtttgaatcccaactttggtgcctgttagtggggcagcttcaggcaagtcccttaatacttctggacattgttagcttttttgtaaaatagggaaaatgatgagtcatttttactgtttaagatcataatccatgtgagattgtgtgtgtgtgtgtgtgtgtgtgtgcgtgtgtacccacatacatatttcccccagaagcattggtcagtattctgtaatcagtgttcaacctgacttcatggaacataaataccaggaataatgagaatcaactactaatgataaaatactgaatgaatagtaattctttctggaataagtaagagtgggaaaaaagagtcatgcaattggaaagtggcaagaggaatttaacagtgttgtaatgatctactggataatgcagatattggatcctcaattactcatttttgtcattgttttactgtatatggcatataacgtttatataacaaaaatcacgtgtataagatattccataacagtaaaatttttttaaaagatgtcttcctttttaatgctagaatcagccaaccatgtcccatgggtgtctgcacaactaaacgtgctcatgcttcatttagtgtagggacagtcaaactgtgacacatcagccagatctacctattgcctgttttagtaaagttgtattggaacacagccaacccgtgcatttttgtatttcctatggttgcttttctgctacaacagtagaattgtttagttccaacatagtctgcaaggcctaaaatactatctggccctttattgaaaaagtttgctgactactggtttaatgtaaattcttgaagtcatgaccatctgggctatggagaaatatcaaaataaaagatttttctcttcataatagaatggtggaagattctgagacatgcatgaaacagctggtgtggggggctgcgtcaatgtgccagcaaacagaacaaaaaataacacaatgagataatgcacatgtattaactcatagagtcttcatgatctttatataagtcaatcgcccatgttcacagatgttggttctagcagatccagggttccatagagtctgacttcctatgtagaatcagccatattcatcagtagcataatctattggaaggtgactctcatgatgagttgtatgctttgagaatgacacagcttctgtaaattgaattcttttggggagtgaaggagacaagacacatttatcttgtgcagaaaaatacagattcaatggaatcaaacattggaaataaaagaggaatgtgagcttcttggccattcatggaggttttggtttctcaccgtatgtaacatggggatttgatatttagtacttaaatattaaaaagcacagtgatatggcatagtagggcttgaagtcacaaaattggctagtatttgatttattttttatgaatataataagctctgtttagtttagcaattagtccatttacaaaaaaccaaaatgtcatggtggcactgtatcttatttttgcttacttttctttaaaactggcagcaaaataatctttac

SEQ ID NO: 74720 - DNA, 3051 bp, Homo sapiens
tttcaaaacaggaaagcatatctatatctgagaagcaataaaaaaatggcaggcaaatatgagcttagatagctatataacctaaacaaatatattctgtcaaaaaatagtagtaatatcaaattgttggatcatgataatgcgcaggcctataatgaggatgaatatcaaagcattccaatatattttattgtcagatataaaatttgattgttttctgaagttaaatagattatagtaaaatttcaaagaaaacaccaaaaaattgaaaaagatcatatacattcacaaattatcatagaaaataaaggaagaataaatttatcatttagaaagaatattaaacgagagaagaaatgatatattagagcatatttttaacaggacatttttaccaaaaaaagagaaattttaccaaattttccaggaataaatgcacaaaccttacaaagcatagtaaaatggagaacacttatctagttttagcaggcattttactaacactagacaagaaacaaatgtaataagaatactatatgacaggtgcaacaaaccacaatggcacacgtttacctatgtaactaacctacacgtcctgcccatgtatctcataacttaaaataaaattttaaaaataaaaataaattttaaaaggaaagaataagacacctagaaataaaatgaaactatacaacaactcacacgcatgaacatggatacaacgtatttaagcaatgaattggaaaaytgaaccaggctatgttttaaaatctaaaagatcatagctaaattagttttatcccttgggggagggtttggattaatatgttaaaaaccattaatgttaccctttcgtaaagtgattaaagataaaatatgatcaagtgaataagaataaataaaattaatatacctcatagaaattttatataccaaatgtcatgaacaaaatttataccaggattgtttgtaatatcaagaaacttaaaacatccttaatgtcctgaaatggaagtatgcataaagaaattatatatctaaacattaaatttaattgcaggagtataaatgatgagccacaatcatgcaaatcaaaatggaccaatctcagaaatatacgtggcttagcaacaacactgcaaaaaagaaaaatgtatccagtatggtatcaattgcatgaagatcaagattatataaaattaagaaaatatatattgatttaacaagactaccgttgatcctcattatttttaaaagtcagtatttgcaagtttgcctatttgttaaaatttgttttctacagtcatttgcagacatgaccagaacaaaaaaatatttgagagaaactgaggcacatgttcctaactgaggtttaggaagggcaggatcttcttgtctcagctttcatacaaagatgaccggaggttgcaaacagtagtgcaatgcagtgtagagtaaaaagctccagctctggggcctgttggaagggtttgaatcccaactttggtgcctgttagtggggcagcttcaggcaagtcccttaatacttctggacattgttagcttttttgtaaaatagggaaaatgatgagtcatttttactgtttaagatcataatccatgtgagattgtgtgtgtgtgtgtgtgtgtgtgtgcgtgtgtacccacatacatatttcccccagaagcattggtcagtattctgtaatcagtgttcaacctgacttcatggaacataaataccaggaataatgagaatcaactactaatgataaaatactgaatgaatagtaattctttctggaataagtaagagtgggaaaaaagagtcatgcaattggaaagtggcaagaggaatttaacagtgttgtaatgatctactggataatgcagatattggatcctcaattactcatttttgtcattgttttactgtatatggcatataacgtttatataacaaaaatcacgtgtataagatattccataacagtaaaatttttttaaaagatgtcttcctttttaatgctagaatcagccaaccatgtcccatgggtgtctgcacaactaaacgtgctcatgcttcatttagtgtagggacagtcaaactgtgacacatcagccagatctacctattgcctgttttagtaaagttgtattggaacacagccaacccgtgcatttttgtatttcctatggttgcttttctgctacaacagtagaattgtttagttccaacatagtctgcaaggcctaaaatactatctggccctttattgaaaaagtttgctgactactggtttaatgtaaattcttgaagtcatgaccatctgggctatggagaaatatcaaaataaaagatttttctcttcataatagaatggtggaagattctgagacatgcatgaaacagctggtgtggggggctgcgtcaatgtgccagcaaacagaacaaaaaataacacaatgagataatgcacatgtattaactcatagagtcttcatgatctttatataagtcaatcgcccatgttcacagatgttggttctagcagatccagggttccatagagtctgacttcctatgtagaatcagccatattcatcagtagcataatctattggaaggtgactctcatgatgagttgtatgctttgagaatgacacagcttctgtaaattgaattcttttggggagtgaaggagacaagacacatttatcttgtgcagaaaaatacagattcaatggaatcaaacattggaaataaaagaggaatgtgagcttcttggccattcatggaggttttggtttctcaccgtatgtaacatggggatttgatatttagtacttaaatattaaaaagcacagtgatatggcatagtagggcttgaagtcacaaaattggctagtatttgatttattttttatgaatataataagctctgtttagtttagcaattagtccatttacaaaaaaccaaaatgtcatggtggcactgtatcttatttttgcttacttttctttaaaactggcagcaaaataatctttac

SEQ ID NO: 74721 - DNA, 936 bp, Homo sapiens
aaaaaacacttcaagtcccattgttcggtacatcttcaagttcttttaaaggtgcatgagcctgtcttcctcaggtatgaacatattgtagaacctcagattcagaccatgtaccccatgtacagctgagacaccagtgcttggagatagagaaaggtttattcagtttggccagagtgagagggtgtgagagcaagtctttcaagtctgtcttcaaaaagagatgaagcagaaagtttttatgcagctagggagtaagagagggagagcttcagggaaccgaggggaagagcctgtgtttcttcagtctcagccctttgagcaatcagacttctgggtgtcagcggctgctcacaatgtctttaaaggcattcattccttttgcaaaatttttgtgtcaccctgaagttatctcctgtttgacaaagaaacagtacatcggctatttattatactgcaggaacaagggatgtggagcaaaagcaagcaattaatgtgtgtaagcaggcaagggtctaattcagatttttcattatttctgtcactaaaaatgctggacactgaaatctcaaggggcccggttacagatacttctccagtgaactagaaagcatgtttctgtccccacggagcactagacaatggtagaacagggacagtatccctgcagcaaatactcccgttggtccaatgcaactctaaagcaccccagggcaggaagtgtgggggtgccctggcctgcaaagggtgaactgatcttaattcctctcctgggkaagaagtctcagttccactcttcaaatgtctgtgttcccttggtctctggctttggtttggagagtcttccttttccatgctcttcctcaactatatgtgaaggagatgctgggatgagctccctccggagggaaagggtgcagtgggttaggtggtcat

SEQ ID NO: 74722 - DNA, 962 bp, Homo sapiens
  misc_feature (1)...(962): n = A,T,C or G
tgcattgcctgaacaacgtgctggacaaaacagaaaagaaaagtaccactaaatcacctgaatgttattccagtgacataagagcaaggcaggccagtgaattgggtatgtgtgtgagagaggggtgaccactgagttttggatttctaatggagattcctgactctcaacacatcttaggcataaatataagggataatctctgatatggtttggctgtatccccacccaaatctcatcttgagttgttgctcccataattctcacttgtcatgggagggacccagtgagagataattgaatcatgggggtgggtctttcctgtgctgttctcatgatagtgaataagtctcatgaaatctgatggttttataaatgggagttcccctgcacacrctctcttgcctaccgccatgtaagacgtgactttactccttctttgcctcctgccatgattgtgaggcctccccagccatgtggaaccatgagttcattaagcctctttcctttataaattaccagtctgaagtatgtctttattggcagtcagagaacagactaatacaatctgcttgaagaccaaagctagaggtgagtagtcctgcccatgcctggcctcggtagtgtcttgcttctgaatggagccctatctttcagcacactcatcccacagaactagtcactcattctgattctgacaggacaaaggtagaaaggaacaaaaaggtaggaggaaggattgggcatcttgtcataacatatttattttctttcttctgattatgttggatcaaacttgcttttctgtttctagctttataaagtagacactaaagtcattgatttgagatgtttcttcttctttttttaaatacatatggtgagtgctataaatntccctcaagtcattacatgaactacctcttgcaatgtataatattctacattttaaattttattca

SEQ ID NO: 74723 - DNA, 693 bp, Homo sapiens
tttttaataacattacaacaagaatctaaaagaaataaattatttctgaatatgacgattaaatacattttgtatagctatcatttcaaatcctatgaaarggatttaaaagtaatttttaaacattatttaaatttgtttaaatatagtaattttattgctttggatatcgaaagaagttgttaagctaatacttgatttttctccatacaactgatagaaaagcagctgtggagttttttgtttccatcataattctggtttaattccatttttaacacatgataacagcaaatatcttttaatgcccctgttttttcttgcctcaaagatattaagcacaaccaaactgctagtctgaaaatatttttcaatgacgttttaacctctgtgttatcatttgtgttacattgttctagttagaatgactgataaattattttttaaaaaatcccagttgaaaaaatctcatctttaccatgagcgtaacttagtgagaaagcaaataatgaaacagttcaatgaatgagtgctgattcaattgatatgtatgggcaaataagtattatggacattaaaaattgtacatttactttacattttttactatttattcagtaaaaatggagggtgagacctatgggtatacggggcacatttatggggatgtggagggcgtgcatttacttgaat

SEQ ID NO: 74724 - DNA, 693 bp, Homo sapiens
tttttaataacattacaacaagaatctaaaagaaataaattatttctgaatatgacgattaaatacattttgtatagctatcatttcaaatcctatgaaaaggatttaaaagtaatttttaaacattatttaaatttgtttaaatatagtaattttattgctttggatatcgaaagaagttgttaagctaatacttgatttttctccatacaactgatagaaaagcagctgtggagttttttgtttmcatcataattctggtttaattccatttttaacacatgataacagcaaatatcttttaatgcccctgttttttcttgcctcaaagatattaagcacaaccaaactgctagtctgaaaatatttttcaatgacgttttaacctctgtgttatcatttgtgttacattgttctagttagaatgactgataaattattttttaaaaaatcccagttgaaaaaatctcatctttaccatgagcgtaacttagtgagaaagcaaataatgaaacagttcaatgaatgagtgctgattcaattgatatgtatgggcaaataagtattatggacattaaaaattgtacatttactttacattttttactatttattcagtaaaaatggagggtgagacctatgggtatacggggcacatttatggggatgtggagggcgtgcatttacttgaat

SEQ ID NO: 74725 - DNA, 678 bp, Homo sapiens
taacttgtcctgtaagcaagagagtcatcaaaccttacacgaaccctcaagacaaatgtgctagaagatcctgactaaactgtctgggtagtctgagagcagcacyattttatcgtaggattcctgagattttcggttcaaacctgagagtgccccttgggaagggaaaccccagcacacacaggcctctgatgttagcccggctcagtgcccacaagcacatctccatctcaagggcctttgccccacgagggccagggtgaagtctccttgtttcagcacccccagggacgctgggtgatgacttttctctctgccttccttggggccaggtctggaggcccaatgccacctgtattcgacctgcatagggggctgtgagtgtcatcttccctgggtccagggccacatttatgttttctttgtattgccacaatgcatcttaattcccatctgcattctcagctaaggcgaggcccaccccagcacatcacctcaccctgatgggctccctggcctctgatccctgcacagttggtgtcctcctgtgcctctgggacatgtgggatggacccaggctgctcccctctgcgctcgccttcctgagctctcccacttccaggggccctgagcgtgctcttaggctagtgtgacatcattcatgacagcagagtgaga

SEQ ID NO: 74726 - DNA, 1636 bp, Homo sapiens
ttggcttaaataatttttttttcaaattggggcttccatattgtagatcttttattatttcaattaaaaattaatttatttttcctttattttacaaagtctgaactgcaactgattaaaattggaaaatattgttcaaaaatataaaatatgtttttcaaataattattcttcacaaatagtttgagattcctttctccagtcatgagataatgagttgaatgtggccttggaaatgagagatgttaaacataagacttaatctttctaggtttcgatttcctggttctcaaaatgcagtgatagagcaaaatctggggtcaaactggccactagataagggacacagaggttttgtttgtgtgtcaacaaaaatgaattgggatggtttcagtcagggagtgtgctcaccaattaggactcagatttctccacttcctgccatgtcacagtaggatgtgtttatattacacctgcgatgctaaagatgtgtgagtttgtgacctcgagacgagactatgactggcaagtttccttccagttctatgattctgatattatggaataggaattaaagtcatatgtttttgttattgktactatttttctttgagaatatgaccccacagagtagctatagttaacttttctaaactaaagccctggataaggttgggctttgagaagtcaatactcaagtcatcctcccgagttaaaaagagcatttccatctgtatatattttacatgtagaggttccatgtaaagtttcatttgataaaaggggttcatagaaataactttttcaataaaattgctctaaatgtttgaatccagtacagttttaacttgattatattgcatatgtgcacttggtctgctatgcttggcacacatcagtgctgggcatagaaaaaacaccagcccaattcattcctattttacttgaaggggttgaccacaaagtcagccaagccactctttttgcaagatttccccctaaatataagtgcacaccaataagggagggtaatggcaccatctgaaagatggaagaagtagcagggactgcactcatacattattttacagtcaatgctagttggccatgcatataattcaacacaaatcatgattaataagcaaatgaatgggatgggtgctagaaattatcgctgcccatgtacatcatacaaaattaaatctgattaccttttgaaagcaggcattattgtctcttatttcttaataaaaactatgtatttatatttttatctaaatctcttgtttttaacagagagctgatataaccacagtttttccctctacagagttccagctctatggcaagctgagttctgtgtacacaggaaattaaattaaattcagcaaatgaatgaaattaaaattaggagaaaaaaggaagggaaaaaggatgagttggggagaacagatagataaattttgctaaacttgtatatttcctttctgattttactcacagatgttttcattatgagctttgatgagtcactgtgacaaattatggtgtgtgacatcgtcagcctaagatactgctttgatcatggcaaatacacaatatatattggagcactggttctatttttaaaatttgc

SEQ ID NO: 74727 - DNA, 1014 bp, Homo sapiens
acagaattggtgtctgttattttaaaaaacataactacaagggagtcaagcataacagggaacacattagccaaagctctacaagcttcatgtagtttcattcaaggccatcaaaaaggctagataaagatgaaagtacagaaatagggaagagattaaagaaatgwtcccttgaatgatgtatttatccaagttttctaaggcaaaattccatattaatatttgggtgccagggaaatacatttaattgcagggaatggggtgggggatagttaaatggctgtcttctcattgtgaatattattttgaaacagtggcatagtcaaacatgactgaaattcacagcaaatgtggctcagagagtttcttttactcagctaatgaaagacctccagaatagggaatgtttttcattataagggctacttaaatggtacagtggtctctaggtggctgctaatcttgggctcattctccacaccactacagcaggattaagagttgaggcattctatggaaaacgtagggtaaagggaatatggaagacaggaatgaatcagtggaagttgataaacattttacattttctccaacaggcaacaaagaacaacataaataaacaacaacatctgtaaatgccattttacacattgtcctttagaatcaaatgttagtgctgtgtgttatcacttatttcctgaatttttcaaagtcttccctcagcgcagtttcgatttcgataaggtgcttatacctgtgttttcctctgctgctgatcaaagacctgccaagagaaattttgttctacctctggcccttcttccaggtactgattatccatttagttctgtgactgagaggttatattcttgcacccaggattatactctggtcccacggatatgattacctgagcttcaggaaatggtaaaatgcttggaaacattgtagaaaatgcttggaaatattctatgtaatatttcctatggctatgccaagtagggtgctctgata

SEQ ID NO: 74728 - DNA, 1014 bp, Homo sapiens
acagaattggtgtctgttattttaaaaaacataactacaagggagtcaagcataacagggaacacattagccaaagctctacaagcttcatgtagtttcattcaaggccatcaaaaaggctagataaagatgaaagtacagaaatagggaagagattaaagaaatgttcccttgaatgatgtatttatccaagttttctaaggcaaaattccatattaatatttgggtgccagggaaatacatttaattgcagggaatggggtgggggatagttaaatggctgtcttctcattgtgaatattattttgaaacagtggcatagtcaaacatgactgaaattcacagcaaatgtggctcagagagtttcttttactcagctaatgaaagacctccagaatagggaatgtttttcattataagggctacttaaatggtacagtggtctctaggtggctgctaatcttgggctcattctccacaccactacagcaggattaagagttgaggcattctatggaaaacgtagggtaaagggaatatggaagacaggaatgaatcagtggaagttgataaacattttacattttytccaacaggcaacaaagaacaacataaataaacaacaacatctgtaaatgccattttacacattgtcctttagaatcaaatgttagtgctgtgtgttatcacttatttcctgaatttttcaaagtcttccctcagcgcagtttcgatttcgataaggtgcttatacctgtgttttcctctgctgctgatcaaagacctgccaagagaaattttgttctacctctggcccttcttccaggtactgattatccatttagttctgtgactgagaggttatattcttgcacccaggattatactctggtcccacggatatgattacctgagcttcaggaaatggtaaaatgcttggaaacattgtagaaaatgcttggaaatattctatgtaatatttcctatggctatgccaagtagggtgctctgata

SEQ ID NO: 74729 - DNA, 662 bp, Homo sapiens
ttaagacatttctaatgttattttagtaataattttaaagccagcttatttattaaagattttaagtcacatgagcttgaaaaagcatttgactagttttttctctttagtagtatctgatttaagcacttttatttattttttaagccaactagttagagctcttttatgtactttttaatagtgaaacattgtgtacacaacacataaatatgtagatgtaggcctgycaataaaagtgtatcttatagattaataaagaccttctttttttccttcttttttttttctttttttttttttgagatggagtctcactttctcacccaggctgcagtacaatgcttgcaatcttggctcatggcaacctccacctcctgggttcaaacaattctcttatctcagcctcctgagtagctgggattacaggcatgtgccactacacctgggtaatttttgtatttttaatagagttggggtttcaccatgttggccgggctggtctcaaactcctgacctcaagcaatccacccacctcggcctcccaaagtgctgtcattacagacatgagccaccatgcccagccttcttctttttaagtcttaccctaggcagttgtcagctaaattttcaattgaacataaaagtttagaagtttatta

SEQ ID NO: 74730 - DNA, 1070 bp, Homo sapiens
acatctacaaaaccaaatttgctaagagaaacttatgctccatttaccttgattccttactagagaattttcaaatgtcaagtcaagcatggctggacatcaaagattgtaaacctttgggggactcactttaacatggaagagtggaagccattcatattattttagcattccagaacactcaactgactgaaagatttttttttaattgttgttctttgaaaggaaagatgaatgagcatatatcatttggggmagaattctccagaaactataatctacaaccactgcatttatctgaaattctgtcttttattttaaaggtcgtggctgtataattctgattttagcaagcagaaatatttttcaaaaatgcagcctaattttattgttcacctttaaatattcatttcacatttgatgggctaaaaatttgaaattcaaattacttccttttcctttattcttagcaaaatcatctaaaagtaagagttgcagttcatttataataaaatacaaataaaataaacttcataattcaacaagaactaattaaaattatttgagagccagtacttactgccaagtaaactgtaaattctagttctattatttggattctttataacttattttaggaaaattattcatctattaagtcattgaatcacagagctaaaagggacattaaagttcacctcctaaaaactctcctattaccaatgacgtctggagagtttcctcagcagtgcaaggtcactttctaatgagtttcaaagtcaggaatcaagtaagttctattgtttctaagccctttgcacttcctataaaacacttgaacaagccatactaagtactgagtgagtctttctagtattatatgtccaagatctaatcagggcacctggtcttaagcccacaaactagggttgtggaggacactacacctcttgtgtgattgctgatttttggtaagacacagggttcccacaaatctctctctgcagaagctctgagcaggtgtcaaggatagaacataatatttttagaaaaaaaagtgtaattttttt

SEQ ID NO: 74731 - DNA, 1088 bp, Homo sapiens
tgaaagtctctatgaggaaacaaaatcaaacaaaagcataacattacaacatcttctcagtaagatgcagagaacacaaggcaaagaagaaaagktgtttccctctcaggtttgatgactatgaggacagactgaaagaaggcctacctcagccttctgcatattcccagagctggactcagtaaatgctgtgaaggaatctgttgactactaggatgagatgatgaagccagagtctcacatatccagtgaacaagaaaatgggcaatattaagaaatatataaggagacatttgcatgaatcagctacagtttcttgtcctcattatgtgcaagatttaaggtccatgaatgaacattttcatgaggcagtcatacttcatacttaaatctagcccattacaccccaaggtcccttttgtcacataggcacataaacacccataaatctgccttatccttccagttacaaattgtctcttccctcagttgtatctatccacacaaacaggagcagtgtgtccttctttagatcacactttatctttctttcttgctgtcttctgtttccagcatggagaactgtgttccctctggacttctcattctcaagtgacattttatgttttctataaaagccagtgagaaccctgttatttgtttgatccatattagggcccttgtattttggagacagacaaactttgtaagaattaatcttttaggaagaaggtatcaaattaagggtatctcacaacccaggacaaccttcaccatggtgatgtctccatcatcctgtcagtgctactccagagcttttatggtacttttcattttagcactctctccttgaatatcccaggcggggaaatagagaagtcatgattattctcacaatttatagagtatagtcccatcttttcaacaatatgcttaaccacactaagtctcaaatacccagtaacactttgtgtccttcccaatgacagcacttagataagagagtccaggtttaaatacatatcaagaactcttgctgaaatgcgacaaaatttataaggtatgaaatggcttctaaaaattatgtg

SEQ ID NO: 74732 - DNA, 998 bp, Homo sapiens
ctgggcatagtatcttcaactacctacatgagcacaattgatgatgccaagctaagaaaaagaagcttttaatatttctgatatccaatttaacatattttcattgccacttggagagcaaaaacataactaaacatgtccaaagtatatctaacttataaataagaacacaaaatcaagaaatgtctcagaagaaattctgtggattacttatacttgcagattcacagtgatatcaaatgataaaaacaattatggtcgtgctataatttagatttggggatatagagggcccagctatgaggctctaggaatgctcagccaagaaaaagagaggtctcaataataaaataagtgtgatcagatttaaggayacaatttcaaacaacaaaaaagtaaaaattaacagactaggctgggcttggtggctcatgcttgtaatcccagcactttggaggccaaggtgggtgggtcatgaggtcaggagttcgagaccagcctgaccaacatggtgaaaccccatctctactaaaaataccaaaaaaaaaaaaaaaaaaagctgggtgtggtggcttgcacctgtaatctcagctactcaggaggctgaggcaggagaattgcttgaacccaggaggtggaggttgcagtgagctgagatcgtgccactgcactccagcctgggtggcagagcaagattctgtcttggaaaaaaaaaattaacagactaatttaatgatcacccaaagctgagtgatgtcattgcaatccagcctgggtgacagagcaagactctgtctcagaaataaataaataaataacagactaatttaatgaccacccaaagttgagtgatgtcattgtcactttaggccatagaaaaatttcaaaatgttttctttcaaactctaagccacaatttaactaaagtattgtaggaagaggggacatggattaaattcacacattcaaaagatattatgtgcttatactgttccagg

SEQ ID NO: 74733 - DNA, 553 bp, Homo sapiens
tgcagtgatttatttgaggataaatacctctgtcagtgtcttatgacwgaacacaacagtccaagctgactggaacgagcggaatgcgaggacgctggagctgaggcagtagaggcgggagctgggccacctctctgcggaaactctgcctccaaggaggagccctcacaggaaggtattcctgtggggaaaaagcagtgccctcaggaattggagcatcttgaataatgaggaaacactgactcatgctagagtgagcgcttgggaagggggaaggaggaggacctctgtacctgcacacacaaagctactccctccaatactcagtgcaaccttgccaggattggcaagataactccaagaacaccaaccgccctcaccactgtacccgtagactctctgggcagctggtggggcgtctccaagtcctgaaaactggggagaagcctctccctctgcgaggagggtgtgtgccgagaggagagtgcaaaggggagaagccgggtgcacggaagcgggaggcttttccagtggaaacatggtgacgttgcac

SEQ ID NO: 74734 - DNA, 707 bp, Homo sapiens
agcgagactccatctcaaaaaaaaaaaaaaaatttcccatcctgccagccagcagttagctagaagcaggttctgatcttggttctgccacagactggctgcgtgagtttaggcrtgttacagaatctctctgatctacttctgcatctttgaaaaatttggataatgatacagcctgaccattctcctttgatcataccacttttctcatggcatttaatatggcctactataattacacatggctttatctcccctgtagaccaaaccaagagctcctgagggcaaaggcctttgcttatttactctgaaacgcagcccagtgctagctgtgctagcagacacattgtcaatgccagcttctaccctttctgttggattcccacttgctatgaaaatcctttcctttgttctacaaagtacactgttcttcaaatcatgaagtaacccagtttcaaaattttagttttactttgtaagtttcagcatatctctatcccagtatggtggggtttcttgttgttgttgtttttgttttgttttgtttttaatattgtaaatgttataggtttcaaagattatctatttgggaacttgggcataaactcaacatatatacttctcatgcttccaagtactggaagcatgtggaatctgagtggaaaaatcatttaaatttagctttaaaaattaaaaaattaaataac

SEQ ID NO: 74735 - DNA, 707 bp, Homo sapiens
agcgagactccatctcaaaaaaaaaaaaaaaatttcccatcctgccagccagcagttagctagaagcaggttctgatcttggttctgccacagactggctgcgtgagtttaggcgtgttacagaatctctctgatctacttctgcatctttgaaaaatttggataatgatacagcctgaccattctcctttgatcataccacttttctcatggcatttaatatggcctactataattacacatggctttatctcccctgtagaccaaaccaagagctcctgagggcaaaggcctttgcttatttactctgaaacgcagcccagtgcyagctgtgctagcagacacattgtcaatgccagcttctaccctttctgttggattcccacttgctatgaaaatcctttcctttgttctacaaagtacactgttcttcaaatcatgaagtaacccagtttcaaaattttagttttactttgtaagtttcagcatatctctatcccagtatggtggggtttcttgttgttgttgtttttgttttgttttgtttttaatattgtaaatgttataggtttcaaagattatctatttgggaacttgggcataaactcaacatatatacttctcatgcttccaagtactggaagcatgtggaatctgagtggaaaaatcatttaaatttagctttaaaaattaaaaaattaaataac

SEQ ID NO: 74736 - DNA, 653 bp, Homo sapiens
tgggggatggctatcagtcactgtgacaagaaataaaaactgcatggaggaccaagtcccaggtcaatagcaaggccaaggccaaggttattatttagctctgaactggtggtatcttgaatcccgagcaacgccgaacactggccactcctgggcagcagaggggggaatcccagacctcggggtatggaggaggggcccagaatcaccaggcctggggtcagcagtcctgctctggcgatggagagctcctcagcaggcggccrgggagaagtcagccccacagcggggccatctcagatggtctcatcatcgctcatgtcccagatctgcatggagaaggggagaggctcagccgagatgtcccactgcccggtggggggcacacagatgcttcaaaaccgcagcagtcatggcagctcccacctgcagaaccactcccttgtttctgagggactgtcaccccatttctgtacaaggaaaccaaatctcagacttgccaaggcgtcactagtgtgtgaaccacctggtggaaccaacaggggagggctgggatttgcactggggaatgtgcctctgctcacctcctgcatgtccacctcgggggaccgtccctgacccagccagcctctgctcatcctggcttctgcagc

SEQ ID NO: 74737 - DNA, 1182 bp, Homo sapiens
gcttatgcattttactgagcatgaaagccctgtaaacacagaatttggattctttcctgtttggttcctggtcgtgagtggcaggtgccatcrtgtttcattctgcctgagagcagtctacctaaatatatagctctgctcaaagagaagtacttgtagggaatatacttcaatacacttcacagttcaatcctcccgctcctcactggtctgggcacccaggacttatctccactttggagggtaaacctagtttagagttcatgtgtgaatcattggtgattaaatgccttgagccccaataaaggatgtggcccttcccagcttcgataataagctttacccactttctgaggtgttctatgactcagaccacattcctaagtcagagattgttaacactacaaatgtacagtatcagtaaggttatgtcccatgagtaaatacatctagctaagggcattgctaaaaatagccccataatataggtgaggaacaactaatcaagctttacctaaaacatgtaggaatccacaaaggggcccactcttcttttccagctcctttatccaaatttcaggtgttgttggccattaaacaaaaactgtcaatggggaattgttcagtttgactactggttaattcataacctagagtatcaacaatttagcaaccacagattttaagtgaagtgaaggaacccaaagtgcatagtatttctgcacagtgttaccaatggcaatgctaaaccggggttgctttatcagtataaaacactttggaacaaaaacaacagcaaaatctgagtttcattacccaaggtaaatcatcccttactctttagtcttttagaagatagttaagacttcccaaatatatatatggtagattcaaaccactcctaagcacatgatttcaaggtaggagagggggctcagtaagctatgaacagaaagcacagatttgaaggcagtttttgatacattaagttactgcccaagaccaatctgaaagcagacttaggctttagcacattcctagcaatgacaaactaagattacaactttgctaaaaagggtcgtttttaaatgttctattaacatacagaaatgaaaaccctgaaatttcataaccaacaatatgtaggaagccattatctgaagtgtaagcaactgcatagtg

SEQ ID NO: 74738 - DNA, 992 bp, Homo sapiens
tgcatctatacctgctaatcaaatgccaagtgttcattttaatggccagaatgttaggaaggatggcctagatcagaagggtctcatggacaaaatgcctttagggatcaagaggataaaagaatttagccagcctggccaggagaaggtgaagggtgagtatagcttgcctaaacaggacagctacccctcagtattgtcctgtggtaatacaggcttagttagggtgactatattgtcttgttttaagaagaaaaaatagaaatcttcatttttgtgtgaaatcttaaggtttttaactattggcaattaaatcaagtttctgtgaattaataatttcttcctccctctcttttttcttcccttctaaatattgtgtagtccaataaagcttaattaggaacacaattaggagaggtttgccaattgatgacaccaaaaagccccaaaccttacaatttacactagttttattctcttttcccctaaactttttctagaatgaaaaaatcagaaattagatagaatcacagttcaccacctttgcctctttactctctacctaagttagatgctaactaatggtacaatgaaactctgaaagagaattattagtaagtttatcttatataataagacagtgtataagatattgtatactatcttatattatcagataagcataagataatacttatcattcagtaagcagtttgtttactatcttayacaagataattaatacttatctttatattttaatttaatatttttaattaaactaatattttaaattttaatttaatgttttaattaatatttttaatatttaatacaagataatacttaccttgtataagatagtatacaaactggttactgaatgataggaagatggttaaacatacttattactatcattcactatcatgtagaaaactctatttcatagtcccatatagtagagaggaacctggttgccttttcaagaa

SEQ ID NO: 74739 - DNA, 992 bp, Homo sapiens
tgcatctatacctgctaatcaaatgccaagtgttcattttaatggccagaatgttaggaaggatggcctagatcagaagggtctcatggacaaaatgcctttagggatcaagaggataaaagaatttagccagcctggccaggagaaggtgaagggtgagtatagcttgcctaaacaggacagctacccctcagtattgtcctgtggtaatacaggcttagttagggtgactatattgtcttgttttaagaagaaaaaatagaaatcttcatttttgtgtgaaatcttaaggtttttaactattggcaattaaatcaagtttctgtgaattaataatttcttcctccctctcttttttcttcccttctaaatattgtgtagtccaataaagcttaattaggaacacaattaggagaggtttgccaattgatgacaccaaaaagccccaaaccttacaatttacactagttttattctcttttcccctaaactttttctagaatgaaaaaatcagaaattagatagaatcacagttcaccacctttgcctctttactctctacctaagttagatgctaactaatggtacaatgaaactctgaaagagaattattagtaagtttatcttatataataagacagtgtataagatattgtatactatcttatattatcagataagcataagataatacttatcattcagtaagcagtttgtttactatcttatacaagataattaatacttatctttatattttaatttaatatttttaattaaactaatattttaaattttaatttaatgttttaattaatatttttaatatttaatacaagataatacttaccttgtataagatagtatacaaactggttactgaatgataggaagatggttaaacatayttattactatcattcactatcatgtagaaaactctatttcatagtcccatatagtagagaggaacctggttgccttttcaagaa

SEQ ID NO: 74740 - DNA, 576 bp, Homo sapiens
tgtccccatacataaaygaggagcagagattcaaaggcaatacccaacaatgatagtaacaaaatatacacataacagttcatattggccattttttatgaaagagattacgtgtcagagaaatatgatgtaaaaatcttgctttctgtaacattaaaatatatgtggaaaaaactctctgaaatgttatctttttgtgcctcatttttaaagtttggccagcagaatcgggagggatgtgatacttcattgccagctttttccaaagtaacatcatgtaatgaggtaagattcattaagctctctgttgcggcaaacccgtaaaacttcagtgaatatgctacaacacttttgctcaaaagcttaaatacattttctatttttagcctaaataattgaattttctttttcctttctctctcaatagcacagctttccatggaaattgcctggtctcaccagaagttttaagaaatatgaactcatggggaaaatcacagatttaaaaatctaaagacattagttcaaatcttagctttaagctgagtgtcagtttcttgataagcaaaattctaa

SEQ ID NO: 74741 - DNA, 576 bp, Homo sapiens
tgtccccatacataaacgaggagcagagattcaaaggcaatacccaacaatgatagtaacaaaatatacacataacagttcatattggccattttttatgaaagagattacgtgtcagagaaatatgatgtaaaaatcttgctttctgtaacattaaaatatatgtggaaaaaactctctgaaatgttatctttttgtgcctcatttttaaagtttggccagcagaatcgggagggatgtgatacttcattgccagctttttccaaagtaacatcatgtaatgaggtaagattcattaagctctctgytgcggcaaacccgtaaaacttcagtgaatatgctacaacacttttgctcaaaagcttaaatacattttctatttttagcctaaataattgaattttctttttcctttctctctcaatagcacagctttccatggaaattgcctggtctcaccagaagttttaagaaatatgaactcatggggaaaatcacagatttaaaaatctaaagacattagttcaaatcttagctttaagctgagtgtcagtttcttgataagcaaaattctaa

SEQ ID NO: 74742 - DNA, 854 bp, Homo sapiens
ggtcatctggagagagtcagagtgtgagagaaatttagaaaattagaaatttagaaaaaatctgagaaaaatggacagggagtcaacaagagatgaatacaaggtttgccaagcagcggagaaggctttgtctctgtgcgtcacagtaggtaggtattcaaatagaatatgttataaaaagaaacatgtaggaaccactctgtcctatctccctcctttagaaatagttgaatacttaggatacacataatggctagtagcacttactttagtcatagactaggaagatatttgacacttctgtgacacaccagttgtttgacatcaccatcaggccatatttcctctggctgggagagattttcaaaatatagagtatatgagtttcctagtactgctgtaacaaaataccaccaactagatggcttaaaaccatagaagtgtattgttttcacaattctggaggctagaattctgaaatcaagggttggtggggctatgttctccctgaaacgtgtagaggagaatgcttccttgcctcttgctatcctccggtggtttactggcaacccttggcatyccttagcttgcagctacaaaacttcaatttctgcctccatgatcacttgatgtccccctctctgtgtctgcatctctgtgttctaatatcctcttcttgtgaggacgccagtcatactggattaagggcccaccgtcctgcagtaggacctcatctaattcattacaacgtcagcaaccctatttccaaataaagtcacattctgcggttcaagggatcaggacttgaacacatctctttgggagccacaattcaaccatagcatagaatattc

SEQ ID NO: 74743 - DNA, 818 bp, Homo sapiens
ttgggagtaccttaaggcaagcaaaaaaaaaaggagaagaaatgcaaatggtacccagtgaatccccatcttttgagggttgcctccccggttgctgcctgcctttcaccattctccaatgcttttgaacagttgttttttacatcttgtccagactttgtaattgttatctgcgggaaggttattctggggcaagcttctccactattatcagaagcagagcctctctaatcatctttttaaatctagaaattctcatggtttcttagggcttcaggcttcctgtcagtattttacatgacactgtaaactttccatccacattattattctttctatgatatagaatccagcctttattcttgaatttcttcttaccacttacctgagygaagcatctctgcataaattctaaaagcatatttctagtggttcaagctgaagtcatcttctttagcaaatgggaaatctaacaggtattgcaaatcacataattggggctatgcaaacttgggtgttagaaaaaatgaacatctcagaaggaaatctctctcatcatataacatatgcatattcatatatatgtatagataatttaggaaagctgagtttatatagctgcaagtctatatgcctaaggagagtgttaactgaactttgtgccaaaactttaaatatacccgagatacttttccaagtgtctccactctattctgtcaaagccacacaaatttttaaataacagtccaaatatgcactgtcctctttttatgttttcctcaaagcgcggttcactgccccacaccttcctggaggca

SEQ ID NO: 74744 - DNA, 1259 bp, Homo sapiens
catttagatgacctagtcctggataagtacaaagtgacagtttgttaatgggtatcttgattaaagtgcaatgaaatggccatttttaccatggagaaaatgtttattatttacagcaggtccagagaaggtcaagagtccataaagaagggaacagcttatcctgaaagacccactggtgatagayagaaatgttcttgatgtgtttctaaattctgtaaaactttatgccttagcactgcaaggaaaagattttgaaatttttatttatttatttatttttatttttatttattttttataaataaagacaaggtctcactatgttcctcaggctggtctcaaatctctggcctcaagtgattctcccaccgaggcctcccaaagtgttgggattacaggtgtaaatcactaagcccagccaacagagagattttatctgaaaagtgcaaatacaagactcttctgctttgaagttattcttcttagaacttacaatattaggttgatttctcaagtccaatcaaatatttactgtgacactcattttgacctttgcttatgtttatgaatagttgacaatttttccccagtcttgaaaaagcacccatattccaagatctgcagccaatcctgtgcttcctcattgggcatgtgggtggacagtgcttccatgtcctcactggcccttgtcttgacctgctgtgcccactcacacttccagaaaatggaagagtctttctcagggctgatggctttttgttggtagagagaaaggaaatgtaagggaaagaagctaaggagcagtacatctataattcaaaggatttagacaagtaaaagaaatgcttttggagataattgctgaatatattgctgatgagattctaggacctccgatagggtcctattggtggagccctttgaagttaggagctgctgaaatgaggttttgccacggaagccacagtgtggcccttggcctttgctggtggcatggcaagcacagctctccggtcatctctggttagtctatttgaggcctcacaagctccctcgactgactgcattgtcacctcatttgtttttaccattaagtgtttgagatgagaagtgaagaccaagaaaagcagcctatctgcaggtcaggaaaagatttcattcattgtgaagaataaacccatatgaaaagttttctccaaacacatcctggggccagggtactctttaacaaagaagtctgtgtgacagaaattatg

SEQ ID NO: 74745 - DNA, 1259 bp, Homo sapiens
catttagatgacctagtcctggataagtacaaagtgacagtttgttaatgggtatcttgattaaagtgcaatgaaatggccatttttaccatggagaaaatgtttattatttacagcaggtccagagaaggtcaagagtccataaagaagggaacagcttatcctgaaagacccactggtgatagacagaaatgttcttgatgtgtttctaaattctgtaaaactttatgccttagcactgcaaggaaaagattttgaaatttttatttatttatttatttttatttttatttattttttataaataaagacaaggtctcactatgttcctcaggctggtctcaaatctctggcctcaagtgattctcccacygaggcctcccaaagtgttgggattacaggtgtaaatcactaagcccagccaacagagagattttatctgaaaagtgcaaatacaagactcttctgctttgaagttattcttcttagaacttacaatattaggttgatttctcaagtccaatcaaatatttactgtgacactcattttgacctttgcttatgtttatgaatagttgacaatttttccccagtcttgaaaaagcacccatattccaagatctgcagccaatcctgtgcttcctcattgggcatgtgggtggacagtgcttccatgtcctcactggcccttgtcttgacctgctgtgcccactcacacttccagaaaatggaagagtctttctcagggctgatggctttttgttggtagagagaaaggaaatgtaagggaaagaagctaaggagcagtacatctataattcaaaggatttagacaagtaaaagaaatgcttttggagataattgctgaatatattgctgatgagattctaggacctccgatagggtcctattggtggagccctttgaagttaggagctgctgaaatgaggttttgccacggaagccacagtgtggcccttggcctttgctggtggcatggcaagcacagctctccggtcatctctggttagtctatttgaggcctcacaagctccctcgactgactgcattgtcacctcatttgtttttaccattaagtgtttgagatgagaagtgaagaccaagaaaagcagcctatctgcaggtcaggaaaagatttcattcattgtgaagaataaacccatatgaaaagttttctccaaacacatcctggggccagggtactctttaacaaagaagtctgtgtgacagaaattatg

SEQ ID NO: 74746 - DNA, 583 bp, Homo sapiens
ttgagaaggaaataattttcacaaaaatctaggtgggatatgagataaaaggaaatatatgtctgcctcaattctttccaacttactctgccaaaagaggggtgaaattttatttttatctatctgtattcactgtgtgtacgtagtgtattcatcttgggagctcagatatgtagctctgtagcaccatttcttcatcttattttattctattctttaactatatagggtatttgtaaatgcaaagtcaagtaagcaaaaataaagtcatattttaaaaatttcattgtaagtggttgaactgtaactctaaggtttcttccctccaggctggcaactttaatttcagtgagttttgtgcatatgcacatacaaaygtacgtacatatacacataacctctcaacaaataggcaaagacgccttagtcttattcaataccttagtgtaaggcaacactcaagtgcttcacctccacacaaacaccacttaaattagtcactgttctggagttgaaaacagaagctgagatgattgagagacacacttaaaacacagaaatctgctgaggcttggtgcctaga

SEQ ID NO: 74747 - DNA, 583 bp, Homo sapiens
ttgagaaggaaataattttcacaaaaatctaggtgggatatgagataaaaggaaatatatgtctgcctcaattctttccaacttactctgccaaaagaggggtgaaattttatttttatctatctgtattcactgtgtgtacgtagtgtattcatcttgggagctcagatatgtagctctgtagcaccatttcttcatcttattttattctattctttaactatatagggtatttgtaaatgcaaagtcaagtaagcaaaaataaagtcatattttaaaaatttcattgtaagtggttgaactgtaactctaaggtttcttccctccaggctggcaactttaatttcagtgagttttgtgcatatgcacatacaaatgtacgtacatatacacataacctctcaacaaataggcaaagacgccttagtcttattcaataccttagtgtaaggcaacactcaagtgcttcacctccacacaaacaccacttaaattrgtcactgttctggagttgaaaacagaagctgagatgattgagagacacacttaaaacacagaaatctgctgaggcttggtgcctaga

SEQ ID NO: 74748 - DNA, 840 bp, Homo sapiens
gacagctggtatacctttaccaataagacactagcactgtaacttttcattttaatgtaattcattgaaatttagccaaatttagctaaaaataagccaaaattcgtataggttactttggctcacacagtacttttttttttttttttttttaatgatgaggatagtttacattaccagctgccaaatcaattcactacactttgaatgtttcttaaaacatttccatcaagctctgatggagatgaagcagtttgaaggcatcagaaagcaaactaagataggggaaaaagagcgcattgagacaaacccaatattttccactacttatatgtattctttttctgtcttagaacatttcttatcaaggtaagacatggaaatagaaaattctggcttacagtttgtactattctacccaggctgggaaaacmcagcaaaaaaaaaaaaaaaaaaaagaaaaccaggaatttgggacttgcaaggcttttacacactgaggagtaaagatccctggggggcgggttgtggggaagaaccatagaaaagtcaacctgtcattttgctttgtttgctcacaaggcacatgccaacatataaatttccaggaataaaaggttaaatattctgcaaaagtctgatgcttagaggttaaaaagcctggcagagcattaataaccttgcagtgttgaagaagaaaaacaactgaagcctaggaaccatggtaagtatataaagctttgagtttaagtcctaggagggctcagctctaggagtagtgcaaacaagaagtagaccagcctaaaattcagcttcagattaactcaaatattaaatgca

SEQ ID NO: 74749 - DNA, 840 bp, Homo sapiens
gacagctggtatacctttaccaataagacactagcactgtaacttttcattttaatgtaattcattgaaatttagccaaatttagctaaaaataagccaaaattcgtataggttactttggctcacacagtacttttttttttttttttttttaatgatgaggatagtttacattaccagctgccaaatcaattcactacactttgaatgtttcttaaaacatttccatcaagctctgatggagatgaagcagtttgaaggcatcagaaagcaaactaagataggggaaaaagagcgcattgagacaaacccaatattttccactacttatatgtattctttttctgtcttagaacatttcttatcaaggtaagacatggaaatagaaaattctggcttacagtttgtactattctacccaggctgggaaaacacagcaaaaaaaaaaaaaaaaaaaagaaaaccaggaatttgggacttgcaaggcttttacacactgaggagtaaagatccctggggggcgggttgtggggaagaaccatagaaaagtcaacctgtcattttgctttgtttgctcacaaggcacatgccaacatataaatttccaggaataaaaggttaaatattctgcaaaagtctgatgcttagaggttaaaaagcctggcagagcattaataaccttgcagtgttgargaagaaaaacaactgaagcctaggaaccatggtaagtatataaagctttgagtttaagtcctaggagggctcagctctaggagtagtgcaaacaagaagtagaccagcctaaaattcagcttcagattaactcaaatattaaatgca

SEQ ID NO: 74750 - DNA, 1163 bp, Homo sapiens
cacatttttcactgctgtctcatccatggcttcttgttgcttctcaataacttggttcccttttgaaaatgctgcctactctgttatggaaggaaaacttaattttcattgtttgcatatctatgaaaatcatttctctatggctcctacctttgggacttagactacaaatgtaactatttgttggactctgtatctctgtgccttttcctctgctcagtgtaacttctatttattggactctgtatatatgtccccaacataacttccagatatcttttagggccagcagttacatcacacagaaagggcagttcaatatcatcctattatatttgctttgagacttagaaaaagggaatatgtttgacaacmatattttcataaaaacaattaccagggagaaatcaatggaaaaatcgctttgacatggaacattatgatatttcatgaaaattaagattcactgaaatgcaaaggaaattgattttctgcagggaaagtaatcacatatgtgtagccaattgtctcactgcttaaaatatatgctgtgtcttttcctcctttcaacacattggccattccttccgatgctactcaaataaaggagccttgaatggctcctgtggtatgttaggggccagtttccaaacctggcccctaacaaaccatatttactgacattcatctcattgtgtggtcccctatcccactgattgttaaatgatcctgtgatttgctttaaccaacagaagaggatgatggaacactgtatctgctttgcttctaaaccttaagaaggcctggaagcttccatgtttgatgtttgaatctcttagttatcatgtaaatagttcagctatcagggagagtgactgggagaggccaagttcccagtaggaagggagagcttcccagtatcccagtgaaacttcagatgactccagcttcacttggcctgtgactgaaactgcttaagagaccaaagacctgcccttggttatacagcagttagctatgcagcagtagattccagacataaatccagagttatagacttccccttctgccctcttaggatgttgattttttcctaataattttataactgaaaaacccttatcactttatcttatttttcagaatattttaaatagattaca

SEQ ID NO: 74751 - DNA, 1163 bp, Homo sapiens
cacatttttcactgctgtctcatccatggcttcttgttgcttctcaataacttggttcccttttgaaaatgctgcctactctgttatggaaggaaaacttaattttcattgtttgcatatctatgaaaatcatttctctatggctcctacctttgggacttagactacaaatgtaactatttgttggactctgtatctctgtgccttttcctctgctcagtgtaacttctatttattggactctgtatatatgtccccaacataacttccagatatcttttagggccagcagttacatcacacagaaagggcagttcaatatcatcctattatatttgctttgagacttagaaaaagggaatatgtttgacaaccatattttcataaaaacaattaccagggagaaatcaatggaaaaatcgctttgacatggaacattatgatatttcatgaaaattaagattcactgaaatgcaaaggaaattgattttctgcagggaaagtaatcacatatgtgtagccaattgtctcactgcttaaaatatatgctgtgtcttttcctcctttcaacacattggccattccttccgatgctactcaaataaaggagccttgaatggctcctgtggtatgttaggggccagtttccaaacctggcccctaacaaaccatatttactgacattcatctcattgtgtggtcccctatcccactgattgttaaatgatcctgtgatttgctttaaccaacagaagaggatgatggaacactgtatctgctttgcttctaaaccttaagaaggcctggaagcttccatgtttgatgtttgaatctcttagttatcatgtaaatagttcagctatcagggagagtgactgggagaggccaagttcccagtaggaagggagagcttcccagtatcccagtgaaacttcagatgactccagcttcacttggcctrtgactgaaactgcttaagagaccaaagacctgcccttggttatacagcagttagctatgcagcagtagattccagacataaatccagagttatagacttccccttctgccctcttaggatgttgattttttcctaataattttataactgaaaaacccttatcactttatcttatttttcagaatattttaaatagattaca

SEQ ID NO: 74752 - DNA, 1163 bp, Homo sapiens
cacatttttcactgctgtctcatccatggcttcttgttgcttctcaataacttggttcccttttgaaaatgctgcctactctgttatggaaggaaaacttaattttcattgtttgcatatctatgaaaatcatttctctatggctcctacctttgggacttagactacaaatgtaactatttgttggactctgtatctctgtgccttttcctctgctcagtgtaacttctatttattggactctgtatatatgtccccaacataacttccagatatcttttagggccagcagttacatcacacagaaagggcagttcaatatcatcctattatatttgctttgagacttagaaaaagggaatatgtttgacaaccatattttcataaaaacaattaccagggagaaatcaatggaaaaatcgctttgacatggaacattatgatatttcatgaaaattaagattcactgaaatgcaaaggaaattgattttctgcagggaaagtaatcacatatgtgtagccaattgtctcactgcttaaaatatatgctgtgtcttttcctcctttcaacacattggccattccttccgatgctactcaaataaaggagccttgaatggctcctgtggtatgttaggggccagtttccaaacctggcccctaacaaaccatatttactgacattcatctcattgtgtggtcccctatcccactgattgttaaatgatcctgtgatttgctttaaccaacagaagaggatgatggaacactgtatctgctttgcttctaaaccttaagaaggcctggaagcttccatgtttgatgtttgaatctcttagttatcatgtaaatagttcagctatcagggagagtgactgggagaggccaagttcccagtaggaagggagagcttcccagtatcccagtgaaacttcagatgactccagcttcacttggcctgtgactgaaactgcttaagagaccaaagacctgcccttggttatacagcagttagctatgcagcagtagattccagacataaatccagagttatagacttccccytctgccctcttaggatgttgattttttcctaataattttataactgaaaaacccttatcactttatcttatttttcagaatattttaaatagattaca

SEQ ID NO: 74753 - DNA, 735 bp, Homo sapiens
attcgtgatgccatcaccacaacggaggtggctaactagttctttttttcttttttttttttttgagacagagtcttgctttgttacccaggctggagtgcagtggcgcaatctcggctcactgcaacctccgcttcccaggttcaagcaattctcctgcctcagcctcccaagtagctgggattacagatgtgcaccaccacaccaagctaattgttatatttttagtagagacagggtttcaccgtgttgcccaggctggtcacgaactcctgagctcaggcaatccacccaccttggcttcccaaagcgctgggattaccggcgtgagccaccacgcccgaccggctatttcttctacattcagtcagtccataaggaggggcccgttctgtgcaacatggaattcagaactgagttctcagcttaacatccctagtcgcaccatctttcacaaatcacgtaacctctctaaagtttagtttcaggtctacaagggagagcatacgacattttctccttagaatggctgtgagaattaatcccatgmaattctcagcccattgcttgtcacatagtacgcactcagtaagcaggagcgaataataactatcacaataataggagagaaaatatatctgataatggccaggggccatgtgatgcctggtggcttatttcaaggaaggggccagtggttcacatggtgaattatcgggtttttggatcttaaaa

SEQ ID NO: 74754 - DNA, 644 bp, Homo sapiens
ggtttttagcagtttaattatgattagcttcagtgtggggttgtttgtatttatcctatgcagtgtctcttgagtttcttggatctatgggtctatagttctcatcaaataatttgaaaaaaaattaatcaattttttttttttttttgagacagagtcttgctctgtcacctaggctggagtgcagtggcacggtcttggctcactgtcagctccatctcctgggttcaggccattctcctgcctcagcctcctaagtaggtgggactacaggcacctgccaccatgcctggataatttttttttttttttgtatttttagtagagacrgggtttcaccgtgttagccaggatggtcttgatctcctgacctcgtgatctgccttccttggactcccatagtgctgggattacaggtgtgaaagccactgcacccagcctattaattgatatttcttgaaagggtttttctgtcccttgtctctatcttctgcctctgagcctccaattacacctatgttagacactttatattactcaagggtaaatgatacattttgtttttctttcttctacgtgtgctttatttaatgttgaactagatttgtatatcagggataaatcccacttgcttgtggcatata

SEQ ID NO: 74755 - DNA, 644 bp, Homo sapiens
ggtttttagcagtttaattatgattagcttcagtgtggggttgtttgtatttatcctatgcagtgtctcttgagtttcttggatctatgggtctatagttctcatcaaataatttgaaaaaaaattaatcaattttttttttttttttgagacagagtcttgctctgtcacctaggctggagtgcagtggcacggtcttggctcactgtcagctccatctcctgggttcaggccattctcctgcctcagcctcctaagtaggtgggactacaggcacctgccaccatgcctggataatttttttttttttttgtatttttagtagagacggggtttcaccgtgttagccaggatggtcttgatctcctgacctcgtgatctgccttccttggactcccatagtgctgggattacaggtgtgaaagccactgcrcccagcctattaattgatatttcttgaaagggtttttctgtcccttgtctctatcttctgcctctgagcctccaattacacctatgttagacactttatattactcaagggtaaatgatacattttgtttttctttcttctacgtgtgctttatttaatgttgaactagatttgtatatcagggataaatcccacttgcttgtggcatata

SEQ ID NO: 74756 - DNA, 696 bp, Homo sapiens
tttgaaccaggaaacaatgcataaagtagtgaacaggcccggtgctgatgacaggacggactctgtgtctgcagggtcaggaacagtggggacccaaaaagaacattaaaagcaaagtgcattttcataaacggagaagaaaaaaaagagaaagagagagagagagagaaamccaggctaaaagcggtgataaaagattacagagccagaacagagtggcaggaagtctgtgatctgaagtcatcagcacctgaaagtttgagtggaactgccagggtgaaagatgaccggatcggactgggggcagtgagtgagtgccgggctgagagccccatctgggtcagctggcaccaaaagctgccggcctccagcccacccaccagctcacccacatttgactaggaaaattatttcattaaaaaaaaaaaaatcacctggaatgaaagtcaagaaatattttcaacttagccttcagggcaattgattttattgacttcttggggcagtgattgggaaatgctggcggagacgtcagaagatagggaggccataaagagagccccaggccctcagaatgccttctgctttatggagacctgtccacaccttcaaggcaaaatgaattgagatgctgttttcctcttggcatgggatacatgaccactgggaatctttggacttatttggccttttgga

SEQ ID NO: 74757 - DNA, 577 bp, Homo sapiens
gtgtcccatggtgccacctggtattgtctgcctgaaagaattctaggagggcttcatttgtctctgaagtcatagatcttcatctaccaatactgggaaaactcccttgctcctcttcctctgcattaggcttgtttttctgagacagaagtggtcagagaaaaaggacactggaatccattcattcatttaaaaatattgaccaagaaatgaactcagacgaaattgaccycttcagtgaagtcatatctaattccctcaaccctgtacaaagtaatagtacatttattcaacaacatattttcatggagtacctatttagaaaagagacggaatctgggcccagtgttataggattcaaatcccagctctgccattaattgggagtgagcattagcaagttccttcaactcaaagtatctcagtttccccaactataaaatgggaacagtaatagtaacctacctcatggggttattgtgaggaatgaattaatatctataacagttaaaattgtccttggcacataggaaatgttcagtcagtgcttgctataattattactaggagccagata

SEQ ID NO: 74758 - DNA, 1400 bp, Homo sapiens
tcccccaaaggagcaagggatgagaactctgccttcagatgctccratttgggaagcttccaattaccagctcatcctgtcgttcaacaacatttgcaagtgatcacctctagagggagctaaccccactgtcttatttctttaatgtagtaggcaaggaattgttaaatatggaaatttttcagtatccaagatttgataaattattgggcattattatttgtctctacactggccctataatgatgcctgagggcagtgatgtgggaaggcaattcatccatgaaggcaaaggaaaaagctacttgcaaagaagaaagacttgtaattttcctcagctcataaacaccaactgcaggaaaaaataatggctgcattttgctttcctaaattgttcttcaaagggatactgttttcctcttcaaagttcccttttcttaaccttagtatatgtaattgcaccttaaaaaaacattcgcagttatggtggtagaaaaggaaggccataaagagcaaaggggattgcacagtctgatttgaccttcagaatttatcaatcttgtcacactgaagtttcctctgagatgcagacacttgggctggtgggctctaaccaatgcaaggctaagaaacagctatatggaatctgcaactcctagatattttgttaagacttggctggttctctgcaatattttcgtgtttcacataatacttggctaaaaagaatagtaaataatgagcaccaaaagaatcagatagaaaaagtatagcttcaggctgacagctgacatgcaaaccactgttctctgcaggtaaatggggcgcctaaattacagcctgggaaggagagaaacaaggaggtgatactgccagcctgctgcagctccaaatcccagaggcatctgggttgatactgtacagcaatgccagaaggagtgcttggggatggcagagaggttcctggaggcccaaaccctcagtgaaaggaactgagctgttttacagttcccaaggcaggataaatacttagccagaacagaaataacctcctttacctcttcccaaacacctccaccctcaactgtacagggcttatcaggctgaagacttggggcctcagcctatgctaaaaaggaatcccttgtgtcctaactagtgaactgaacaagcttaaaggatgactgggatcaggggattaaaagaaaagagtggctaagggactgtatttcacctgccgtcaccctgaggccaaaaaaaaaaaacatattaggaagaaaagacattggaaccaaagcaaatccaaaatggtatgtctcagcccaaaaatatcttgtgaaaactgcagtgacctctaaacaaaaactgaaaaccatataaggtgataagattcttagctg

SEQ ID NO: 74759 - DNA, 1400 bp, Homo sapiens
tcccccaaaggagcaagggatgagaactctgccttcagatgctccgatttgggaagcttccaattaccagctcatcctgtcgttcaacaacatttgcaagtgatcacctctagagggagctaaccccactgtcttatttctttaatgtagtaggcaaggaattgttaaatatggaaatttttcagtatccaagatttgataaattattgggcattattatttgtctctacactggccctataatgatgcctgagggcagtgatgtgggaaggcaattcatccatgaaggcaaaggaaaaagctacttgcaaagaagaaagacttgtaattttcctcagctcataaacaccaactgcaggaaaaaataatggctgcattttgctttcctaaattgttcttcaaagggatactgttttcctcttcaaagttcccttttcttaaccttagtatatgtaattgcaccttaaaaaaacattcgcagttatggtggtagaaaaggaaggccataaagagcaaaggggattgcacagtctgatttgaccttcagaatttatcaatcttgtcacactgaagtttcctctgagatgcagacacttgggctggtgggctctaaccaatgcaaggctaagaaacagctatatggaatctgcaactcctagatattttgttaagacttggctggttctctgcaatattttcgtgtttcacataatacttggctaaaaagaatagtaaataatgagcaccaaaagaatcagatagaaaaagtatagcttcaggctgacagctgacatgcaaaccactgttctctgcaggtaaatggggcgcctaaattacagcctgggaaggagagaaacaaggaggtgatactgccagcctgctgcagctccaaatcccagaggcatctgggttgatactgtacagcaatgccagaaggagtgcttggggatggcagagaggttcctggaggcccaaaccctcagtgaaaggaactgagctgttttacagttcccaaggcaggataaatacttagccagaacagaaataacctcctttacctcttcccaaacacctccaccctcaactgtacagggcttatcaggctgaagacttggggcctcagcctatgctaaaaaggaatcccttgtgtcctaactagtgaaytgaacaagcttaaaggatgactgggatcaggggattaaaagaaaagagtggctaagggactgtatttcacctgccgtcaccctgaggccaaaaaaaaaaaacatattaggaagaaaagacattggaaccaaagcaaatccaaaatggtatgtctcagcccaaaaatatcttgtgaaaactgcagtgacctctaaacaaaaactgaaaaccatataaggtgataagattcttagctg

SEQ ID NO: 74760 - DNA, 517 bp, Homo sapiens
ctctccctcactcacccctaaaaatgagcagccaggaaaaggagaaacttggcctgccaagagtagaaggattggttaagttcaaggtactgagttggctacattttctaggagtggagtttcgaattgaactgattttgtggctggaatttctctkccctcttttctactagaccaaaaagattagtgttctgggctgctccgtgcaacccttcattctatcctctgtgaatattctctcttcattcatgcctggagccaccagcactttccccttgcactgggtacaccttaaattggttttttgacaccatccgtggaagatctgctatccaggctgaacctcataaacatagatagctgtttgacttgcttcagatctaagctatatataggctgcttctgatgtcttaaaattttttccacatggttcaccttagcttcctagttttgcactggagcttcaagcagaagcctctgctaataatagtgttactgtgttttctcttgcctcctt

SEQ ID NO: 74761 - DNA, 517 bp, Homo sapiens
ctctccctcactcacccctaaaaatgagcagccaggaaaaggagaaacttggcctgccaagagtagaaggattggttaagttcaaggtactgagttggctacattttctaggagtggagtttcgaattgaactgattttgtggctggaatttctcttccctcttttctactagaccwaaaagattagtgttctgggctgctccgtgcaacccttcattctatcctctgtgaatattctctcttcattcatgcctggagccaccagcactttccccttgcactgggtacaccttaaattggttttttgacaccatccgtggaagatctgctatccaggctgaacctcataaacatagatagctgtttgacttgcttcagatctaagctatatataggctgcttctgatgtcttaaaattttttccacatggttcaccttagcttcctagttttgcactggagcttcaagcagaagcctctgctaataatagtgttactgtgttttctcttgcctcctt

SEQ ID NO: 74762 - DNA, 517 bp, Homo sapiens
ctctccctcactcacccctaaaaatgagcagccaggaaaaggagaaacttggcctgccaagagtagaaggattggttaagttcaaggtactgagttggctacattttctaggagtggagtttcgaattgaactgattttgtggctggaatttctcttccctcttttctactagaccaaaaagattagtgttctgggctgctccgtgcaacccttcattctatcctctgtgaatattctctcttcattcatgcctggagccaccagcactttccccttgcactgggtacaccttaaattggtttttygacaccatccgtggaagatctgctatccaggctgaacctcataaacatagatagctgtttgacttgcttcagatctaagctatatataggctgcttctgatgtcttaaaattttttccacatggttcaccttagcttcctagttttgcactggagcttcaagcagaagcctctgctaataatagtgttactgtgttttctcttgcctcctt

SEQ ID NO: 74763 - DNA, 826 bp, Homo sapiens
gatccccggtttgaggcttactctacaacttaccagtggactgactctagacaagtcccttactctctgttgcctccatctcagcatctattcaatgaggaataaatcggataatgcacataaaaagcttaatatagagcgcatgcttaacacatcaacactatgtaggtgtatctttatatttcrtggaacttcaagaataggaaacacaaaatcacagcctcatgtaaactcgaaggtggctgaggtccaaggctggtctttttcagaggccacgggtgcccctccatcatggtgcctctgcagctctctccacgttgttgagtcagctctccctactgaccggcttccttgacactcctgctgaccctcggcccagtagccagcccggctcggaggaactccctgggacccttcagttgcagagttcactaccaactaactcagtctcttgagtttcaaaactcaagttgccatgcaaaaatataagtggatcatctcaatttcctaataagaccatcagccacgagccactggacagcctagaagattggatgatcttgagacaggtcaccaaccgggctcaagtcagctgtgattagaagtgagctactgtggactaccgcatagcctttggggtcaaaggagctatagaacagccacatgggatggcctagatgactcactaaaatgcgcttccagaagacccttcctcaaaatgaggcagataagacagagggaaatatgagacacctttaaaaatcttctttcatcactaccctccactccccatccaaacatggcaatcgaaacagctatttgacca

SEQ ID NO: 74764 - DNA, 734 bp, Homo sapiens
tgagttgacttaatactttctttgaacatttaagcagcggaataacttcacaattatggtaacatcaaggacaatgaggattaataggtaagcagggggaaagtttttagtgctgcagaacggtgaaggacattcagttgctgcactaaaatccctcgtagttgaaggaagatccaacaggcaagtatattaaaaaaaaaaaaaaaaagaaatctagatgttacggtggggaggggatttagctcagacggatgattgagtcaggacaggatttaatttacagaccsaagaggaagttaaagagaatgattttggagaaccaaggttgtagcaatgcagagatcaggaagaacggactctcctcaccattcacaatgacctgaatgtccttgaagttgatctccccccgtgccaggattctgccctcacagcgataagtgccctcatctgttttcttgatgccccggatctgcaggtagttgttggacaggactatgaatcggactagaagagataagaggcaggttcatccaagaatcagtcagagagcatctgcaggcaggtggctgagtctctttcctttttcctaacttcagtatcatagggtggggttttaagcccaaataagaaaatgcgtccctggctttgaaatacagccaagagtaaatgtctattagaaatttgtctttcgtactggagagaaaatcaggtacctaagtataccaacttcagat

SEQ ID NO: 74765 - DNA, 628 bp, Homo sapiens
atttaacttctaatatttttgtatctcctttttaacaaagacagagcaagtcacacacttggagccttttaggaatctgcatagaatttagtaacattgttttactttcattggattttaagaaaaataatcatagtttccaattaaaataaatgtcagtcaaaatggaatcaatttaaaacattaaatgaatcacagagctagggtataaaaatatgtcaaaaatcattctggtatttgaaactgcagaaataaataaagaggtttgtggaaaagtacattttgggacactggtttgatggctaagactgtggattatagtgaatgcacgcattcacatcccaactctaccacctacttgccttcccaaactgtataaacttcagttcctcctctagaaaatggagctaataaaaatacccgacttaacaggttgctgagaatgtagsaggaaaggaatcactcagctactgttttctattattgttaaaaacaagcttaatgtttctcaaacttaaataatgtagggacccccttcagaggaaaagcgattctcatgaatccacccaatgggtaaaaatgtttgcagaccccaagtcttcagctaagaatccaatttgtaaaccac

SEQ ID NO: 74766 - DNA, 526 bp, Homo sapiens
ttgcaactgacacagcaattcctttgccaagaaatcatcatatccttagtttcttatgttgaggtaaatattcaagttcttggtaaataaggtagattttctatttgcaacctatatctgagtattcatccttttgataacaaaatttacagggaatattttttctatcagaggcaccgttaattatactaggctctcaaaagaattccagattckcctcaaataccagcaactcaattctattccactactcagatctgttgggttgggttgaattggaattgtattacatttatagttaatttaaggagtatttacatctttagggaatttagtttacatttttatgaacatcatatattctccatgtatttaggtcctcttaaagacatttcaacaaagttgcctaattttctacataaaaatcttgccaatcatttattagatttattactatacatatttttgattatttttatatatgatatatttttaaaagtaatatttcttaatctttgctgtatgg

SEQ ID NO: 74767 - DNA, 2114 bp, Homo sapiens
attataatgtttatataattgactagtaaattccctcactaacaaagtaaactattaggctataacaaatatgatacatacttagactatttttatctttatatacagacactgctaaatatcataaatcataaagcttaaagattttttaaaatacatgtatatatttttaatttttatgcttagctaccactatgagtattgaaattaacaacagcctcaaatcaagcagtgaaaaatgctagtgaatgatcacattttaatgctgcttaatttttaggcttctggtgtgaattagctatgagatacagcaatttaaaggataatgactaaactctttcctatttcctgcttaatttccttttaaagaaaagtattggactttaaaaaatattactcattctttaaataaaaaaaaccaaggaattagaattctcttaacaagtgcatcttctagagcagcagtctccaatctttttagcaccagggactggtttcacggaagacaatttttccatggacggggtcggtggggggatggttttgggataaaacggttccacctcagatcatcaggcattagattctcatagagagcctgcagcctagctcccttgcatgtgcagttcacaatagggtttgaattcctatgagaatctattgctgccactaatctgacaggaggcggagctcttgtggtaatgctggccggccactcacctcctgctgtgcaggctggttcctaacaggccacggaccaggagttggggacccctgttctagagcaaagaatttcagatgaagaaataagtgactaaaacaaaagcacttttataagtttagaaaggatggctctatatagatctacataagaagaaaaaaaatcaatcaaatagtatctgtgtcacgttgatgtatcttgttgaaccttctagtcccatcccaatgtttagcatcgtaaacacacatgcaggccaggtgtaggtggcattggggcagcactacagtgacaagagcaccttgggaagtaccataagcagagaatgtttgcgtttgggtcactcccaggaaagttgcagagacataatagaaaaaagctaaaactacaaaggcatttttttaaaaaaggttaacttattattattatttttaaattttactttaagttctgcgatacgtgtgcagaacatgcaggtttgttacatacatttgtatgtgccatggtggtttgctgcacctatcaacctgtcatctaggttttaagccccacatgcattaggttatttgtcctaatgctctccctccccttgcccccaagcccccaacaggccctggtgtgtgatgtttaaaatgattaacttataaagaaaccaaagtgatcagctttcatatttataattatagaaaacattaaactcacattgctaagggtgtagttaagactttcttcatcttcagctatgtccttttagggaactgaacattttttaattttttatacaaaatttaaaaactctccttatttaaaattgattgactacccaaaaatgtgtctttctttgcttccattccatgatttataaagaattagctttagtactctttttagagtgtaggytgaaaaggcattttattttccacctcagagtaatttttaaaccacatcaattatttttcatgtgcagccgtttttatccacaaattattgccttaggcatttttactttaccacacatttcagaagagaaggaatgaaggggaaccagctaatctacaaatgttcacctacagtagatcaggccaaaaaaaggagagaagaatatgacccaaagcttcttcagaaataagaactgcttattaatagtctaatgcaggggtgtccagtcttttggctttcctgagccacactggaagaagaagaagtgtcttgcgccacacataaaatacactaacactaaagaaagctgatgagctaaaaaaaaaaaaagaaaaagaaaaagaaaaaagcaaaaaaaaaatctcataatgttttaagaaagtttatgaatttgtatcagattgtaagcctcttgagaacaatcttgggctttatttatgtttcccagcacataagt

SEQ ID NO: 74768 - DNA, 2114 bp, Homo sapiens
attataatgtttatataattgactagtaaattccctcactaacaaagtaaactattaggctataacaaatatgatacatacttagactatttttatctttatatacagacactgctaaatatcataaatcataaagcttaaagattttttaaaatacatgtatatatttttaatttttatgcttagctaccactatgagtattgaaattaacaacagcctcaaatcaagcagtgaaaaatgctagtgaatgatcacattttaatgctgcttaatttttaggcttctggtgtgaattagctatgagatacagcaatttaaaggataatgactaaactctttcctatttcctgcttaatttccttttaaagaaaagtattggactttaaaaaatattactcattctttaaataaaaaaaaccaaggaattagaattctcttaacaagtgcatcttctagagcagcagtctccaatctttttagcaccagggactggtttcacggaagacaatttttccatggacggggtcggtggggggatggttttgggataaaacggttccacctcagatcatcaggcattagattctcatagagagcctgcagcctagctcccttgcatgtgcagttcacaatagggtttgaattcctatgagaatctattgctgccactaatctgacaggaggcggagctcttgtggtaatgctggccggccactcacctcctgctgtgcaggctggttcctaacaggccacggaccaggagttggggacccctgttctagagcaaagaatttcagatgaagaaataagtgactaaaacaaaagcacttttataagtttagaaaggatggctctatatagatctacataagaagaaaaaaaatcaatcaaatagtatctgtgtcacgttgatgtatcttgttgaaccttctagtcccatcccaatgtttagcatcgtaaacacacatgcaggccaggtgtaggtggcattggggcagcactacagtgacaagagcaccttgggaagtaccataagcagagaatgtttgcgtttgggtcactcccaggaaagttgcagagacataatagaaaaaagctaaaactacaaaggcatttttttaaaaaaggttaacttattattattatttttaaattttactttaagttctgcgatacgtgtgcagaacatgcaggtttgttacatacatttgtatgtgccatggtggtttgctgcacctatcaacctgtcatctaggttttaagccccacatgcattaggttatttgtcctaatgctctccctccccttgcccccaagcccccaacaggccctggtgtgtgatgtttaaaatgattaacttataaagaaaccaaagtgatcagctttcatatttataattatagaaaacattaaactcacattgctaagggtgtagttaagactttcttcatcttcagctatgtccttttagggaactgaacattttttaattttttatacaaaatttaaaaactctccttatttaaaattgattgactacccaaaaatgtgtctttctttgcttccattccatgatttataaagaattagctttagtactctttttagagtgtaggttgaaaaggcattttattttccacctcagagtaatttttaaaccacatcaattatttttcatgtgcagccgtttttatccacaaattattgccttaggcatttttactttaccacacatttcagaagagaaggaatgaaggggaaccagctaatctacaaatgttcacctacagtagatcaggccaaaaaaaggagagaagaatatgacccaaagcttcttcagaaataagaactgcttattaatagtctaatgcaggggtgtccagtcttttggctttcctgagccacactggaagaagaagaagtgtcttgcgccacacataaaatacactaacactaaagaaagctgatgagctaaaaaaaraaaaagaaaaagaaaaagaaaaaagcaaaaaaaaaatctcataatgttttaagaaagtttatgaatttgtatcagattgtaagcctcttgagaacaatcttgggctttatttatgtttcccagcacataagt

SEQ ID NO: 74769 - DNA, 1731 bp, Homo sapiens
  misc_feature (1)...(1731): n = A,T,C or G
ttggtcataccaagaaccgttattgatatttcctgattatagtctacattgggtttactctttaagagaatagtaataataataaaaatgtataatatcatacatgtgcatataaaatcatagtagatttgagaaaagcactgaagtattcctttcttcgcccttctaaaagttactcggagcctggtcttacctaacctcagtacaattcatgtgtttgggctgggaaaattctttgttttggggagctgttctgtggcattaaggagctgtttacaagcaaacctttgggcttttacccattagaggcccaggagcattcccttaggtgggnnnnnnnnnnnnnnnnnnnnnnnnnnnnnnnnnnnnnnnnnnnnnnnnnnnnnnnnnnnnnnnnnnnnnnnnnnnnnnnnnnnnnnnnnnnnnnnnnnnntgttcctctccctcccttttgttcaccaacctttcattcatcaatacacgaattcatgcatatggaagtatagaagtataacaacatctggagactgctgattgcatttacatgttatatgaactatataatagagacagaataagagcagatatctgctcttagcaattggtttaaaggaacagaacttccagtttttctgtgagtgaaaaagtccttgaacccatggataaagatgctcattgcaaaaagactttaaggataaagggaatgagagtgggaaggagagtgaatttagatagmtagaaggaccaaaggagtgaaaatgtgacaagaaagaggtgatcagaatcctaagagtggagatgagtacagagtgtaaaattgagaaaatctacaaatctttagtattagccatccaaattccaaatactcatcaaccacaggttgtcaccaatttttcaccgatctttcttttcccccgtgagaatgaatttaatgcctgtgaaaaaatgttcagtcatttgaaaaagtataatgtcaatgttatagtttttattcatttttttctcttttataagctttgacataattttttaaatatttgtttttataaccactggaactaaaatcagatgctaattagtaaatattagcacataatagttcccacttactgagctggtctgtaagccaggcaccccacttggttaaatccattgcccactgaatcctcaagaaagccttaagaggtgtgtccactttatgaaacaggaagcagaggctcagagatgctgagtaattaagatgtaggctccatgaagacaatagtttttgttcttttttgtctttttaaaaattgccctgtcccccacacgtagaacagtacctgacacatagtaggtactcaataaatgttttttgaatgatacatgaacttgctcacacataagtaaataccaaaccaagattcaaaaatcaggcttgtccaaagtctgtgttcttaatcatctgctgctctgcttccgggatatttagctcttatatatggctctttgagattcctgaggcacatatttaaatgagtagcccaaaatagaatgtgttgtccattgtttctgctgcgggcacatttttaaatataaactcctgggtgtcctttatccccaaaatgaatatatctttattatttttctcattgtaagagttacaccagctcactgagaaatttgaatgatactcaaagtatagaaatcagaacaaggattagggtaaggccagtgaagctctagcttcat

SEQ ID NO: 74770 - DNA, 1731 bp, Homo sapiens
  misc_feature (1)...(1731): n = A,T,C or G
ttggtcataccaagaaccgttattgatatttcctgattatagtctacattgggtttactctttaagagaatagtaataataataaaaatgtataatatcatacatgtgcatataaaatcatagtagatttgagaaaagcactgaagtattcctttcttcgcccttctaaaagttactcggagcctggtcttacctaacctcagtacaattcatgtgtttgggctgggaaaattctttgttttggggagctgttctgtggcattaaggagctgtttacaagcaaacctttgggcttttacccattagaggcccaggagcattcccttaggtgggnnnnnnnnnnnnnnnnnnnnnnnnnnnnnnnnnnnnnnnnnnnnnnnnnnnnnnnnnnnnnnnnnnnnnnnnnnnnnnnnnnnnnnnnnnnnnnnnnnnntgttcctctccctcccttttgttcaccaacctttcattcatcaatacacgaattcatgcatatggaagtatagaagtataacaacatctggagactgctgattgcatttacatgttatatgaactatataatagagacagaataagagcagatatctgctcttagcaattggtttaaaggaacagaacttccagtttttctgtgagtgaaaaagtccttgaacccatggataaagatgctcattgcaaaaagactttaaggataaagggaatgagagtgggaaggagagtgaatttagatagatagaaggaccaaaggagtgaaaatgtgacaagaaagaggtgatcagaatcctaagagtggagatgagtacagagtgtaaaattgagaaaatctacaaatctttagtattagccatccaaattccaaatactcatcaaccacaggttgtcaccaatttttcaccgatctttcttttcccccgtgagaatgaatttaatgcctgtgaaaaaatgttcagtcatttgaaaaagtataatgtcaatgttatagtttttattcatttttttctcttttataagctttgacataattttttaaatatttgtttttataaccactggaactaaaatcagatgctaattagtaaatattagcacataatagttcccacttactgagctggtctgtaagccaggcaccccacttggttaaatccattgcccactgaatcctcaagaaagccttaagaggtgtgtccactttatgaaacaggaagcagaggctcagagatgctgagtaattaagatgtaggctccatgaagacaatagtttttgttcttttttgtctttttaaaaattgccctgtcccccacacgtagaacagtrcctgacacatagtaggtactcaataaatgttttttgaatgatacatgaacttgctcacacataagtaaataccaaaccaagattcaaaaatcaggcttgtccaaagtctgtgttcttaatcatctgctgctctgcttccgggatatttagctcttatatatggctctttgagattcctgaggcacatatttaaatgagtagcccaaaatagaatgtgttgtccattgtttctgctgcgggcacatttttaaatataaactcctgggtgtcctttatccccaaaatgaatatatctttattatttttctcattgtaagagttacaccagctcactgagaaatttgaatgatactcaaagtatagaaatcagaacaaggattagggtaaggccagtgaagctctagcttcat

SEQ ID NO: 74771 - DNA, 1731 bp, Homo sapiens
  misc_feature (1)...(1731): n = A,T,C or G
ttggtcataccaagaaccgttattgatatttcctgattatagtctacattgggtttactctttaagagaatagtaataataataaaaatgtataatatcatacatgtgcatataaaatcatagtagatttgagaaaagcactgaagtattcctttcttcgcccttctaaaagttactcggagcctggtcttacctaacctcagtacaattcatgtgtttgggctgggaaaattctttgttttggggagctgttctgtggcattaaggagctgtttacaagcaaacctttgggcttttacccattagaggcccaggagcattcccttaggtgggnnnnnnnnnnnnnnnnnnnnnnnnnnnnnnnnnnnnnnnnnnnnnnnnnnnnnnnnnnnnnnnnnnnnnnnnnnnnnnnnnnnnnnnnnnnnnnnnnnnntgttcctctccctcccttttgttcaccaacctttcattcatcaatacacgaattcatgcatatggaagtatagaagtataacaacatctggagactgctgattgcatttacatgttatatgaactatataatagagacagaataagagcagatatctgctcttagcaattggtttaaaggaacagaacttccagtttttctgtgagtgaaaaagtccttgaacccatggataaagatgctcattgcaaaaagactttaaggataaagggaatgagagtgggaaggagagtgaatttagatagatagaaggaccaaaggagtgaaaatgtgacaagaaagaggtgatcagaatcctaagagtggagatgagtacagagtgtaaaattgagaaaatctacaaatctttagtattagccatccaaattccaaatactcatcaaccacaggttgtcaccaatttttcaccgatctttcttttcccccgtgagaatgaatttaatgcctgtgaaaaaatgttcagtcatttgaaaaagtataatgtcaatgttatagtttttattcatttttttctcttttataagctttgacataattttttaaatatttgtttttataaccactggaactaaaatcagatgctaattagtaaatattagcacataatagttcccacttactgagctggtctgtaagccaggcaccccacttggttaaatccattgcccactgaatcctcaagaaagccttaagaggtgtgtccactttatgaaacaggaagcagaggctcagagatgctgagtaattaagatgtaggctccatgaagacaatagtttttgttcttttttgtctttttaaaaattgccctgtcccccacacgtagaacagtacctgacacatagtaggtactcaataaatgttttttgaatgatacatgaacttgctcacacataagtaaataccaaaccaagattcaaaaatcaggcttgtccaragtctgtgttcttaatcatctgctgctctgcttccgggatatttagctcttatatatggctctttgagattcctgaggcacatatttaaatgagtagcccaaaatagaatgtgttgtccattgtttctgctgcgggcacatttttaaatataaactcctgggtgtcctttatccccaaaatgaatatatctttattatttttctcattgtaagagttacaccagctcactgagaaatttgaatgatactcaaagtatagaaatcagaacaaggattagggtaaggccagtgaagctctagcttcat

SEQ ID NO: 74772 - DNA, 1731 bp, Homo sapiens
  misc_feature (1)...(1731): n = A,T,C or G
ttggtcataccaagaaccgttattgatatttcctgattatagtctacattgggtttactctttaagagaatagtaataataataaaaatgtataatatcatacatgtgcatataaaatcatagtagatttgagaaaagcactgaagtattcctttcttcgcccttctaaaagttactcggagcctggtcttacctaacctcagtacaattcatgtgtttgggctgggaaaattctttgttttggggagctgttctgtggcattaaggagctgtttacaagcaaacctttgggcttttacccattagaggcccaggagcattcccttaggtgggnnnnnnnnnnnnnnnnnnnnnnnnnnnnnnnnnnnnnnnnnnnnnnnnnnnnnnnnnnnnnnnnnnnnnnnnnnnnnnnnnnnnnnnnnnnnnnnnnnnntgttcctctccctcccttttgttcaccaacctttcattcatcaatacacgaattcatgcatatggaagtatagaagtataacaacatctggagactgctgattgcatttacatgttatatgaactatataatagagacagaataagagcagatatctgctcttagcaattggtttaaaggaacagaacttccagtttttctgtgagtgaaaaagtccttgaacccatggataaagatgctcattgcaaaaagactttaaggataaagggaatgagagtgggaaggagagtgaatttagatagatagaaggaccaaaggagtgaaaatgtgacaagaaagaggtgatcagaatcctaagagtggagatgagtacagagtgtaaaattgagaaaatctacaaatctttagtattagccatccaaattccaaatactcatcaaccacaggttgtcaccaatttttcaccgatctttcttttcccccgtgagaatgaatttaatgcctgtgaaaaaatgttcagtcatttgaaaaagtataatgtcaatgttatagtttttattcatttttttctcttttataagctttgacataattttttaaatatttgtttttataaccactggaactaaaatcagatgctaattagtaaatattagcacataatagttcccacttactgagctggtctgtaagccaggcaccccacttggttaaatccattgcccactgaatcctcaagaaagccttaagaggtgtgtccactttatgaaacaggaagcagaggctcagagatgctgagtaattaagatgtaggctccatgaagacaatagtttttgttcttttttgtctttttaaaaattgccctgtcccccacacgtagaacagtacctgacacatagtaggtactcaataaatgttttttgaatgatacatgaacttgctcacacataagtaaataccaaaccaagattcaaaaatcaggcttgtccaaagtctgtgttcttaatcatctgctgctctgcttccgggatatttagctcttatatatggctctttgagattcctgaggcacatatttaaatgagtagcccaaaatagaatgtgttgtccattgtttctgctgcgggcacatttttaaatataaactcctgggtgtcctttatccccaaaatgaatatatctttattatttttctcattgtaasagttacaccagctcactgagaaatttgaatgatactcaaagtatagaaatcagaacaaggattagggtaaggccagtgaagctctagcttcat

SEQ ID NO: 74773 - DNA, 1731 bp, Homo sapiens
  misc_feature (1)...(1731): n = A,T,C or G
ttggtcataccaagaaccgttattgatatttcctgattatagtctacattgggtttactctttaagagaatagtaataataataaaaatgtataatatcatacatgtgcatataaaatcatagtagatttgagaaaagcactgaagtattcctttcttcgcccttctaaaagttactcggagcctggtcttacctaacctcagtacaattcatgtgtttgggctgggaaaattctttgttttggggagctgttctgtggcattaaggagctgtttacaagcaaacctttgggcttttacccattagaggcccaggagcattcccttaggtgggnnnnnnnnnnnnnnnnnnnnnnnnnnnnnnnnnnnnnnnnnnnnnnnnnnnnnnnnnnnnnnnnnnnnnnnnnnnnnnnnnnnnnnnnnnnnnnnnnnnntgttcctctccctcccttttgttcaccaacctttcattcatcaatacacgaattcatgcatatggaagtatagaagtataacaacatctggagactgctgattgcatttacatgttatatgaactatataatagagacagaataagagcagatatctgctcttagcaattggtttaaaggaacagaacttccagtttttctgtgagtgaaaaagtccttgaacccatggataaagatgctcattgcaaaaagactttaaggataaagggaatgagagtgggaaggagagtgaatttagatagatagaaggaccaaaggagtgaaaatgtgacaagaaagaggtgatcagaatcctaagagtggagatgagtacagagtgtaaaattgagaaaatctacaaatctttagtattagccatccaaattccaaatactcatcaaccacaggttgtcaccaatttttcaccgatctttcttttcccccgtgagaatgaatttaatgcctgtgaaaaaatgttcagtcatttgaaaaagtataatgtcaatgttatagtttttattcatttttttctcttttataagctttgacataattttttaaatatttgtttttataaccactggaactaaaatcagatgctaattagtaaatattagcacataatagttcccacttactgagctggtctgtaagccaggcaccccacttggttaaatccattgcccactgaatcctcaagaaagccttaagaggtgtgtccactttatgaaacaggaagcagaggctcagagatgctgagtaattaagatgtaggctccatgaagacaatagtttttgttcttttttgtctttttaaaaattgccctgtcccccacacgtagaacagtacctgacacatagtaggtactcaataaatgttttttgaatgatacatgaacttgctcacacataagtaaataccaaaccaagattcaaaaatcaggcttgtccaaagtctgtgttcttaatcatctgctgctctgcttccgggatatttagctcttatatatggctctttgagattcctgaggcacatatttaaatgagtagcccaaaatagaatgtgttgtccattgtttctgctgcgggcacatttttaaatataaactcctgggtgtcctttatccccaaaatgaatatatctttattatttttctcattgtaagagttacaccagctcactgagaaatttgaatgatactcaaagtatagaaatcaraacaaggattagggtaaggccagtgaagctctagcttcat

SEQ ID NO: 74774 - DNA, 534 bp, Homo sapiens
tgggcaacatcgtttgcttattttttttytaccttcatcccactccattccttgtatagtttttcttgctgggtgccatcttctttcaacttctgataaaacccactgtaaggcaatactcatccaagtgttcttctgattggatagcaagttcatttatttaattattttcaataaattatttttaaatatgatctttttccccagaaaagaggaagacagtaacttgacagtggagaaacctggaagccattgccttaaccgagtcatgaaggttagtgttatcggtgatgtcctcagggtatcatgtcatctgccagatttctattctttccctgggcagttaatgatgagctaactatcttagaagtcaaaggaaatttttgtttatgaagagactttgagaagtcttggggctctcttgagtgctactcgctttcccctgaaatccattcctatcccatccctgccctctgctgggtctgctctccgtcacttcgaccttatttagggtttggcttactggttggggcc

SEQ ID NO: 74775 - DNA, 644 bp, Homo sapiens
tccctgccggccgcgccctcggccatggcctggagcgtttagggctccccgggggaaagcgggacgcccggcagcggagtccagccgctaggcacsggtgcgctcctgcaccgggaggcggccccgccagactttgtttcaccgcccagcggcggcagtggcggcggcggcggcggcggcggcaactttctggagaggggacatcgctcgggcagagacgtcctcgggcttcggtctaggaggctagcagtccggcgggggacggtggcgggagtggggaggcgatgtgagcgggaggcagaaggagaggcgaaaaagagagggaggtatccgaaatgtgatgcaaacgccggccctgcgccagacaaaaggcaccgggcgcccagccaggcggcctctggagcccggacgccggcggcccgataggggccagagccgggcgactgcggccgggcgcacccgccacctgcccgcggactgcggcgcagcggtcccaggaagtgcggcggcggcggcggcctccactcagctctgttgtgacagggagggagacttgttttgacagcccttggggattggcaggcgtctgggcctcttaggagcctcgcctcgccgagggggctcggcccgaccaatcctcactg

SEQ ID NO: 74776 - DNA, 668 bp, Homo sapiens
taataattaacattcattgactatctaccttgtatcaaccatttaggtaagcactctacatgaattctctcatttaaatcctcccaaaaaccaccaaccacatatatatatakagagagagacaatcagtattccaattctggcagtccaattctagggccttttaatggtagtgctataccacctcttagatctagcacttaattctagaaacttctagccattctcctaatccctaatttatttctactgtttcacatagttattaagaaaattatctttaagctgggggcagtggtacatgcctgtaatcccaccactttgggaggccaagatgggaggatcacttgagcccaggagttcaagaccagcctggagagcccatctcttaaaaggaaaaatagaaaatcatttttaactgattttttacctatgatttttacctataattgcttccctattgaagaaaagtacaacggctttatacatcatattaaattgaatccagctgccatatcaagcctacctttggtgaactcatcatatcctctcaaattcaggagcatagtgtcttaatataaagacaactttgctgaactgtggtcaatggaatatgtatttttttccagaaaaacaattctcctgatggttacatttgtagaaataca

SEQ ID NO: 74777 - DNA, 668 bp, Homo sapiens
taataattaacattcattgactatctaccttgtatcaaccatttaggtaagcactctacatgaattctctcatttaaatcctcccaaaaaccaccaaccacatatatatatatagagagagacaatcagtattccaattctggcagtccaattctagggccttttaatggtagtgctataccacctcttagatctagcacttaattctagaaacttctagccattctcctaatccctaatttatttctactgtttcacatagttattaagaaaattatctttaagctgggggcagtgstacatgcctgtaatcccaccactttgggaggccaagatgggaggatcacttgagcccaggagttcaagaccagcctggagagcccatctcttaaaaggaaaaatagaaaatcatttttaactgattttttacctatgatttttacctataattgcttccctattgaagaaaagtacaacggctttatacatcatattaaattgaatccagctgccatatcaagcctacctttggtgaactcatcatatcctctcaaattcaggagcatagtgtcttaatataaagacaactttgctgaactgtggtcaatggaatatgtatttttttccagaaaaacaattctcctgatggttacatttgtagaaataca

SEQ ID NO: 74778 - DNA, 1196 bp, Homo sapiens
aatgagatcacatggacacaggaaggggaatatcacactctggggactgtggtggggtggggggaggggggagggatagcattaggagatatacctaatgctagatgacgagttagtgggtgcagcacaccagcatggcacatgtatacatatgtaactaacctgcacaatatgcacatgtaccctaaaacttaaagtatattaaaaaaataaaaaaattaaaataaaaataaaaaaataaaaaaataaaataaaataaaattgcccttttaaatcgttaaatcaagttatgcttctactggtatgagatagtagccaacactaggtcctcttaggagctgtgagtagtaattggcatttattcaacattacctctgatgaggtagactcctgcattaccttcctctttcattatggtcatccttcagggaaagcagtgctgagataatagcttgtcccttcctgaatgttgatcccagagctctcttcctgatactctgcatctttggactgccttcatgttcttgcataaatgcatgtgggcatataggataccaagtcattgctatctagaacctgtggtctaagtagtagtagtttagtacaaattttaccagaaaatctgatgctagttccaggttgcacagctttctaaaagcatataggcatgtgtgttagtccattttctattgctataaaataatacctcagactgggtaatttataaggaaaaaaggtttattttggctcagggttctgcaggctgtacaagaaacatggtgccagcacctgcttttggtgaggcctcaggaagcttccagtcayggcagaaggcaaatggggagccagcatattatatagaaagagagaaagcaagagtggagggaggtgtcatactttttaaacaaccagatctcatgtgaactaacagagtgagaactcactcattaccttgagggcagcatcaagtcattcatgagggatctgctcccataacccaaacacctcccactaggcccaccgtcaacatttgaaggtcacatttcaacacgagatttggaagggataaaacatccaaaccatatcagcacgtgtttataaatttttattatttataatgtctggaataagcattagggccttaaaaggaatgttgtgagaatacccaatgtcaaattcaggtgatgtagctttct

SEQ ID NO: 74779 - DNA, 589 bp, Homo sapiens
atgaaaggaaaattagtttttaaaaaaccaagtcaacagattataaaaacacataaataagaagctctacaaagaatgaaaatgaaaataaaatcattctctggagcagaaaatggaaactattttataactgtggtatcactatcactaatccaggaaacccactgaagggactgtggtgactataaggagttcgttccatgttgtttgtgtggtgctgaccgttcccattcacctccggcagctaacacacaagtctggcctatcccccttaaacctaatattggttcaagaaagagcacatggaccaatccctccaaagccctccctggagctttttctggaagaaacaagagatcagtaggcattaagattatgtaggcctggagttgcagtctactcaagtgatgactcactcttcccccactatttagcagccatgggttttgggaggtgtattagtccatttttatgctgctgataaagacatacctgagactgggcaatttacaaaaaagacatgtaatggacatacagttccacatrgctggggaagcctcacaatcatagcagaaggcaaggaggagca

SEQ ID NO: 74780 - DNA, 589 bp, Homo sapiens
atgaaaggaaaattagtttttaaaaaaccaagtcaacagattataaaaacacataaataagaagctctacaaagaatgaaaatgaaaataaaatcattctctggagcagaaaatggaaactattttataactgtggtatcactatcactaatccaggaaacccactgaagggactgtggtgactataaggagttcgttccatgttgtttgtgtggtgctgaccgttcccattcacctccggcagctaacacacaagtctggcctatcccccttaaacctaatattggttcaagaaagagcacatggaccaatccctccaaagccctccctggagctttttctggaagaaacaagagatcagtaggcattaagattatgtaggcctggagttgcagtctactcaagtgatgactcactcttcccccactatttagcagccatgggttttgggaggtgtattagtccatttttatgctgctgataaagacatacctgagactgggcaatttacaaaaaagacatgtaatggacatacagttccacatggctgrggaagcctcacaatcatagcagaaggcaaggaggagca

SEQ ID NO: 74781 - DNA, 586 bp, Homo sapiens
agccaacctagagcaccaggcagcagaaaaaggctgacaccctcacgccccacttccacttagggagaggccaggcctccgggaaagccagctccccgttgctaggagagccccaagggaagcttcatcagctgctgagttggtcacagtggaamcccatgtggtgggtgggaggggtttgaggcacaggggtttgggtggtggcttcaggatggagacttgtgtccagatcatgaggggtggccccagggatgaccacctccaaacaggaagcagacaaaggcacagatggcagaagcggaggcagagaatgggctgcaggggcttccccagagggagagccgagcaaggggacaggctggaaacactcagcctccatggcctgaagcacagacagctggtctcacacgcaggccgggcagccacaccacctagaacaaggggcatgtccgcagggcaggcctcaggacgccccgggctggccctgccatcagcctagaaagacggcccaggctttcccggtagggagcacgtccagccaggtcctgggcaggagctgagactccctggctggcctgagagggga

SEQ ID NO: 74782 - DNA, 586 bp, Homo sapiens
agccaacctagagcaccaggcagcagaaaaaggctgacaccctcacgccccacttccacttagggagaggccaggcctccgggaaagccagctccccgttgctaggagagccccaagggaagcttcatcagctgctgagttggtcacagtggaaacccatgtggtgggtgggaggggtttgaggcacaggggtttgggtggtggcttcaggatggagactygtgtccagatcatgaggggtggccccagggatgaccacctccaaacaggaagcagacaaaggcacagatggcagaagcggaggcagagaatgggctgcaggggcttccccagagggagagccgagcaaggggacaggctggaaacactcagcctccatggcctgaagcacagacagctggtctcacacgcaggccgggcagccacaccacctagaacaaggggcatgtccgcagggcaggcctcaggacgccccgggctggccctgccatcagcctagaaagacggcccaggctttcccggtagggagcacgtccagccaggtcctgggcaggagctgagactccctggctggcctgagagggga

SEQ ID NO: 74783 - DNA, 2428 bp, Homo sapiens
ttaataagtattgagtgtctatgtagaaaaagactagaaggaaacgtgaacatgttaacagtgtttgtctggaggacgcaattattattgatcatttcctttacattttctaatttaattattttgtcacaagtaggtgtgatttttaaaatcacaaaagataaacgttggttttttgtttgtgttttgttttttgagacagggtctcatcctgtcacccaggagctggagtacagtggtgtggtcatagctcactgcagcctcaaactcctaactcaagcaatcctcctacctgagcctcctgaggagctgggactacaggcaagcgccactacccctagcacctctgttgcccagactggtctcgaacgcctggcctcaagcgactctcccaccgcagcctcccaaagctgggattacaggcgtgagccaccacgcccagcaaagattgcttttcaatcaggaagacagatgcttcttagcacttcttgttcttcttctyttttttttttttgatacggagtattgctctgttgcccaggctggagtgcagtagcacagtctcggctcactgcaacctctgcctcccgggttcaagagattctcctgcctcagcctccagagtagctgggattacaagcgtgcaccaccatacctggctaatttttgtattttcagtagagatggggtttcgccatgttgaccagcctggtcttgaactcctgaccttaagggattcacccgccttggcctcccaaagtgttgggattacatgcgtgagccaccaccctcggcctgcttcttagcacttctaacctctgccccttggcatcacctggccaagcagatgaaaagttccagtgagctgtcagccggcaccaggctggggtcttccctaggcagctccaagtggctaggatctggcttcttttccagagctgggtccagaaaccaagatcgggaatgcgtgatggctgctctgcgggcccttgctatgaggtcacttccctggttccagtgatcggccgctggctgtagggagcatgtgggttcagccagggtttgtgtcaacatggctctgctctatccacggcctagtgggttcctccaccccccgctgcatgacaaccccaggaaaaatgttaggagggagggagccgctgggggtgtgacaggagagactttccagggacagatttgtaaaaactgcttcaaagtcctctccaaggactttcaaggcctccactgccccctactgacaggtcacggctcgggcagagaaagctggggatggagctggcggggggagggtggccagcacccgcaaggcaaggagatgagctgggagaacaggggctgggagggcagccccaggccagctcctgtctccagaaccactgtctccctcctctggccacaaagtgaggctggccagacacaggcctactccacaggctgggaggctgggcgtgaaagcactgtgcttgcatggggtaccccatggtgaataccatcagagccaacccccagggtctgctgtcctacagggaagccagtgtaaggcgcccatggaacccagaagcatctaaaggatttgacagccatgagctgggaggatccagttctgtagcaggagaaagagaggcagagagacaggtttcgcaacatctgccccatccgctgtgttgccctgagcacagcccacccctctgtggtcccgagtctcagctctgaggtctctaagaccccctgggtccccgcagctcaggatgctcacttgaaaaccaggcccagccagcagggcctccctcgtcagcctattactggccagctcctgcccagcaccctccagctcattatccccatctgtgcaaactccacaccagcaccctaagcccttcttcctccaggaaggagactgtccccagatgtgtcccctgttccctttcgatcaaagcccagaaaacaggaaccagccttgcgcctcctctccccaccgaactgttggcctttttggatgccctctctgattctctgccaacatccccacaacacaatcagccctcagtccctccccaaatgcaatcggcgagcacgctgtagcccaggcggacggtgatgtccccattttgcaacctgcgagagccagcacacctctcagccaggtgggctgcaggagccagtcgtggcgagggcaggaggcctgcgtgctgacggcatcggcaccatcaaaattacggtcagatcaaggtcacggtcaacgagcttctccacctgcaatttcctcctcaccaaggtggcctcagcctcagcctcggcctcagccttggtcttggcctcaggagctgcagacacacccccaagtccccaccccaggagcttggcctcacacacaccggaggacacggagctggggcacaaatagcca

SEQ ID NO: 74784 - DNA, 745 bp, Homo sapiens
tggccctagtcatctagtacctggccctggggtaatgaagacaagggaatagcagtccagagtgtgagagccagatacagaaggttgttgaaggaatgggttctagatggattggtctgtatacaaaaggtacactcaaagrcaagttctttaccatctttggaaattagctagccttggaagggatagtccctccagtgtcagcaaggccccacatgtcaaagcatcagaaacacatgggtaatatgctatggtcgcacagtgcgcttagtggcacagacaggtaggacctgggactctcaacccagttctctcctcactgaagttcgctgcagtccctccagcccagcccagcctcatctgcatcctctaccatcttgcaagctcaaaacattatttcttaaggaacttgctcatttgactctgagaggcttctttctctagtttatcctttaattttctcctcttacagctacttattttctaacaacagaaaatccttttatgcacattatgcacataaagtcaccgtgtccaactgggactcacaccgtaggttactggactttacccactttccaggacttagctaattagcacacgaggccaactgcatgaaacgggcaggtgtcagctctgtgttttctctggggctggacaaggtttcttgctgccacaaggggctgtctgtggaggctcagcctgcctgccccatcacagttcaagcgaagagttagcatcaggg

SEQ ID NO: 74785 - DNA, 745 bp, Homo sapiens
tggccctagtcatctagtacctggccctggggtaatgaagacaagggaatagcagtccagagtgtgagagccagatacagaaggttgttgaaggaatgggttctagatggattggtctgtatacaaaaggtacactcaaagacaagttctttaccatctttggaaattagctagccttggaagggatagtccctccagtgtcagcaaggccccacatgtcaaagcatcagaaacacatgggtaatatgctatggtcgcacagtgcgcttagtggcacagacaggtaggacctgggactctcaacccagttctctcctcactgaagttcgctgcagtccctccagcccagcccagcctcatctgcatcctctaccatcttgcaagctcaaaacattatttcttaaggaacttgctcatttgactctgagaggcttctttctctagtttatcctttaattttctcctcttacagctacttattttctaacaacagaaaatccttttatgcacattatgcacataaagtcaccgtgtccaactgggactcacaccgtaggttactggactttacccmctttccaggacttagctaattagcacacgaggccaactgcatgaaacgggcaggtgtcagctctgtgttttctctggggctggacaaggtttcttgctgccacaaggggctgtctgtggaggctcagcctgcctgccccatcacagttcaagcgaagagttagcatcaggg

SEQ ID NO: 74786 - DNA, 1361 bp, Homo sapiens
gggcagggtggctcatgcctgtaatcccagcacttttggaggccgaggtgggcgcatcacctgaggctaggagttcaagcccagcctggcctacatggtgaaaccctgtctctactaaaaatacaaaaaaatagccatagccaggcatggttgtgggtgcctgtaatccccagctacttgggaaactgaggcaggagaattgcttgaactcggtaggcagaggttgcagtgagctgagattgtgccactgcactccagcctgggcgacaaaaacgaaactctgtctcaaaaaaaaaaaaaaaaaagttaccaaaccaggactaggagcagtggctcacagctgtaatcccagtactttgggaggccgaggcgagaggattacttcagcccagaagttcaagaccagcctgggcaacatagtgagacccccatctctatttatttttaaaaaaaaaagttaccaaactagttttagcttctcttttggtgcacaagccctgcagagctggccgtgctacctcccgaggcagtgtggggccacagtgcagaacttctgtggtgtccccacctgtatgcggaagagcacatggtccaacttggtcgtcttcaggttcccacaggatccatccagatgcgcaaagtaggtggagaaatgtcggagagcagacctattagataaaacatctaattaattaaatacacattctcaattaggtgccaaccacttctgagtcctctaccatctgtagagctagtcttaatagaaaatctttgagataatgcaatcccagcaatatttgatcttttttttgagacagagtgttgctcagtcactcaggctggaatgcagtggcatgatcttggcttactgcaacctccacctcccgggttcaagcgattctcctgcctcagcctcctgaatagcttggattacaggagcatgccaccaggcccagctaatttttgtatttttagtagagacagggtcaggctgstctcgaactcctgacctcattgtccacctgcctcagcctcccaaagtgctgggattacaggcgtgagccactgtgcctggcccagtatttgatcttaccactcatttgaacaatccacatagtagacacagaaaatgaataaaagaattgaagaaagatgaaattagaacactgaaacagaaaaaagttgatgaaacttctgaacaggaatgaaaacataaagaaaccaacaacagcagagttcagaaccccagggcagtagaagccagccaagggaaggatgtggacattttgcctctaacccctaaagagaaagaaaataaagaacacctaaaatctccatttgaaatgttgattttgttggaa

SEQ ID NO: 74787 - DNA, 701 bp, Homo sapiens
aatttccctttgccttaaccccgtaggagcacagtagacagggaggaggtcacccaggtggctgttcctgcttggcccccacttcccagaccattccaggcacggagagccgctgagctcactccatgggctgcccacgtggggtctggacccagccgccctcctgtgcctggcaggcagcccctgcgccatcacaggacccattgtgtggtgatcagtggcccatcgcctgccctcgtggtgggtgcagttcacaggtgctgccccaggcctggcacagtggccttctcagcctgtcccaggataggggacatgaatgatccttgcctgtgccccttcggactacgtgagtttggacactcactgcagaagtccckccaggtcccttttcaactgagttgtgggggacttgcttagtcctcacgcccagggtcaggggaggggtgcagagtctgcaccctaaatccgctagggccagagggaggtctcccaggtgacctctgtcctctccagtgacatgagtcctcccagatggcctcagccctctcaggtgacatgcttccatggtgactctggcccttgcaggaggtgggctagcacagggacatgagctgcctaactgccatcctcctcctgtatctgccagaggaagacaccttctgggcactggatcagctgatggctgaggagaggcactccct

SEQ ID NO: 74788 - DNA, 1344 bp, Homo sapiens
tgattttcaggtggggagtggctatagacctgggaactgatggccacctatgctataagtaacccaccccacctggggcctggtgttcacctgcggcctgatatccacctggtacctgtgtgtcaatctagtgcctggtgtccacttgaggactaggcagacacctggggcctggtgttcatcttgcacccagtgtccacctggaccctgtgtatcaacctgtggcctaggtggccactgtagctttatgtgcacctggggcctgagagtttcctagratctgatgaccactggggcccaggtatccacctgggatatcaggcttcaagtgtacgcccaggctccacatggacaccaggccaggagaacgccagcccttatctgagcatcaggtcctagatggatgcccaggccccatatgtacatcaggccccgggtatacactggactccaggtggacaccagcactcagttggatacacacactcaaggtggacaccaggccccacgtgaattcctacactccaggtaaacatcaggtcccaagtggatacctggaccccaggtggataccagtctctaaattaataccaggcctcagatggtccttaggagccatgtgtgcattagtcatcaggaagttacctaggcccaaagtggacatcaggccccatgttgacacaagagctagttggaagtcaggccccaggtggacacccaggccctaggtaaatacttaggtcccaagttgatggcaggccctatgtgaacactcagaactcaggtggacatgaggcctcaggtggacatccgagttcatctggaacctcgtgttacaggccccatgtaaacaccaggccttaggtggatacccaatctctaggtggacatcagagctcagattgacacaaagaccccagtagacataatgtaccaatgaatatccaggccccttgttaataccccggccccaaattgacaccagggtctatgtggacacacaggccccagttagaaaacaggcccaaggtggacactggactggacatcaggtcctaggttgacaaccatgcttcaagttgacaccagaccccaagtgaacatctggccccagctggacactcgtcccctgatgaatacctaggctcaaggttgacatcaggccccatgtgaacactagaccccagataaacacttatgccctaagtagacatcaggcctcaggtggttacccggtcccaaggtgaacatcaggaccctgatgagcaccagttatcaagtggattcttaggccccaggtgaatatcaagccctaggtggataccaggccccaggtggatacca

SEQ ID NO: 74789 - DNA, 2370 bp, Homo sapiens
ttttgtggtatcttaacatattctagtcttgtcttgaattccttaagactttggggtaaagaactctattgcaacaagtttccacatcaaagtgggaaagaggaagattaggttaagcattaggtcgtcaggtatgtaggacagctaataccattatcagaatggtagtgatagccastttgcattctgcatattagttgtaacaaaaatattcagcattttagtgacaaaaccaaagttgttgtgaatcagtttgtactttattttttgagatagggtcttactctgtcacccaagctcaagtgcagaggtgtgatcttggctcactgcagcctcaaccacctaggctcaagagatcctcccagcccagcctccttagtacaggtgagtgccaccacacccagctattttttctctagtttttgtagagattgggtctcactttgttgcccaggctgttctcaaactcctgggctcaagcaatccttctgcctcaacctcccaaatggtgctggggttacaggtttgagccaccgcacctggccagtttataatgttaatggcttttggagcaggaaccagtgggtgctgcttcttgtctgcaagatgaggagcctcctctccccagaagtgaggcatcttctaccacaagggaggctttgcccaaacagtcaccgaaaggctgagattggggagagaacaaaacaggagtgaatatttccctggaaactagctgctccccaattcaattctactgcagacattcagaatgaaggggacattcagctgaggaacaggagtgcactggctgttaaaatctcaggttgtaacaacaattttgcttcattttccctaaataatttttaaacaattgttcttaggtggttttctaaacttcgggtaatatctgtgaattagtaaatgttctttaaaagattagataatatttttattttgtttaattatatgtgtttttaaactaattttgtgggaaaaataatttctttccttccctgttataccaaatacagcctttagctcaagacataagtaattccaggaaaactggaatttaagttcaatatgttacactaagtacatttgaaagttcatgcatttttattttaatttaaaaaataaatttgctttatgcctagagaaatcagcagaccagacctccctggatacgccttctgctgcactcatcctcttgaatgcccagctccagggaggtccatccccaggcctgatggctgtccccatctcttcatctctggtaacgttttggcttgatttgcagctcatacagggaaggctttgtagccctgggaaatttctactaaacagagaagtggttttgtgaaggtcaagttttttcagctgtggtgatggaaaaaccaaattctgccaaagtatttagatagctttattctaagccaatgcgagtgaccatggcctagggttacacagtcttaagagctcctgggagagtgagcccaaggtggtcagcttacagtttgattttgtacatttcatggagacaaattgcaaattaagttgtaaatcaataagtggaaggtatacattggttcatcctgaaaaggcaagacatctcaacgaggggtcttacaagtcataggtgagttttaggaattctttagttgacagttggtcaagagagttaaaccactgtgtaaagacatgaagtcagtagaaaggaatacttgagttaagataagggggtctgccatctgttatgtgatgctgtcacagggtcaggttggaaaataagccacattataccaggttaattgaaaaaaaaatcatgagattttatggcttgtagagtgtgaatctccaggccccttagacaggatttttggcaagagaataaaaggtcagagttgaggcctcagtccccactattggccaaagatcattttatggaatgtatgtgaaggccaacaaccaacaggaagtcccacaatgctaggaagtctcattcccagggttgtttatttggtcatctgtcattggtgatgatagtttcaatattagtgagttcagatcatagaagaaggacacaatctgacgtgatttaatagccaattgtttaagtggtgagagggagtaaggcccagggttcaatctgaaaagccatcctggatcagatctatcctacaatttatgacgatctgggtctttgattgcatctttttcttttcctgcaataggcatggcattgacaggagacatataatgataaaatagcaatacatgtataaaaatagtgaagattgggcatacaagaaagttatagatagaatcagaggacagtaaacaacacaaccagccaaaaaagtccccaca

SEQ ID NO: 74790 - DNA, 1356 bp, Homo sapiens
ttttggatttgggatttttttcagatattggaatatttgcattctacttaccagttgagcatacctattctcctttgcaacagagtgctaatattctcttctgtcttttttgttttgtatggtggtctatttccatcttcttctggaagttaacatctatgccatcaacagttctctaaatttgtcctgatttttcatgtttccttcttcaaagatctcttgagatttttggtttctatgcccaacttaatttttgtgtagaatctttaactagttgtccagtcccaagaaacccatcaaacttcacatgtctttactgacaaatggacattgcatttctcattgattttactatctctggggaggtgtgctccctgaaggcagcacttttatttccagtgaaaaaggcacggttaggcaatatgggaaaggcatttctgaatttcaggaccagtcctaaaattgagtttgggtcagttctctctagaaaatattctattttatctacaaagcaaaattattttattccttacaataatatcagagacagtttcgctactatttacattcagtcttttgccctaagtcaaacagtcaactctgggaggaggagatctttgaaataaatttattctgtaccctatagacagacacaaattctttggaggcctttagttatatctccctaagaactatgaaggaagataataggcaactgacttcaaaaaattttgttctatttttttgaaaactcgactcatttatgctctccagtgtcttatctccatactgctctgtgttttacttctgaatcaatcttccctccctcccaaatattttcagtgtgacttctggaaacctcattagaggacatcgactccatttctttgctttaattaaaattcagctatctgtatggggacattgcttcccttgacgtgtgctccactgaaggctagtcattttcccaaaggctaaggtgtcatagaatttatttaatagaagtaggttggcataattttagctccatatttcctattcccaaccactattcctctattttaatacaaaagccccctctttactgtctatccatctaactataatgtcttctaactataatgtcttctaacaactgccacatttattccagaacttcctctccacccaagcaacatcattttctcagtttcctctgagactttttcttgaattcagccttccactgcctatatcttagwcatttttttaatggcctcaactgttccatgtaaagaaccataagcttaaatatccatattctcttagccttattttgatcttttaaaatacttgctgagtatcccttatcgaaaa

SEQ ID NO: 74791 - DNA, 1689 bp, Homo sapiens
acccacttcttccagctgcttcagtgtagggaagtagttggcaggcttactgtgaagctcctcccagactttagccaacttcaatctcaagccacaggcagagagtcttcttggtgtagttatagtcctttcctgccctgttttatgttggttagctccagcttgagttcctctcttggagcctttactaaaagtagcaagaagcaagcatcttataccagacacttgaaatgttttcctccatgttctttggagttagaggttcagawgccatgtgctctaccttccatgacatcatagatggtggttttaacaaacatttgtccatggcctagcaaaactcaccagctttatcactgtcacatgctgcggaattctgagtaaatgccatgtatttcagattatcttctgttcagctcctcttccaggtacaaagttttgtgttagttaagatgcaggtttggtggctgtgatagaagttcaaaataagagtggcttagacaagaaaagagactatttcccagtcacataatagaacaagttgttaaggtggcatagctttacaggggaggtcagtgcttgggtatcttctatttttcttttatccagtcactatggcatggcctttgtggcccaaaagagctcatcaccacatctgcatgttagctagggaaaaggggaaaatactcccttcactgacacacagcagtcaccaaagctggtcacgtggctattgagaaggtgcaagggcagctgggaaaactgcagtgcattctgggtattggtgagaaggcagccactctcatctactctgatattgagaattacatgtgattgcttttaattttcatgttaaacttattatgtgagttggaacattaaagaaaaaatacacaaacaaataaactagagaatattttccactccattcatgtgaccgccagtctttgatggagttggagcctgacagagatgagaggcagagctcacaggatagaaagatttgaatttgactttacttttaaatgctttcttaataactgagtccaaaagttaagttaaaaaaaaaaacttgtttaattcttccctctgtctctaggtagccctgcattgacattatcatgaatacattccatttaaaaacctccttgaaaagacagttcactaattgcctctattaatgtttctcagttttctagccaaaacaaatatctcaagttgtgcatttcctttacgtaacagtgtgcagttgtgataaacaaattatacatggaactgacatgatcctacaacataaactctttgagaactgaggctgtgcattttttagattagtagatactttgcaatttttttaatggagtctcactcttctgcccaggctggagtgcagtggcatcatctcagctcactgcaacctctgcctcctgggttcaagtgattctcctgcctcagtctctcgagtacctgggattacaggcatgcgctaccacgcccgaatactttttgtatttttagtagagacggggtttcaccatgttggtgaggctggtctcgaaatcctgacctcaagtgatctgcctgcctcagtctccctaagtggtgggattacaggcatgaaccacctcgcctggcaatcttctttcaacttaatcagcccttatacactcaaagagttacttggatgca

SEQ ID NO: 74792 - DNA, 1689 bp, Homo sapiens
acccacttcttccagctgcttcagtgtagggaagtagttggcaggcttactgtgaagctcctcccagactttagccaacttcaatctcaagccacaggcagagagtcttcttggtgtagttatagtcctttcctgccctgttttatgttggttagctccagcttgagttcctctcttggagcctttactaaaagtagcaagaagcaagcatcttataccagacacttgaaatgttttcctccatgttctttggagttagaggttcagatgccatgtgctctaccttccatgacatcatagatggtggttttaacaaacatttgtccatggcctagcaaaactcaccagctttatcactgtcacatgctgsggaattctgagtaaatgccatgtatttcagattatcttctgttcagctcctcttccaggtacaaagttttgtgttagttaagatgcaggtttggtggctgtgatagaagttcaaaataagagtggcttagacaagaaaagagactatttcccagtcacataatagaacaagttgttaaggtggcatagctttacaggggaggtcagtgcttgggtatcttctatttttcttttatccagtcactatggcatggcctttgtggcccaaaagagctcatcaccacatctgcatgttagctagggaaaaggggaaaatactcccttcactgacacacagcagtcaccaaagctggtcacgtggctattgagaaggtgcaagggcagctgggaaaactgcagtgcattctgggtattggtgagaaggcagccactctcatctactctgatattgagaattacatgtgattgcttttaattttcatgttaaacttattatgtgagttggaacattaaagaaaaaatacacaaacaaataaactagagaatattttccactccattcatgtgaccgccagtctttgatggagttggagcctgacagagatgagaggcagagctcacaggatagaaagatttgaatttgactttacttttaaatgctttcttaataactgagtccaaaagttaagttaaaaaaaaaaacttgtttaattcttccctctgtctctaggtagccctgcattgacattatcatgaatacattccatttaaaaacctccttgaaaagacagttcactaattgcctctattaatgtttctcagttttctagccaaaacaaatatctcaagttgtgcatttcctttacgtaacagtgtgcagttgtgataaacaaattatacatggaactgacatgatcctacaacataaactctttgagaactgaggctgtgcattttttagattagtagatactttgcaatttttttaatggagtctcactcttctgcccaggctggagtgcagtggcatcatctcagctcactgcaacctctgcctcctgggttcaagtgattctcctgcctcagtctctcgagtacctgggattacaggcatgcgctaccacgcccgaatactttttgtatttttagtagagacggggtttcaccatgttggtgaggctggtctcgaaatcctgacctcaagtgatctgcctgcctcagtctccctaagtggtgggattacaggcatgaaccacctcgcctggcaatcttctttcaacttaatcagcccttatacactcaaagagttacttggatgca

SEQ ID NO: 74793 - DNA, 578 bp, Homo sapiens
ggagtattctacacctcctgggaggtccctcacttccaccttcaccygacataacccctgctcctgttccctcagcctggagagcttgcccagtagagcacagggtagtactggactgacctctttggaaagggtgattacatcctcatttcagctctccctcttcctagctttccacatagaattccagggctccatgcagcatttgctggacatgagagggaaaacttttagggcagggatctgccctgggtggggacagaggagtatcgtggagtctgggtgtcaggagtgtgagccctgcccagctggccagcccctgtccccatgctgctcgatgcatgatgtttcctgcacaagcttccttttgagggaggcttccagagtgactgcagtgaggtccatgctgttgggggtgacagagcagccctggaggtggccaaagagaagcaggcagaggaagctcctccaagcaggcttggaaagaaattgccgcatatcacttacgtcactcttgccactagaaggacaatttttacagtggagtggaaggaaacgaatatgctgtgggagagaag

SEQ ID NO: 74794 - DNA, 578 bp, Homo sapiens
ggagtattctacacctcctgggaggtccctcacttccaccttcacctgacataacccctgctcctgttccctcagcctggagagcttgcccagtagagcacagggtagtactggactgacctctttggaaagggtgattacatcctcatttcagctctccctcttcctagctttccacatagaattccagggctccatgcagcatttgctggacatgagagggaaaacttttagggcagggatctgccctgggtggggacagaggagtatcgtggagtctgggtgtcaggagtgtgagcsctgcccagctggccagcccctgtccccatgctgctcgatgcatgatgtttcctgcacaagcttccttttgagggaggcttccagagtgactgcagtgaggtccatgctgttgggggtgacagagcagccctggaggtggccaaagagaagcaggcagaggaagctcctccaagcaggcttggaaagaaattgccgcatatcacttacgtcactcttgccactagaaggacaatttttacagtggagtggaaggaaacgaatatgctgtgggagagaag

SEQ ID NO: 74795 - DNA, 578 bp, Homo sapiens
ggagtattctacacctcctgggaggtccctcacttccaccttcacctgacataacccctgctcctgttccctcagcctggagagcttgcccagtagagcacagggtagtactggactgacctctttggaaagggtgattacatcctcatttcagctctccctcttcctagctttccacatagaattccagggctccatgcagcatttgctggacatgagagggaaaacttttagggcagggatctgccctgggtggggacagaggagtatcgtggagtctgggtgtcaggagtgtgagccctgcccagctggccagcccctgtccccatgctgctcgatgcatgatgtttcctgcacaagcttccttttgagggargcttccagagtgactgcagtgaggtccatgctgttgggggtgacagagcagccctggaggtggccaaagagaagcaggcagaggaagctcctccaagcaggcttggaaagaaattgccgcatatcacttacgtcactcttgccactagaaggacaatttttacagtggagtggaaggaaacgaatatgctgtgggagagaag

SEQ ID NO: 74796 - DNA, 578 bp, Homo sapiens
ggagtattctacacctcctgggaggtccctcacttccaccttcacctgacataacccctgctcctgttccctcagcctggagagcttgcccagtagagcacagggtagtactggactgacctctttggaaagggtgattacatcctcatttcagctctccctcttcctagctttccacatagaattccagggctccatgcagcatttgctggacatgagagggaaaacttttagggcagggatctgccctgggtggggacagaggagtatcgtggagtctgggtgtcaggagtgtgagccctgcccagctggccagcccctgtccccatgctgctcgatgcatgatgtttcctgcacaagcttccttttgagggaggcttccagagtgactgcagtgaggtccatgctgttgggggtgacagagcagccctggaggtggccaaagagaagcaggcagaggaagctcctccaagcaggcttggaaagaaattgccgcatatcacttacgtcactcttgccactagaaggacaatttttacagkggagtggaaggaaacgaatatgctgtgggagagaag

SEQ ID NO: 74797 - DNA, 614 bp, Homo sapiens
  misc_feature (1)...(614): n = A,T,C or G
catctgaggaggtgaccttgagtaggttcttgagtgatgaaggcactgccatgcaaatatctgaggaggagctccccagtcaggggctacagcatgcgctaagcctttgaggtgggaacagacatgctgggtttgaggaacaacgaaggatcaagtgtggctggagtggagtgagcaggggagtgagtggcgggttgtagggcccaggggcacagaggccagatcatgtggggccttagagaccatcgtaaggagtttggatttcattctaggaggagtgggaagncattggagggttaagccaaaaagagacatgatctaatttatgtttcaaaaagatcactttgcctactggtgaaaaatagcttagggtggagtgaaagtgaggggaccagttaggaggagacgggtggctctggtgggaggaggcagggacgggggatgagaggaggaggaagaggtgacacttcaggagaaaggggcagttccttcctcctgtgtgaagcctgttctytgatgtgggagcagagggttttcctgggactcgtggcagtttgtcatagtgattctcaagactcagagatggccccaggtgtttccaccattctgcagcg

SEQ ID NO: 74798 - DNA, 1479 bp, Homo sapiens
agggacatgcactgcacaggggattgaggccctgagctttgggttgaatgaaggttgccatgtgggggtcattaggggagagtgttaaatgaaaatgtcttataagctgcatgatgtttgcaggaggttgtggttttcttgcctgccctgcttccactgggccctgcggttatcttgtctggcccaccgcctactggactgtaggaaggtggatgtgttgtccagcccactgccactgcactgtaggaaggcggatattttgtccagcccatcaccgctggaccatttctgtatataaggtagttctcctgtccagcttgccaccactggactctctcccctgtatggaggccactaataaaaccccacgtcttgtttgctagctctgggtctcttcttcagactcttgaatctggtaccctccctagtgaggttaatagggtyttggcaataatagggcccaccctaatgaccacatttaacctaattgcttctttgaagactctgtctccaaatacttactgtcccattctgaggtactgggagttagggcttccacgtataaaatttgggaggacatgtttcagtctgcaacaggatctctgcactagagaagagttttcatggaaacaacatcccattggctaggagaaatgatttacctgcccttgaattctgttctttggtgaatggcaaatagagtgaatagtgagtttctgggttttaattttcctagcactttctcattatcccagatgtgctttagagaaagaaagggcaagacttggatcctctttcattgggttttattgtgtttatcaagatcaaaagcaaagttatcctcagtaaagtctgtgaatactttctcccatcattctcctggagaaagggcccaaacagaagggactgggtcctgcctctccatgctaccacacctgttgcagggagcagagtgcagagcctgtcccctggacctagatggttggctcaacacatgttggacagggcatgggtcattcgtcattctaattagctccagtgcctgtttccccagcaggcacagagtcaggacaaaatccacatctgccatgtgaacttctgcagaggtgccacttgctgagtagggccaaagtcatgtaattattgtaattatttttgtttatgggatgtcccttcccaggagatcccaggcacttcactgcccagaagttgtcacttgagagcaggacagcattgacccatgctggggctgaaggaagtgatgaagggccctgaccacccatggtgctatgctggctgcccggaagccatggcatgcataagcttctggagaggccactagggggtgtcacactgctatgcagagagtggaaggggggctcgggttctttttttttttttttgctggaggaggcgaggttagctagacatggaagattggttctcaaaggctatctttgggctggttttacaaaaacc

SEQ ID NO: 74799 - DNA, 1037 bp, Homo sapiens
gatatacaaaaaactgttgatagtggttacctttgggtggatggaggacatttggaactttttgttttagacatttctccagtgttttaatttttctgtgttcatgtgttactttttgttgtttgtttgagacagggtcttgctctgttgcccaggctagagtgcagtggcaccatcatagctcactgaagcctcaaccttccaggctcaagcgatyctctcatctcagcctcttgaatagctgggaccacaggcatgcaccatcatgcccggctaattaaaaaaaaaatttattttgtagagataggatctcactatgttgcccaggctagtctcgaactcctggactgaagcagtcctccccttgtcctcccaaagtgttgtgatgacaggcatgagccaccacacccagcctgttttacttttagttaggaattttgaagagaaaaatgatagactctagaggaagatgttgggcttgcactcagataatccaagtagggtacacttcaagttaagttcgcgtgtacagacctggtggcctttttccttagcttcattagggtgatgtgataagtggaagcaacatggtattggtttgtgttattgctgtaatgactgcaccgtcactcactcggggtgggctaatacctataacgagagaacagctacttatcacggagtcatattttgactcttgtcaaatttaggctgatgtcttcttaggttactacaatctttatgacaatcagtaagagaataagggtgtgtatttccagattacagaaactggttgagccacctgaggcaattcacttggccactctgtatctatttttgttctctttaaaatgcttatgggaaaaatatgttgacatctcagacatttacaaccatgaaatttcttaattccaactatgtgtgattttacataccttgcatttcattactgggtctcgatctaatatttttccaaatcctatcaaggtatggtagtgtattcacttcagctaacaaattatccttcacaatagaat

SEQ ID NO: 74800 - DNA, 1095 bp, Homo sapiens
tgaaaatgcatattgaccacaaacagagctatacttcagtctaaggattgaaactgaaaccattgaggaaaacccaagaatttctggtacattttacatttttgtctagtttccttatttacctctttctctggcgtaggtattttcaggcttaatcccagccttgaattttccatttctgtgctattgaccaagaggtagaggacgtgcttccttggcctcatgtaatataatttggtaatggtatcaatgctttataattgtgaggtgatttatggtttgttgctcattcatacccattttctaatttttttcccatgacctaacttttggccttaatggccacctgatattatccccactttaaatgaaaaatctactaagtagtaaagttgggataattacaaataattatggaggcaaaatgtttttgtgatatttatgacttcttccttcttgcttaaaaaaattrtttgtttctctgattaacggaaggagatagctggagattagaagatgaccaggagaggctttgaggaagaaatggtttgtctagaatacatactaagaaatggaatggctgtgacatatttacagttatgatagacattgcaaaattgcctctaaagtggctatatcataatgaactctctcagtagtataaaagtatctgttattcaaaaccttttactttaaagtgtttgccaagctgatgggtaaagaatggcagtttatcttaatttgcattctcctgactacaggtgagacagaacgtcttttcatgtgtttattagccacttagattcactctttcggaaattgcctgggcatattcgttgtccgttttttattaggttgtttttttttctattgatttattgtcatttttaatgtattctaggtagaatcttttgtctgctagtatatattgtgaatatggtctcctagcctatcattttcacttatttgtgtatttaaaaagtaatagtaagaaaataagtgttatatgtcaaaaagaaatacttaagatattgatttaatgtgagtgttaaaaaaataagaaaaaagtgggatttggagttatcttgaagaatg

SEQ ID NO: 74801 - DNA, 1095 bp, Homo sapiens
tgaaaatgcatattgaccacaaacagagctatacttcagtctaaggattgaaactgaaaccattgaggaaaacccaagaatttctggtacattttacatttttgtctagtttccttatttacctctttctctggcgtaggtattttcaggcttaatcccagccttgaattttccatttctgtgctattgaccaagaggtagaggacgtgcttccttggcctcatgtaatataatttggtaatggtatcaatgctttataattgtgaggtgatttatggtttgttgctcattcatacccattttctaatttttttcccatgacctaacttttggccttaatggccacctgatattatccccactttaaatgaaaaatctactaagtagtaaagttgggataattacaaataattatggaggcaaaatgtttttgtgatatttatgacttcttccttcttgcttaaaaaaattgtttgyttctctgattaacggaaggagatagctggagattagaagatgaccaggagaggctttgaggaagaaatggtttgtctagaatacatactaagaaatggaatggctgtgacatatttacagttatgatagacattgcaaaattgcctctaaagtggctatatcataatgaactctctcagtagtataaaagtatctgttattcaaaaccttttactttaaagtgtttgccaagctgatgggtaaagaatggcagtttatcttaatttgcattctcctgactacaggtgagacagaacgtcttttcatgtgtttattagccacttagattcactctttcggaaattgcctgggcatattcgttgtccgttttttattaggttgtttttttttctattgatttattgtcatttttaatgtattctaggtagaatcttttgtctgctagtatatattgtgaatatggtctcctagcctatcattttcacttatttgtgtatttaaaaagtaatagtaagaaaataagtgttatatgtcaaaaagaaatacttaagatattgatttaatgtgagtgttaaaaaaataagaaaaaagtgggatttggagttatcttgaagaatg

SEQ ID NO: 74802 - DNA, 705 bp, Homo sapiens
aaattattttaaggaataaagaattataactgaatctaagcaaatagatttttaaaaccacattcttgcatttcttttcaggtagtctctcaaagtacaaactataaaaacaaaatcatacctggaattagaacagtgaatgtctttagaaatgatctattctggagcctttcttttaaaaataaggaaattgaggctcaggttaaaagatgtgttgctgattatgcaggtatctaatatctgagctaagacttgaagccaggtctttctattgactgcacatctttctacttgcttgttcttgcctctgattcttactcatgatcaccttaaattgaaactcgattaaaattatattggaacaactasctggacttctggggaaaaaaatcaataaacaaatctggctctatttcctacttcttatgtcagaaaaaattgagattgatcaagcacttaaatattataagtggaatcaaaaaattactaaaagaaaatatggataaacatattttgtagtatgagggtgtgggcagaccctcctgaaagttatctagaacaagcttagttaaactggacaggtaaaacatcttaaatttccatagggggcaaaagacataaataagacagaaagacaactgataaactttaggaaaactttgtactattttgacaaaactaagactttaatatattaggagcttt

SEQ ID NO: 74803 - DNA, 678 bp, Homo sapiens
ttatatatttctagacatgctgatggccaaccaaagcatagaaatactagtaaaaaaataatccagagatgccaactcaccaaagccatgcatacagagcattttcatacatttctgtgaagatgcaatacatttgattcatagtcagcatagatagatgggagttttgaggtcaaatataaagcttgtgtgctcccagaaaagcagcattttgaaagtttgaaactcaggccaaagcactctagtggggccctatccttggcttctttgctttctcactctgtgctggcagggctcttgttgacttcaaagggagaggctctggctgggtaagagaagttctctttgagcgattaacttgagcaaatgagctgcattggaggacttcctaccaataagatcttgcctgtgataactaggagcacatttctaactttgaagaatatgagtgcttataataagtatttcagccacacaccgggagacaatatctgaggtaggtgggttcagtagcttttaaaaataaayttaaaataacatatcagtaagtatgtatgtaaatataaatacataaaatatgaacatccatttgtataagtctgtatttttcacatcgaataaatgggactgcagaagaaattttcctactgtaagaatcctcaatattttaacagggcg

SEQ ID NO: 74804 - DNA, 625 bp, Homo sapiens
ttccttttcacttgtgaaaagtgtcattgtaaaatagaaacatgctcagcattgccatttattttcaaagtggaagaaattctcctctctgaatgctgtggctgaaaccagaagaagtgaggccaacctcaaccagtggtttcttgaactggatgacctctatttacccagacagagaggaggaccctcaggaaacaaaaaacttcttcaactgcaagagaagcaggaagtcatttgctatgaccttaccttgctatagggtttgaccatatctagcaaaagtctttcatgtgccctgctccctgtgatccttatgataatcctggggaaagctatagagagttctattcccatttcaaaaaataggaaatcgaggctcagagaggtgactcaaggcctcagagctgtagagccaggactaacactcgactttgcttactccccatccagtggtctttctgctaccccaccctgggcttccatttatctcagagcagtgtgagtttctaccttcacgcttgccttgctctcctggtgagatggrtcttggcctttgcacctggatttccagctgatacaggcacttgaagcttatttcattccctttgtcaacccatcatgtggg

SEQ ID NO: 74805 - DNA, 765 bp, Homo sapiens
ctcagttctgggaattgcctgcctctttcccagaaaactcatgaataagccgccccttgtttagcatataatcaagcaataactaagtatccttagtctagcagcccatggcactgctctgcctatggagtagccattcttttgtttcttcacttcctaataaacttgctttcactttattctgtggacttgccctaaattctttcttgcatgagatctaagaacgctctcttgaggtctggatcaggactcctttctgttaacacttcaacccaagaagaatcagaagatcaaaggtaatttgggaaggccggaactgtcagggatggaggggagaggaaaaggcagggcttggtggggagctgtttggcagctggggtgaaaggattgctctcccactgctgagattctccagccccttcctgtctgttaggaatagggcagcmtggaatccctgtgggcaggtctggggcttccagatgttccaggaagggggctcacaaaggctttccctccagggagataatggcactgcctcccagcttctctgcaaaggtgcggtcgttcttgacttccgcgtagcagtttgcttgtaattcatgcttgatccccgtcagcttcttcttgatagtgtccttggagttggcatagatcattttgctcttcaggggtgcagactcaggcccagaagctgaacaccaggtcctcctccttgctctcctttgtctcacagtttgcgtcacagagggcgttatggcagtcttt

SEQ ID NO: 74806 - DNA, 1162 bp, Homo sapiens
tgcataaaggattataaatcattctcttgctggttttaagtgtcaacattgtcccctataaatctggtctaattaccccacagtatgatactataattctttaacaaaatcttaatggtaccagctttcaatctagccactatcaamtgatataaaaatatgaatcaccaaattagacgggctcttaaaatactacaattccattttatactcataaatacaccattcatattctttcaactatacatgcacacatgcagagagatataccaactcctttgggcttctgcaaaatttaccaaaatttgacagagagccagaaaatgataggtaactgtttggtaatgtgagcaggatggcttttgtgaagtggaaaacatgatcatagatcctggctgaacaagccaatatgtgaggcagccactggcccttttggggaatcaagacaaatgaaacaacaagaacgaaggacactgagaaatcgacgaatctaagtattcctcagtatgtcaatatctatttctccttgtgcataaccattctgccacttcccacccaaaagccagttgctgctgagccatagtaaaactccagggaggactttctcaaggttaattaaaggctggcccaagctcctgagttctgtttcctcacctgtttgtgaatagtttgtgccagatctgcgtgaccctgctttactcttgattgagggtggctggaatttggtggaattgtacccagtggagaatgatttggtaataagatgtcttagaggcactgacacacaatccagtagcatgaaagaataaatgaaactcctgaatgtggcaagggagtgtacatgaagacatgtgtacacagcatgtcttcaggaagagcttggaaatcccttgaagatactgacacattcctccaaattttaggactgaaattggctgaagctctttattcttcatagggagaaactgcaggagctgcagggaaacaaggaagagaagacacagtacctgatgacaaaggaaagacctaggggaccaacagtggcaaatgcagaaagaaaaggaagaaagacttccccagggagcccagggcagggtggcctacaggagccacaaagcatgatgagtctctagaggggagggagagaggagcagctaacagg

SEQ ID NO: 74807 - DNA, 951 bp, Homo sapiens
atagaaatctactttgttctrtatctgcggtgatgagtagcttcatgtttattaggaattatggaaagctcagttgaaactgtgctttcctctacttgcttataatgtgggaactgatgaatacaaaaaccagtagctcctttttatgtagcttttaaactatttaatgtacttccgaagaaatgtggattgataatatattttcttcctttttaaaatgaagaaactgaaactcagatgtggtcatttgaccagccccactctgtaggaagcagaatcaggatttgaacccattattttattgataatgtaggtcgatttttgctaaaccacaccgtttctcacaattctttgcaaactgtatattcatgtgttgaaaaatttaatatcttttctgacttctttggaatacactaggctaatcttcaaggattgtaaactccatgtaggttactggttttactctaagggtctccaggctaaacatgtagtatttgcttaaaaagtgcatgaaaataaagtgtggagactccataagataacattctgcttcggtgaagtaaccaaaacagaaattaagaaaacaattttatctgcggtcgtgtcaaaaataatatacttaggaataaaattaaccaaggatgtgaaagattattgcaccaaaaactgtaaaacattgatgagagaaattgaagacacaaataaatggaaagatatctcatgatcatggatcagaaaaatgaatattgtcaaaatattcacactacctaaggtgatctacagattcgttgcaattcctatcaaaagtcccatgactgacacccaactgattttcaacaaaagtgctaagaacacacattggaaaaaagataatattttcaataaatggtgctggagaaattggatatccatatgcagaagaatgagattaaatcactacttctcatgata

SEQ ID NO: 74808 - DNA, 951 bp, Homo sapiens
atagaaatctactttgttctatatctgcggtgatgagtagcttcatgtttattaggaattatggaaagctcagttgaaactrtgctttcctctacttgcttataatgtgggaactgatgaatacaaaaaccagtagctcctttttatgtagcttttaaactatttaatgtacttccgaagaaatgtggattgataatatattttcttcctttttaaaatgaagaaactgaaactcagatgtggtcatttgaccagccccactctgtaggaagcagaatcaggatttgaacccattattttattgataatgtaggtcgatttttgctaaaccacaccgtttctcacaattctttgcaaactgtatattcatgtgttgaaaaatttaatatcttttctgacttctttggaatacactaggctaatcttcaaggattgtaaactccatgtaggttactggttttactctaagggtctccaggctaaacatgtagtatttgcttaaaaagtgcatgaaaataaagtgtggagactccataagataacattctgcttcggtgaagtaaccaaaacagaaattaagaaaacaattttatctgcggtcgtgtcaaaaataatatacttaggaataaaattaaccaaggatgtgaaagattattgcaccaaaaactgtaaaacattgatgagagaaattgaagacacaaataaatggaaagatatctcatgatcatggatcagaaaaatgaatattgtcaaaatattcacactacctaaggtgatctacagattcgttgcaattcctatcaaaagtcccatgactgacacccaactgattttcaacaaaagtgctaagaacacacattggaaaaaagataatattttcaataaatggtgctggagaaattggatatccatatgcagaagaatgagattaaatcactacttctcatgata

SEQ ID NO: 74809 - DNA, 979 bp, Homo sapiens
tgaatcaagaaattggtaattttagttttagagtcttgttggcttttaaacatctgttcacttttgtggttcacagatattcaatttttattgaaatttaaatgtgaaaacacatctgtttctctgattcatatttttatggtcaactctgaaatgagacagttgtgaactgagaaattattcaaaacacaagggatgtgtcttcctattayttgtgaggaggaagtacaataaagtcctgaaatcagcaacttgcattggtggcttgtttacataaggaatatattaaatatttccttttctactgtggatttctgtctttctcaattagactataaggtcaatgtaagaagggttcctaaataaatgattaaagaaattaaagtgtgaatagcagagctacattttgaattagagatttttaaaaatattgtcaaggtaagggacctgcggatgatatttctcatggaaatctatacttgtttagatattttttttccagtccaatgaggtaatgtctgatcgcctagatgcttctgtcacaaccttagcaaggatcatgatttctcaattgtattgctcaagagcctttggctgctcttactgaccagcctattactcatcttgtacactttgatttatgtattcaccacactaccttcaaggtaatctggccaaaattttattttctaatttttcagcttaaagtttattaagactttaggacacgtctagattcctttcctctaccataccctcttagtttcacttcaaacctcagtgaaagtgtgacctttttcaagaagctctcagggctggaaccagatatctgtgatctagttacatttcccacattcttaccaccttgagttataacatgtaggattatttgtctgctctgcccaataaagtgtaagacacctgagaaggatttagagtaagaataaaagcaagagagagagagactgagagagataat

SEQ ID NO: 74810 - DNA, 780 bp, Homo sapiens
taaagactaagcctcaggaatctctgaacagagagtcagctaggcttcaacaaaagtctcatctaaaccctcttgacagaatagagagatgggaagggcctcttgcaacagctattagttgctgtggcctagaattgatgtgtcttttctgcttataacccattgtctggacaaatcttactgacttaaacaaccacttattttgctctcaatctttaattggaacaggacttgaagaaatgactcctctcctattcatgtagtgtcagccccaggagctcaccttggctggagaatccacctccaagataccttacttagacggtatgcaatttcatgttggtggacaactagggaatattttctccacatgggcctcttcatatcacttcttcctcacagcatggcaactgggttccaagactgtgcatttgaaaagacaggaagtaggtattaccagtgtcttaagacctaggtccagatgctggcactgcgtcacttctaagttccataagtcaaggcartcacacagcccactcagatttgcataaagaagatataggctcctggtcttgttgggtgaaatgttacatactgtgtggccatgataagtgcagatttcaagtacagttttgctgtctctaaagacataaggataagaaacaacaaaaacaaaaattgtcgagtgggacctaattaaagaggttctgcacagcaaaagaaattatcaatggagtaaacagacaacctacagaaagggagaaaatattcaaatactat

SEQ ID NO: 74811 - DNA, 745 bp, Homo sapiens
tttatcttaataggaaagaaagaacctatttgtaggcaagaaagtagaagaagaaacaaaaagtggaagacaggagcaatacttatggagcaaagcacaggagaaatgggagcctgttggatcctggccacgggggctgtagtggaccttggagaggttcagggacacttcttccttgaaatgagattgaagaaagaggaggagtgtggggaaaagcaagagagatcagattgttactgtgtctgtgtagaaagaagtagacataggagactccattttgttctgtactaagacaaattcttctgccttgggatgctgttaatctatgaccttacccccaactccgtgctctctgaaacatgtgctgtgtcaaactcagggttaaatggattaagggttgtgcaagatgtcctttgttaaacagatgcttgaagacagcatgctccttaagagtcatcaccactccctaatctcaagtacccagggacacaaacactgcggaaggccacagggacctctgcctaggaaagccagttattgtccaaggtttcaccccatgtgatagtctgaaatatggcctcgtgggaagggaaagacctgaccgtcccccagcccgacacccgtaaagggtctgtgctgaggaggattagtagaagaggaaagaatscctctttgcagttgagacaaaactgccttaggcctggaggtgggacatgcgggcagcaataccgctttgtaaagcatt

SEQ ID NO: 74812 - DNA, 805 bp, Homo sapiens
tattttgctattataaatagttatgactttctatcatcctatgatgattccctcagaataagtttctggaattagaatgcaaaattttacattttttaaatagcattgccaaattatcttccagagattttgttccaatatatactcccaccaagtgtgtatctgatccattctgtaatcattttctctctttctctctgtctctctctctctctctcacacacacacacacacacacacacacacacacaccccagcactctaaacttgaatcattaaatggaaccaaaaacttcctaaaagtttcactaaaactacctaggaaaactttgcaaaattacccaccctagaaattgcagtgctagctcctmctgagtttgttttgttttgtttttttaagtttatttattttctgggtacttctcaacaagatgactagtgcataatgctttattttcctttctttatagggtggagataagctatttcttttaattttactatgtctgatagaattccttcatgtatgtattgctttgtttctaaatataagcatgacaggctcagagctgtccgtggtcacgtaggggtttttggaaataattttagcttcgggcatacccctgaacgtgggcagcgcctacacattgtcatctcagccccctcttacccttttgggaagtcctgataccctcatggaggttttttttctgcttcattctcaaatcaacgtggggtttccttatacccttggcccaactttaacttacacaattgtaacaggcagcattatattgagaatgca

SEQ ID NO: 74813 - DNA, 623 bp, Homo sapiens
agcagcggtctgaatatttgggaaacccgtttggcactatgtgtgacgttgaacatcatgtgccctttctacagcaggttccctgcaggcacccccaggagaagctcgagcatgtgctcacatctcagggcagttctgttgggagcagccccaagccagacacagcccagtgccatcccagagttaaggagcacttcatggcgygctgcacgcggaaaccccacacagctctggccacggtgagcgaaggccacagcgacagcaccagtgctgcatagcgttaagactgagtgaaaatgacaagtcccgaagactctgtgtgactccgtcccatacagcttggaaacaagcacaacaagccgtgtgtttttcagcaagtgtgtgtatatgtgttaaaacttttaagaaaaaggagaaggagaaaactccagatggaggttgccaggcagggtgggaatgggagagaaagaagcatgttgattgctttctctgctgtccacttcttggagtggggtaggttcacaagtgctcatcacgttattaaaatgaacggatgaaaatacaagggagccttacatgaacaaacgatgaaccaaggatggcatcagttcacttgagcccca

SEQ ID NO: 74814 - DNA, 609 bp, Homo sapiens
agtaccagtcatggaagtctgactcccagaaagagaattccaggcccactttgttctgagggcatttccagagtgggtggagtgtggacagcagatcttgagtaaggcagcrtgtgctgtgtggagatgagctggcattgggagtcagacagatctaggacttcccagctctgtgcctcagtttccccatctctaaaatgggaatgctgtactggtctccagagttgttttgcctgcagagaggtgaggagtagttccaggtcacacatgcaatgggggcacagcacctagatcttccgatcagtgtccattccgcctctctggttggaccctgggagtggactggggaggacctggccgtgcttctattcagattcttggaaagttctgaattggaggctgactatccccatgcagcctggatgggctgggattcctggcttttgaaggggaagaagaggtcacatgtgggggtggcggagggctagtgcctcatggggagagccaggtggcactgctggcccagctcatggatggggttatggagactcagaggggaactcacctgaggtcacacggcagccagaggcagaatcgaaacagaggcca

SEQ ID NO: 74815 - DNA, 652 bp, Homo sapiens
cccacctcaacctcctgagtggccgggattgcaagctcatgctatcacgcctggctaatttttatattttttgtagagacagggtttcaccatcttgcccaggctggtctcaaactcctggactcaagcaatacacccacctcaacctcccaaaaatgctgggattacaggtgtaagctaccatgcccagccactatgatggtcttaaaatctgtgaattacaataataaaatgcaagttgcaaatgggctggcctcaaaacaagctaaagaaatattcttcatttcatcaaatctaagatgccattgatggtaagctgcaccagtattttatgtattctttaaaaagaaacctgccaactgaactgtgacaarccatcaattgtaagatatctcccaatttcagagatgttgaaatgtaaacaaaaaattttgagtcttagattggtaaaatacagcaagtttaattacacagttgaaagttaggctattaaatgccaatagaacaatcattctcaagaccaatcacacaattagagagaattgctccctttcttagagtactcttccatgcttatttccatcaccaatttcgcctagctcccatctgtcatttcctgagggaaacatccctcaaccagtgagactacaat

SEQ ID NO: 74816 - DNA, 753 bp, Homo sapiens
ggatcctcagtctagcaccttcaaagtacagaaattataaactttttcttttttttggcagaggatgaaaacttaaacacaatctctgaaaaataaactacaagtcatattaccacacaaacatagaactcccttttaaagaataggaagatagaggaaaatcaccacatatgtaacaagactcagtagttcaaaagaaaatatgctgaaaaatcagtaaaatgaatttctgtgaaatggacttacttattgaaacagaaaagcaaaacaaaaagtcattctatcttttattctcaagaaaatttgaaaaacattgtgtgtaccaatatagaacaatctgagattaagaacttttgttccggaggaaaatcatcattacaaaatcttggaaaagaaatctcatataaatgaggaaattcattgcaagtgtcaatgtgaattaatgaggtaggaaacaagctaaatagtttctccagraggaaaattaaacaaagagaagaaaaataagttactgggggtgaagtcctaaagaagccagtatattcataatagaaattctagggagtaaaagcagagtaaatggaagaaaaacaataatcaaagatataatagaagaaaaccttcctgaggagaaaaaaaggctatccagatggtcctcaacttaggaagtttcaacttacaaatttttgacattgtgatgtgtttacccttcatctcttctatcctctctatggagtttagaatatttcctaa

SEQ ID NO: 74817 - DNA, 753 bp, Homo sapiens
ggatcctcagtctagcaccttcaaagtacagaaattataaactttttcttttttttggcagaggatgaaaacttaaacacaatctctgaaaaataaactacaagtcatattaccacacaaacatagaactcccttttaaagaataggaagatagaggaaaatcaccacatatgtaacaagactcagtagttcaaaagaaaatatgctgaaaaatcagtaaaatgaatttctgtgaaatggacttacttattgaaacagaaaagcaaaacaaaaagtcattctatcttttattctcaagaaaatttgaaaaacattgtgtgtaccaatatagaacaatctgagattaagaacttttgttccggaggaaaatcatcattacaaaatcttggaaaagaaatctcatataaatgaggaaattcattgcaagtgtcaatgtgaattaatgaggtaggaaacaagctaaatagtttctccagaaggaaaattaaacaaagagaagaaaaataagttactgggggtgaagycctaaagaagccagtatattcataatagaaattctagggagtaaaagcagagtaaatggaagaaaaacaataatcaaagatataatagaagaaaaccttcctgaggagaaaaaaaggctatccagatggtcctcaacttaggaagtttcaacttacaaatttttgacattgtgatgtgtttacccttcatctcttctatcctctctatggagtttagaatatttcctaa

SEQ ID NO: 74818 - DNA, 559 bp, Homo sapiens
taattttacatcatagtatttaagttacaggatattaagaaaaagagtaaacatcaattaagaactttacctcctcttctggagaaggggttaatatgtttttgattgtacaaatgatagctgtattatgttaggcagaaatataaacttgttattgttcttatttggagaataaatatggtttaagaagatgtgtatgaatgccaagttaacaaggggtggacttgtgatggttaattctctatgtcaacttgactgggtcataggatgtccaggtacctaattagacattatttctggttgtatctctggggatgcttctgaaggagactaacacttaaattagtggactgagtaaygcagatggactcccaaatgttggtgggcatcattcaatcttttgagggcctgaatagaaaaaaaaaagtgaagaaaattgacttaatcctgcctgattgcttgagataagacagggatcttttcctgtctctgacacttctaattctcagggcttcagcccctgaatctgtcctacttaaaataaggtaaatgctaggga

SEQ ID NO: 74819 - DNA, 559 bp, Homo sapiens
taattttacatcatagtatttaagttacaggatattaagaaaaagagtaaacatcaattaagaactttacctcctcttctggagaaggggttaatatgtttttgattgtacaaatgatagctgtattatgttaggcagaaatataaacttgttattgttcttatttggagaataaatatggtttaagaagatgtgtatgaatgccaagttaacaaggggtggacttgtgatggttaattctctatgtcaacttgactgggtcataggatgtccaggtacctaattagacattatttctggttgtatctctggggatgcttctgaaggagactaacacttaaattagtggactgagtaacrcagatggactcccaaatgttggtgggcatcattcaatcttttgagggcctgaatagaaaaaaaaaagtgaagaaaattgacttaatcctgcctgattgcttgagataagacagggatcttttcctgtctctgacacttctaattctcagggcttcagcccctgaatctgtcctacttaaaataaggtaaatgctaggga

SEQ ID NO: 74820 - DNA, 559 bp, Homo sapiens
taattttacatcatagtatttaagttacaggatattaagaaaaagagtaaacatcaattaagaactttacctcctcttctggagaaggggttaatatgtttttgattgtacaaatgatagctgtattatgttaggcagaaatataaacttgttattgttcttatttggagaataaatatggtttaagaagatgtgtatgaatgccaagttaacaaggggtggacttgtgatggttaattctctatgtcaacttgactgggtcataggatgtccaggtacctaattagacattatttctggttgtatctctggggatgcttctgaaggagactaacacttaaattagtggactgagtaacgmagatggactcccaaatgttggtgggcatcattcaatcttttgagggcctgaatagaaaaaaaaaagtgaagaaaattgacttaatcctgcctgattgcttgagataagacagggatcttttcctgtctctgacacttctaattctcagggcttcagcccctgaatctgtcctacttaaaataaggtaaatgctaggga

SEQ ID NO: 74821 - DNA, 585 bp, Homo sapiens
caccacctttcaacattattacattgaagaccaagcctccatgtgagttttggtgaggacaagccatattcaaactatagcagttgttgaccaagagtaattgaaacttcagaaggagaaactgtgggtaagtgagaactcctctataactttatcctaagtcttataaatactactgtgractcagtcctttcaggaccaacttgaattgtgtcgcacagtatgatctgtattgaattttctacctttaaactatgaagcatgagaaaagagctgtccagtgatggaagacatttttttttttgagatttttaaatttcaattttgaatttctttgtaaaaggaaagctgttggtatttatttatttatttattttatttatttttgaggcgaagtctcgctctgtcacccaggctggagtgccgtggcgccatctcggctcactgcaagctccacctccggggttcacgccattctcctgcctcagcctcccgagtagctgggactaccggtgcccaccaccacgcccagctaattgtttttgtatttttagtagagatggggtttcactgtgttagccagga

SEQ ID NO: 74822 - DNA, 585 bp, Homo sapiens
caccacctttcaacattattacattgaagaccaagcctccatgtgagttttggtgaggacaagccatattcaaactatagcagttgttgaccaagagtaattgaaacttcagaaggagaaactgtgggtaagtgagaactcctctataactttatcctaagtcttataaatactactgtgaactcagtcctttcaggaccaacttgaattgtgtcgcacagtatgatctgtattgaattttctacctttaaactatgaagcatgagaaaagagctgtccagtgatggaagacatttttttttttgagatttttaaatttcaattttgaatttctttgtaaaaggaaagctgttggtatttatttatttatttatttwatttatttttgaggcgaagtctcgctctgtcacccaggctggagtgccgtggcgccatctcggctcactgcaagctccacctccggggttcacgccattctcctgcctcagcctcccgagtagctgggactaccggtgcccaccaccacgcccagctaattgtttttgtatttttagtagagatggggtttcactgtgttagccagga

SEQ ID NO: 74823 - DNA, 585 bp, Homo sapiens
caccacctttcaacattattacattgaagaccaagcctccatgtgagttttggtgaggacaagccatattcaaactatagcagttgttgaccaagagtaattgaaacttcagaaggagaaactgtgggtaagtgagaactcctctataactttatcctaagtcttataaatactactgtgaactcagtcctttcaggaccaacttgaattgtgtcgcacagtatgatctgtattgaattttctacctttaaactatgaagcatgagaaaagagctgtccagtgatggaagacatttttttttttgagatttttaaatttcaattttgaatttctttgtaaaaggaaagctgttggtatttatttatttatttattttwtttatttttgaggcgaagtctcgctctgtcacccaggctggagtgccgtggcgccatctcggctcactgcaagctccacctccggggttcacgccattctcctgcctcagcctcccgagtagctgggactaccggtgcccaccaccacgcccagctaattgtttttgtatttttagtagagatggggtttcactgtgttagccagga

SEQ ID NO: 74824 - DNA, 557 bp, Homo sapiens
tgagacgaaatgtattttaaaataacacaggacagcaaacttacttcaacagggaattataaaaaaaatggyttcccttaagatggcccacccctcccaagagtaagtccacagaagaagcaaaagagaggcaaagaagatgagagagaaagttataatccaaaacaaaagttctgtggctcaatatagcctggaatggaggaggaagaaagagtctatagggatgggatagagtaaggggattttgaaccaaaatgagactgagataactttttaaaaagttatcatattggactgatgttaagcataagaaacagctagttgaaaagcctaagctgccttattacctgttagggtcagatctccacaaatcaaagatggtggtgatcactgcaaatatgcaaattcattttgttctgcagattgatgagtggaaactgcttgaccacacctgtctcctttagaatttaacaagtctgtgctatgtgcaatgtttggcatctctcatgtggctaaagattgcgctatatgtggtttggggaacgttttgctagaat

SEQ ID NO: 74825 - DNA, 1735 bp, Homo sapiens
aatctattagaccagaaattaggttcctgcaagcagattaaatgagcatttgaccttaacactgaacagcctaggctattcacagtcaaaatgggctgcagaagtcattatagtgagatatgttttaaatgacttgatccttaaatgtgttcattctgaggcatccagactgctactgtgtgcccgtgatttaaaatgaaatgcagaattctaatgattaatgtagagtcaattgaatatccacatggaaaaacatgtattttatttctcacatcacacaaaaaattaatttcagatggatagtataacttttagtgtaaaaggcaaaacaacacaatttttagaaaagaacatcttgcttcatgagtaggcaaaaaatactatgaagaacaccactaataaattgaactctattaagattaagaatttgtgttcattaaaagataaaaaagagcaaaaaggccaggcatagattgggagaagacattgacaaagcacatatctaacaaaggaattgtatccagaacatataacgtatacccacaaataactatgaaaaagatagataacccaatagacaaatgagcaaagacttgggggacatcacaagagaagatatccaagtggccaaaaaatatatagaaaggtgctcaatcttttcactcaccagagaaatacaaataaaactaccatgcctcacaactactctctcacccaaatggttaaaatgaaaatgacagaaaataagaagtgttgacaagaatgtggaacaagggaaattcttgactaccactgctgggagtattacttgaacgatcactttggaaaacgctttggcagatttattaaagctctttgcataaagcaatttcacacctaagtataccccaaagaaatgtgtacgtatgtttaacaaaagacattctcaagaatgctcatagcagctctagtcctaaraaactcacaatggaaactactaaagtcttcatcaacagaatgcataaagtatggcatattcacagtatggagtattacacagcaatgtgaatgaataatctacaaatacacacaataatttgaaagatctcacaaacataatattgagtaaataagccagatgtaaaaaaaagtattactatataatttcatttatacaaactccaaaaactggtaaagctaatctatgtttgaacttggctaatctgtgacttagaagtcaagacagtggataatctgggaggcactaggtactgactgcccaggagtatgaggggagcttataggatgctgataaatgtttttctgcttttcttttttaacttggaagatagaatctgggaggtgtctgtgtgtgttaaatgcatttgtgatatattcacttttccacacagatgttatacctaaaaaataataaagatcatgtggagaagaaactcttggtgaagtcagtagtcattacttatgttcactattaatccataccaaaaatatatgtacttttttttagtacacagaaagtggtttgcagatagtttcatctcattttccattgtgataataagaagtcaagtaataatttcctgggtgttatgggttgaattgttttatatgttgaagtcctaaacctcagtaccttagaatgtgaccttatttggaaatatgatcactgcaaatacaattagttaagatgaggtcatactggagtgggggggggtccctaatcccatatgatgga

SEQ ID NO: 74826 - DNA, 2708 bp, Homo sapiens
tcacgccaaagattctgattcagtaggtttaaggtggggacagagaaatttgtatttctgtcacccaaaattgaggctgtcacccctaaactaccactattcatataaaagtgtgcattaataataaaaaaagattggcttcattattgaaataaaaatcagaggcgactactcataggaaatccaatctgctcagaggtaataaaataaaacagttaagttatattagatttaatttcccccttacctctggatgccgtagttttatttatctgagtgcctatcctgtatatatgagttcaaatgtttgaataaaatttacaagtgatcacctttgcgactgtcttctgctctttacatgggcatgtagcgttagcaacaccagccatcaacaaaaactggcattgtcacgactccaatgccaaaaatagtttgtttcatttttaaaattaatattattttaaatttacaagttataatttcatacattcagaggatacagtagccatcacttatcttttttttggtgagacatttgaaatttacttagttatttttaaatgtacattatcattgactatagtcattccgctgtgcagtagatctcaaaacgaatgcctcctgcctaactgaaaatttgaaccctttgaccagtaacttccccccacctccccacaccctgcacccctaccactttttgccttcaacctctagtaaccaccattcttctctctacttttatttatgagttcaatatgtttagattccacctaaaaatgagatgatgcagtatttctctttctgtgcctgaatgccaataatgtttgaggacctactaggaagtcaatttaactattttatttctatcccctcataaattaaataaatgaaaaacaaaacaattaagattacctatggcaggtgagtttcatagccttagagcaggggtcaacaaacattttctgtaaaggaccacaaggtaaatatattaggatttaaaggtcataataattgattggttagggcactaaagcagtcatagccaatagggatgactagacgaatgatacaagctgttttctgataaaactttatttatagacactgaaggttaaatttcatatacgttaaatttcctataatttttcccatgtcacagaatattattcttttgattttttctaagttttaaaaatataagaaccattcttagttcaaagaataaacaaaaaggcaggggccagatttcagccttgggccaaagctgctgacccctgggctggaacacagagctgatgaagccaaggaagaattctacagctgtgtgaacctgtttcttccattatgctctgctgcactgttctttggccataagttgcatttctgcttccagcctaccaccatgcaaatgcatggggatccaggaagtggatatatgagactcaaaaaccaatgttcctacagatgccctatgtagtcacactgtattgccctgcaggggatggcttacaaagatcagataaggcccaggcctaccacgggacctaagaggccctggggagtcttccccattgtttatgcctcaggtcacatgtatgaaacagagacttcacaaaatgtatcttgatgaggtcctgcagaaccttgccaaagaagtagaaatgaaaaacaattttgcttttaatcagactgcagatcctgtttctgaatatcatccacagagcagggttgttttcatcatcaacttaatgcctattaacagagtcaattccagtctcycgctttccaccaactaagtaggattaaagagatgagagaagcttatggttaatagagaactgtagatgttaaaaggtttaatctattaatataggacagcatttcccaaagcgtgttatgctgaatgctggctctcttagatgttctgctggaaaagcatttcaacgtcaagtttaggaaatgtagcataaaagatctctcttttcttgattattaacatgcattaggacatgcatgctctgaggattcctgcaataaaactggttaagtaggggcccagtgcggtggctcacgcctgtaatcccagcactttgaggcaggcggatcacaaggtcaggagatcgagaccatcctggctaacacggtgaaaccccgtctctactaaaaatacaaaaattagccaggcgtggtggtgggcgcctatagtcccagctactcaggaggctgaggcaggaggatggcatgaacctgggaggcggagcttgcagtgagctgagatcacaccactgcactccagcctgggcaagagagagagactctgtctcaaaaaacaaaacaaaacaaaacaaaacaaaaaaaaaaacaaaaacaaaaccacaactggttaagtaggttaaatcaagagtttctcaaagtcatatcatcagggaagcttttcttcctttacttaactgttaatatcccaagaaaataataattcatagactgcagtttaggaaaaactgctatagacaaggcagaggaatgacagggttttaagcaggggagtaaattatgttttggaataattatttcggagaggatcagatctttcttccctaatttttctcattttaggaaattacaccatattccatctatgtgctcaagtcagaaagacaggagctatatctgtcatgctgataactttttaaaaaattataaaatgc

SEQ ID NO: 74827 - DNA, 648 bp, Homo sapiens
actcatttggtgccaaatcttctattgccttgtaactacttatttgctattttaaattaataccttatattgacatatttgtcttactaatgatgtcataagtttactgaatacaggaactgttactttgtatcctaaagtacactgcatgcccctgcacagagtaattgcatgaagaacgaatctccattcatcccttctagtgccattagaagaccttaataaaggagtttgatcaattccctttcacactattttattcctcagtggttctgagtgtattgccatcatgctaacaaggacagctggaataaagataagttttgaggtcagagagtagttaagggaggagtctggggacagaggacttgcctgttttctcagttcctctttaagaggcaccagagttacaaaaggtcactaggtgtatttggcaagagactaggtgtactttaaattgatttggcatttcctaggatattttaaaggatgacttgatcaaacttttgaacttacagattttttaaattaaatgaaacaaaaaggattaccccctcaaaaaatttcagycattggctcattttctcaccgttcgacgtttggatgaattagacccaaacattaatttaattcaataactacctttgg

SEQ ID NO: 74828 - DNA, 1112 bp, Homo sapiens
atagtggtatggtaaatgtctatgtgccacattttttaatacttcacagttgcctaagttatttgaccagtgaaatgtctttttaaatctaatccttgaagtgtgtggatctttacaccaggagtgtgctcataygctggtgtaacaaaaaccctatgtcctacacgtgccctgccttttagcttccctggcactggttgactccagtattaattctcaaacttcagcatactccagaatcacctggagagcttctgattctttaagtctggtgtggggcctgagaatttcctgatggtggtgttccacacttaggaaaatctggtgttctcatcttgttaattccacacaggattttgtgctcattgggacttttatcttacttttggagaccaagctcactttgcaattatatatgtgaatcttttgtctaaaatttaaatcagctactgaaacttcagtgactttctttctgtgataaagtcaggtggctctctcttcttccatagcaataagtgacacatgctccactgttgggttgggtataagatcctaagactataagaaatgaaattttatatgggagagggggaagaaaaggtgaagaaatccatcaattgataccttgagctatgttcctactattggaaaaatcttaagctttgtggtatcataaagtgcatgtggctttgtcgtgtttgtgcagtgttctccattaaactgaaggatatttgctgactgtacatgtaaaacatcatgagaaactgtggactacattgtcaattctaccatcattcttattacttcattgtattgtatacactctcttctatataaagatgtggagtagatttaagaagtttcttcactactaagtaattatttagagggtgactttgaaaaagtttaatccttccagtagcgtgcatggcagataataagaatgataatggctaccattatggagtcattatcatctaccaggtacttgccaagtgcttcacttgagttagctccgttaataaaggcatattgaaacacatgagtaagtcaaacccattatgcaaggaattgaaatgagcatggttatgactgtggagaaaatgcctaca

SEQ ID NO: 74829 - DNA, 665 bp, Homo sapiens
aaagtcaccaagatgccagggagaatctgaacaaataggccttgctaagttgttaagtttcctcaagtttatcacctttaggtcatagccccttttgtctaatacttccctgccactgccacttttcatcaaacctaagcataaaagcacacagatttccttgtttctttgagtattcatttctgaagtctcctgtgtcatataaaacttttattagataaatttgtatgcttttctattgttatctgtgctttgttatatgttttcamcgtgaatcttgtaattgatgaggaaagaaatccctttcctcctacaagctcatgattgagagttagaaagcaaaagtgtaatttcacctctgcaaataattactggctcaacctttgttaaacttttaaatttggccaggcacagtggctaaagcctgtaatcccaacaatttaggaagacaaagtgggtgaatcacttgagtccaggagtttgagactagcttgggcaacatggcggaatcctgtctctacagaaaatttttaaaaaaaattagctgggtatgggtgtgcatgcctatggtcctagctactagggctactagggaggctgaggcaggaggattgcttgagcccaggttgtcaaggctgcactgaacagtgatcacaacactgcac

SEQ ID NO: 74830 - DNA, 606 bp, Homo sapiens
agtctacaaatcacctagatgaagccaatagagaaattgtacagggaaggttttagacacaataggaatgctttttaaattgtcaattcattaatgtagtgtaggagtcatcttgacaattaaaaaactgtggttttaccttttcagggggcttatagcattaaaatttgtttataaaacaaagtgaccttcagaaaccagaattcagtgtagattgctcagcgtcacatttacatttcctattttacacattgcatttgtttcttcttttaattttaatttayttttttaacttttatttcaagttcagtgggaaatgtgcaggtttgttacataggtaaacttgtgtgatgggagtttgttgtacagagtatttcatcacccagttattaagcatagtactcattagtttattttccttatcctctccttcctcccacccttcaccctccaataggcctcagtgtctgttgttcccctctctatgtccatgtgttctcatcatttagctcccacttgtaagtgagaacatgtggtatttcattttctgttccttcatttgtttttgttgatgtaattgtggggtaactctggatgggcattggt

SEQ ID NO: 74831 - DNA, 2137 bp, Homo sapiens
tgcattaaacacacatctgtgaaacttccccgtcaatggtaggactttgaacatatggggttttaattggacactaaatcaattttcaaatctctgttgatggaattaaaaaaatattcctagctttatttaaactgtctgtccttgttacataagaaaaatagggctgggcatggtggctcaagcctgtaatcccagcactttgggaggccgaggcaggcagatcccctgaggtcaggggttcaagaccagcctgaccaaaatggcaaaattctgtttctactaaaaatacaaaaattagctgggcgtggtggtgggcacctgtagtcccagctactcaggaggctgaggcaggagaatttcttgagcccaacccgggaggtggaggttgcagtgagctgagatcatgccattgcactccagcctgggcaacagagtgaaactgtctcagaaaaaaaaacaaaaacaaaaacaaaaaacsctttctcagacccctgcaattttgatacctgctgcttttgctcactttccataattcaaatcccagcccaggtacttatggagagattaaaacagttctcgtgagctgagcagcagaatgtccacatggcatcagaaagtaaaaggtgaaaaatgatcgggttactgaggaaatatgcacgtgtgggcattcaccacaggcaccctctgtgttaaggctccttgtatgttttagcaccatgaccctttcctggggatgcccgagaggcagggagcattacaggaaatcacatagctggtgacaggctgagctatgtcttgcagcaccgtcaaaccaggggcctttttgctgcctccccatgtgttatcctgtcactgcatttcctcttctgacctcatagctgctcccaggtggccttgaggacttctctgcactgataggtggagtcttccagttgagtgattgacaggcattcacaggagaaccagccctggaacggccctcatgtttatttcctcattattttgattccgagcttttgcaaattgaggactcagcagaatgaggattaggcaattttctttcctcctgtaatgtactttctccaaattgcttcttttgagacaattatttgaggcctttgaattgcttctgtgggcaggctgagggagtcagacagcacatcttcattttcacaggtcttagggctttctccctacaaacacagaaagggaaggcaaggagaaaaggaacaccactccttggaccacagcaagggtcccccccatgcaaatcttctaagaaacatgcatcaagctcctctgtactcattcatatgacaccctcaccctctgaaatgagcactatcatttccttgtctcacttaaggaaactgaggctcacagaggtgaaataaaatttcaggtaacagagcaagggctcacatctctccatccttcactgatgtctccttcctttgaactctcagagtataaattgcctgtcttttcatttggcacttgctaaaaaatgtaaccttctcttttatttaactgcatagaagaggcagcagaacatagagaagaaaacaataagctctagaattggggagatgtaggtttgaattctggttccacctcctgttagctgggagaatctattagttatttagcctctgagcttgtttctttttgttggggctcagaaaccaatacccccaaatactgcgctttgatgtactgaactaaagaagtagcctcacggtctctctgactttccctcgtcccaactctccatcctctgtctctcccaaagcacaggataaagttgttctctgaagttctcttatctacctagaaaccagacctgccaaaaacacaactgtcttccccaagttttcacagtcttaacttatattgcagaaggaaagatggaagtctgttaatacacctgcacagactttcgtcaccagccattggctgcgctgtgggcccaagagactttgtctgaggccgttgtgtgttctccaactccattcatttccccctaaacatcattcactgtccctcaaattgccacacttcccccatctcctcttcccctatgaagagtatataaacatctgtgccccaccgggttattcggtaatcattctcc

SEQ ID NO: 74832 - DNA, 619 bp, Homo sapiens
tcccaggaaatatcttgggcccaaccacagcaggacctctctaggttctgacactaggggctcaaggcattaagacctaccaggactctctttgattctgtggggaagaaacttgggagatgcttagctgagkgagtctgtctcatctcaacggggactgcagttatctgaaggcccaattgaggttggagaactcactttcaagatgactcatagacttcagattggtcctggatattggcaggagacctcactttcttgccgcctgccctagtcatagggctgcttgagtgccctcacaacatggcagatggaatacttcagagtgagtgatccgagagaagagccacagtgtctcttactacccagcctcagaagtcgcacgctgtaatttctgaaatatcctattagtttcacaggtcagccttttcaatatgaaagtggactacacaagggcataaacaccaggaagaaagaatcactgggggtcatctcggaggctggcaaacataactagatacaataatgtccacaagttcgtagttcagtgaggcacacagcagactgtcagttcctcccttcactttatttaatgacaatctctacatttaaatttctg

SEQ ID NO: 74833 - DNA, 1172 bp, Homo sapiens
ttatatgacacagatgaagactattgtgtacyttcctcaatttttaccccattgtttcagccttttgtacatctttaatgcaaacatccatgcgagaattcttgtgacattaattttttggaacaacctgttttgcagagcaaatttcattaagccattttaatccagagtttaattttttatacagctcgactcaatcatttccattttttttccattagaatgtctatttgtagtaacattattttcatgggatcaattattttctgtttaaatttacaacaggcatttgactcatcagtctctttttatataccatctttttgctgattctgacttctgctatttggagaggttttcttgtttgtgtgtttgattcttttgtggccattctttctattaagtgaaaatcgtctggatcaaattttgtagatttaaattttgttattagtgatacctgttttttttccctgtcaattttagctcattacacattctagtcattttaaccctgctagttttgttagttgctgatcacttttaccataccagtaatacgtggtagaaataatcaccagaatgaaaactctgcaaaggcaggatttctgtccctttttttttttgtttttttttttttcctgccttatacttgagacttagtgcatggcacatagaaagtgctccatatggccaggcgcagtgactcacgcctgtaatccttgcactttgggaagccaaggcaggtggatcacttgaggtcaggagtttgagaccagcctggccaacatggtgaaaccccgtctgtactaaaaatacaaaacattagccaggcatggtggcgggcacctgtagtcccagctactcgggaggctgaggcagagaatcacttgaacccaggaggcagaggttgtggtgaggtgaagtcacaccactgcactccagcctgggtgacagagcgaaactccatttaaaaaaaaaagaaagaaagtactccataaatatttgtaggtggaaagaatgatattcacatatgatttaatcaaagactgacagtttatctatttgataaaaagactgtgagaagcagagattgatggagacaggagagaaagtggaggagaagagaagatggagacagcacacacacatgcacagacttgaacatgcagaca

SEQ ID NO: 74834 - DNA, 1172 bp, Homo sapiens
ttatatgacacagatgaagactattgtgtaccttcctcaatttttaccccattgtttcagccttttgtacatctttaatgcaaacatcmatgcgagaattcttgtgacattaattttttggaacaacctgttttgcagagcaaatttcattaagccattttaatccagagtttaattttttatacagctcgactcaatcatttccattttttttccattagaatgtctatttgtagtaacattattttcatgggatcaattattttctgtttaaatttacaacaggcatttgactcatcagtctctttttatataccatctttttgctgattctgacttctgctatttggagaggttttcttgtttgtgtgtttgattcttttgtggccattctttctattaagtgaaaatcgtctggatcaaattttgtagatttaaattttgttattagtgatacctgttttttttccctgtcaattttagctcattacacattctagtcattttaaccctgctagttttgttagttgctgatcacttttaccataccagtaatacgtggtagaaataatcaccagaatgaaaactctgcaaaggcaggatttctgtccctttttttttttgtttttttttttttcctgccttatacttgagacttagtgcatggcacatagaaagtgctccatatggccaggcgcagtgactcacgcctgtaatccttgcactttgggaagccaaggcaggtggatcacttgaggtcaggagtttgagaccagcctggccaacatggtgaaaccccgtctgtactaaaaatacaaaacattagccaggcatggtggcgggcacctgtagtcccagctactcgggaggctgaggcagagaatcacttgaacccaggaggcagaggttgtggtgaggtgaagtcacaccactgcactccagcctgggtgacagagcgaaactccatttaaaaaaaaaagaaagaaagtactccataaatatttgtaggtggaaagaatgatattcacatatgatttaatcaaagactgacagtttatctatttgataaaaagactgtgagaagcagagattgatggagacaggagagaaagtggaggagaagagaagatggagacagcacacacacatgcacagacttgaacatgcagaca

SEQ ID NO: 74835 - DNA, 1172 bp, Homo sapiens
ttatatgacacagatgaagactattgtgtaccttcctcaatttttaccccattgtttcagccttttgtacatctttaatgcaaacatccatgcgagaattcttgtgacattaattttttggaacaacctgttttgcagagcaaatttcattaagccattttaatccagagtttaattttttatacagctcgactcartcatttccattttttttccattagaatgtctatttgtagtaacattattttcatgggatcaattattttctgtttaaatttacaacaggcatttgactcatcagtctctttttatataccatctttttgctgattctgacttctgctatttggagaggttttcttgtttgtgtgtttgattcttttgtggccattctttctattaagtgaaaatcgtctggatcaaattttgtagatttaaattttgttattagtgatacctgttttttttccctgtcaattttagctcattacacattctagtcattttaaccctgctagttttgttagttgctgatcacttttaccataccagtaatacgtggtagaaataatcaccagaatgaaaactctgcaaaggcaggatttctgtccctttttttttttgtttttttttttttcctgccttatacttgagacttagtgcatggcacatagaaagtgctccatatggccaggcgcagtgactcacgcctgtaatccttgcactttgggaagccaaggcaggtggatcacttgaggtcaggagtttgagaccagcctggccaacatggtgaaaccccgtctgtactaaaaatacaaaacattagccaggcatggtggcgggcacctgtagtcccagctactcgggaggctgaggcagagaatcacttgaacccaggaggcagaggttgtggtgaggtgaagtcacaccactgcactccagcctgggtgacagagcgaaactccatttaaaaaaaaaagaaagaaagtactccataaatatttgtaggtggaaagaatgatattcacatatgatttaatcaaagactgacagtttatctatttgataaaaagactgtgagaagcagagattgatggagacaggagagaaagtggaggagaagagaagatggagacagcacacacacatgcacagacttgaacatgcagaca

SEQ ID NO: 74836 - DNA, 1172 bp, Homo sapiens
ttatatgacacagatgaagactattgtgtaccttcctcaatttttaccccattgtttcagccttttgtacatctttaatgcaaacatccatgcgagaattcttgtgacattaattttttggaacaacctgttttgcagagcaaatttcattaagccattttaatccagagtttaattttttatacagctcgactcaatcatttccattttttttccattagaatgtctatttgtagtaacattattttcatgggatcaattattttctgtttaaatttacaacaggcatttgactcatcagtctctttttatataccatctttttgctgattctgacttctgctatttggagaggttttcttgtttgtgtgtttgattcttttgtggccattctttctattaagtgaaaatcgtctggatcaaattttgtagatttaaattttgttattagtgatacctgttttttttccctgtcaattttagctcattacacattctagtcattttaaccctgctagttttgttagttgctgatcacttttaccataccagtaatacgtggtagaaataatcaccagaatgaaaactctgcaaaggcaggatttctgtccctttttttttttgtttttttktttttcctgccttatacttgagacttagtgcatggcacatagaaagtgctccatatggccaggcgcagtgactcacgcctgtaatccttgcactttgggaagccaaggcaggtggatcacttgaggtcaggagtttgagaccagcctggccaacatggtgaaaccccgtctgtactaaaaatacaaaacattagccaggcatggtggcgggcacctgtagtcccagctactcgggaggctgaggcagagaatcacttgaacccaggaggcagaggttgtggtgaggtgaagtcacaccactgcactccagcctgggtgacagagcgaaactccatttaaaaaaaaaagaaagaaagtactccataaatatttgtaggtggaaagaatgatattcacatatgatttaatcaaagactgacagtttatctatttgataaaaagactgtgagaagcagagattgatggagacaggagagaaagtggaggagaagagaagatggagacagcacacacacatgcacagacttgaacatgcagaca

SEQ ID NO: 74837 - DNA, 999 bp, Homo sapiens
tttttaagtaatatatgactgtatttttattgcactctcctcttcagattgtaagctctttggggacaggcttcgcaggctgggttgtttttgttcttagggagatggatatatgtacagctgtgtatgtggcaggcacttagcaaatatttactgaatgaatgtccaacttgccctggtctcacatcttcagataacagaaaagtaatcagcagctgttgtcttagtgtggattctagtgtggaaatgtctgaatcaggtgtttgactctataaactgctttccctcaactgcctgatatgattgatgaaaaagaggcccactgataaaaataatggcctcactagtgtgaagacatgggaagggaggatgaggtagagagggggcttgagattcaaacagaatgttggaaagatgtacatttccagaaamagtcattgaggtattgatagggtttatgcagcccctcactcttttttagttaatccaatctcatgcctgctctcttctcatgtgttcatagtaaaagttgcatgttattgaaatccctaaaatcatcactttgaggaattcttaactaggaaacagacttttcacagctctgttaaagacaagaatatgtttatgatgtgatttgatttcttcacatgactgaatactgtccctaactgattctgaatgtgtatttatccacagccaagctacatcagtgatgtgggaccccctggtcgaagctctctggataacatcgagatggcctatgcgcggcaagtgagtgtgattttaagggggattaagccaggaaaatcctttgtgaacctctagggagtaaaaggaaacaaaaacttgtaaaagtcaaaccctgaaagcaagttgtattttttcatttagagaactagttaatattttagcataggccactggagaattctatcaaatagggtaatagaattactcacatttgatttgaggaaattgaaatctgtcctttacactgac

SEQ ID NO: 74838 - DNA, 999 bp, Homo sapiens
tttttaagtaatatatgactgtatttttattgcactctcctcttcagattgtaagctctttggggacaggcttcgcaggctgggttgtttttgttcttagggagatggatatatgtacagctgtgtatgtggcaggcacttagcaaatatttactgaatgaatgtccaacttgccctggtctcacatcttcagataacagaaaagtaatcagcagctgttgtcttagtgtggattctagtgtggaaatgtctgaatcaggtgtttgactctataaactgctttccctcaactgcctgatatgattgatgaaaaagaggcccactgataaaaataatggcctcactagtgtgaagacatgggaagggaggatgaggtagagagggggcttgagattcaaacagaatgttggaaagatgtacatttccagaaaaagtcattgaggtattgatagggtttatgcagcccctcactcttttttagttaatccaatctcatgcctgctctcttctcatgtgttcatagtaaaagttgcatgttattgaaatccctaaaatcatcactttgaggaattcttaactaggaaacagacttttcacagctctgttaaagacaagaatatgtttatgatgtgatttgatttcttcacatgactgaatactgtccctaactgattctgaatgtgtatttatccacagccaagctacatcagtgatgtgggaccccctggtcgaagctctctggataacatcgagatggcctatgcgcggcaagtgagtgtgattttaagggggattaagccaggaaaatcctttgtgaacctctagggagtaaaaggaaacaaaaacttgtaaaagtcaaaccctgaaagcaagttgtattttttcatttagagaactagttaatattttagcataggccactggagaattctatcaaataggktaatagaattactcacatttgatttgaggaaattgaaatctgtcctttacactgac

SEQ ID NO: 74839 - DNA, 675 bp, Homo sapiens
cattcttttaatgttttcactccttattcccaagagagttctatttgctttcaaaacttcctttttcccccaagcagaaacttgttttgggcccgtccagggaaaagagaataatgacagtgaaggatgcccctttgattctgcatggctgcccctgggcgtgcccacatcattcaccataccttctgtccttgctgttcatgtactcctggaaccaggttttaaactctaccagctggtgctgggctcgattaactacctgtgaagcggcaagcaggtctccacagcgcatgcagtagtaaattagcgcccacacaggatggccttccacctctccatcctaaaagaggaacagttaagtgctcaaaataaacaaggaaargctgactgctttcatatgtgctaaaaccgagctaagcccctctcctttataatatgtcacttaatcttcagaacagctccctgcagtgagaaccattaacagccttttcctgttttacaaacaaggaaactgaggcatggaggggttaagtcatctgttcaagtaagctgttaagtggcaatatggctccagagcttttcctctgaagtgctttgtacccaacttgatccaaagccaccctgtggtttttccatggaatcccaggggcccatagtaactgggtgatgttcttt

SEQ ID NO: 74840 - DNA, 598 bp, Homo sapiens
tcgtttgtaaaaatgagtgatttggacccagcaatctgtagatgagctcacactgctcacaccatctacctcagaagaaaggcaagtgacagtgctgatgacagtggccttgcttattgggcagtgacaatcaacaggcattgtgctgagygctttgcatagtttcttctttaacaggctgcactggggccaggaggctcctactgtatgtgagttgacagagctagaaacatagataagaccttatcctctgctacctcccaagtggcagggcaagtcacctcaacctggtccagccaccttgaccttgtctagccctgagagtccagcgctagtggagaagcagaatggccaggcagagatgttatgcacttgccttcattctcccagggtgcctaaggcctctctcatgctctcctgaccatttagttgctgttgagtggtgatggtgatttttttttaagaaatgtcctgttaccagccgggcgcggtggctcacgcctgtaatcccagcactttgggaggccgaggcgggtggatcatgaggtcaggagatcgagaccatcctggctaacacggtgaaaccctgtctctatta

SEQ ID NO: 74841 - DNA, 609 bp, Homo sapiens
ataaagttgggtaatgagtttgagcatattttgagggtagtgcaggatggtgagggagagataggagattggttgttgaagcagtagggaaaattattggggggatatggtgaaaaatggatgaaggatggattataaaattagcaataacttttgggatgaggtgggcaaggtttaggagatggggagttgcagccttcgtgccccctccttatggctgcctcttcactcatctctcaggttctccgtctgatggttggggtacaggtgacagaagagcagctggagaacatcgctgaccgcacggtgcaggaggctgatgaagatggggatggggctgtgtccttcgtggagttcaccaaggtcagagtgcccttggggattggggagttgagatcaggagttctggggcagacagacttgggaaatgttcaacggaggagggyggaaagataggggttgcctgggaatgatggggtctctggaatgggtagaaccctgggggaggaggttgggagcagggagagctgagagtcaagcctcttgcctgccatttgtttttccctcagtccttagagaagatggacgttgagcaaaaaatgagcatcc

SEQ ID NO: 74842 - DNA, 1013 bp, Homo sapiens
tgcctgcctgatgaacaagatgatgaggtccctgtcttcgtagagcttagagattcctatgccttagatgtaagacaactccgcatggaagggcaccttctaatggccgtgaccacccttgctcctggtagatgtctccagttttgttcagagagggtctgccagggtccttgaaggtaaggtccaccctgtttgcaagtttcaactcattcatgtctccttcatccttgtgtaaaaataaaaaaaaaaaaatccctgctgatttgagggtcatgcagcccagctctgccaccttctccccgtcctctttgtcatccttggccctcctggtcatcccctcacagttactgaaaacttggtagcttggcccctagccttcatctccatcacaaatcctgccactctccttggtgtcttcaatgtccaaggtacagcytagccagcattgcagcctctcagtgggtgtacctctttggagaccttatcccccacgccacaactgcactgggcccttgtcacactcagaaccactttagttccaatgtccctttctctgattgcagcctcctctccatgcaacggtttcaccctttcattctccttatccctgtgccctgacctacacggtaccttcatccctcagtctctcttccactctgtcagccccttccttgtccttatcctgcttggacctcctagctgaccatctgaaggaactacaccactgtcttaggctgggttgaaacaggttgggatttttgtgaaagttatttcacactaagccataccaggttcagaagttcaagagcagcctgggcaacatagcaagacctcagtctctacaaaaaataaaaaataagccaggcacgctggtgtgcactagtagccccagctacttgggaggctgaggtaggaggatcccttgattccaggagatccaggctgcaggtagcaccactgctctccagcctgggcaacagagtgagaccctgtctctaaaaaacaaaacaggc

SEQ ID NO: 74843 - DNA, 655 bp, Homo sapiens
cacccccggctaattttttgtatttgtagtagagatggggtttcactgtgttagccaggatggtctcgatctcctgaccttgtgatccacccacctcggcctcccaaagtgctgggattacaggtgtgagccaccacgcccagcctagagatggattcttattctgttgcccaggctggaatgcaaggaatgatcacagctcatagcagcctggacctccttgggctcaagtgatcctcctgcctcagtctcctaagtagctaggactayaggtgtgcactgccagctaatgttttactttttagagacatgatctcactatgttgcccagctggtctcaaatgcatagcctcaagcgatcctcccatctcgacctcccaaagtgtattttattatatttttttgaatactgtaatagtttgctagatactttacattatttatatacacaaagctcttttacatctacctatttagtgctttgcattaataagcatgagaaaaatccattcacaaagcagtttacatagagttgcctaaactttacaggcttcccaaaccaaccattttatttactttagtttcgtgataaatgatagatgttaaccggtaagataaggcccattttattattcattttttttaatgtctactt

SEQ ID NO: 74844 - DNA, 731 bp, Homo sapiens
gcacataaaacactccctctttataagaaaaatcataaatgcatataaaatagaaaatatttggagattgcttatctgaaagtcttgctttcttatacacatggttctctcatattaagcctggtrgtaactttttagtgtaattacctttagcacttcaaagacgaggaagtaaggaagggaatgcaagactagtgcataaaaatgcaataggtgtcatatgtacagcattcttcttagagttgccttttcatcccaattacagtgagtctgatttccatcctgtatttgcataatacttgtcttaaaataaaagcttttatgattgggaatttatctgcctaatcagacttattattgagacgtcaatgggacgcatttttctgttgagctatgcagtcgtcaaaacagcgatagacagcataggaggtttgaagcagaaatgaaatgtgttattcagagccaatgttgtacatagagcattttcactattgctgaatgggaatgattaaaaacaaggtatttttcgggccaggcggtggctcacgcttgtaatcgcagcactttgggaggctgaggcaggaggatcacttgagcccaggagttcaagactagcctaggcaacatagtgagaccctgtctctactaaaaataaatttaaaaaaaattagctgagtgtggtggtgcatgcatgtagttccagctactcaggaggctgaggctagaggatc

SEQ ID NO: 74845 - DNA, 1616 bp, Homo sapiens
gtagaagtttcccaggtagaagagaaggattgctttccaggttgagagaaatggcataagcaaaggggcatcagcatagaaaatacgcagtgtattatgggaaatacaagaagttctatgtgcaactggaaacttgtcttcactacatgtccggggaacagtgtagcctgagaaggaaaatcagattatgaaaggaagaaagccagactctgaaaggcctcaagtgccatgctatggtatttggagtttatcctacagtcaagatcgcctcctcttctgagcctacattatcacttggttgtgagactaatgctgacccatttgggctacgtacagaatcactgggagcctgaccaacaaagcaagaaacagcagattgaaagagacaacagtacgcagtcagggttcaaactgccccaatgttccaaatcattagtttctacaaaagtaaattctacaccattcagaaacttattcagccagcatttgcttctcttaaatggtttggagaaaatgagaacctttattatcccaccattgtaactaccatattttggggtgtctaactctcactttttccttcattgagaactttccctcatccaaggaaaggcccctcagtagtcaagtgtgagtgttacaatcctgcatccctggacacaggatgtgacattatctgaccaacccctcgtccaagttggccagtcgggttcccttttaaatgaacttccttacattaacagagaagtactgggagctgagtcaactaatggtgtgtctccagagggaaggctgaaaatyaactgctctttgagttcaattggttcaatccttccatgacactttcagtatctttccaatgaatattctttttttttttggcttaaactagctcaagttattttctgttgattgcaaaccaaagatatcactaatacagtttgttttatttttacagtttattactgttaattaacaaaaatcttttcagtgactttcccttgacaaataatgatgcattcccaagaaaaatctcccatttattttcagagcaatagcatgagaggccagaaaacatccagcccaaaatttgattttaagttccctgaagaaaatgactacatcttgcatgtttttggtatcacacctgtacaatacccctgagtagcaactaactagctatttccatcgctcaaccactcacaaaatgaaagacatcattttttatgaaaattgtggccaggtgtggtggctgacacctgtaatcccagcactttgagaggccgaggcagctggatcacgaggtcaggagattgagaccatcctggctaacatggtgaaaccccgtctctactaaaaatccaaaaaaaaaaaaattatctgggcgtggtggcggatgcctgtagtcccagctactcgggaggctaaggcaggagaatggtgtgaacccgggaggcagagcttgcagtgagcagagatcacgccactgcactccagcctggtcaacagagtgagactccgtctcaaaaaaaaaaaaaaaaaaagaaaattttaagacccagtaacctacaagaaagaagatcctaataccaaattttaagaataatagaggtgtg

SEQ ID NO: 74846 - DNA, 590 bp, Homo sapiens
tagtgttaaaaagtatcaaataggctctaattagatttgaacacaaagacctgctcacacatctgacagaagagcttaccacaggattatttttggttattttaaaagtcctaaaatcaaatttcaagaaagcaaagaagtaagttcactccattccccacaccctactttctatcatttacttgtatcagataataaartgataatccattgcctgtctaaagaacacttacctcattgtctgactccacgagaacttgatcatattcactaagcgctactagaaacatgatagaggtgacattttcaaagcagtgtatccattttcttctctctgacctttggccccctacatcgaccattctgcaaggttaacaatactcatattaataacatataaagtaaaactaaaaagtcaacataaatatagcactacttacaaacttagggaaaatattctcttgaatgacgatgatcatccaagtcaattcaattaatacttattgaataattactaatttcttattacctaatattcaaagttaaaacattctgggtaacacatcatgatggttttaagaaagttacca

SEQ ID NO: 74847 - DNA, 812 bp, Homo sapiens
cagttttcacaactagagatagatgttctgggtttacttttaaaatctgtaaggtgaagtttggggtagatttcctaccccagagatacagaaatgttgtaatatttagctagctagatctatctatctatctgtctgtctatctatctatctatctatctatctatctatctatctatctatcttacatttaacagaaagccagaagaattcccaattaaattaaaagaaactcaaagccagaatagtggtaagcaggagttgataccacagtggcccatgaatgtttagagatttagaatctccgggctgggagctgagcctgggagccatggctttgaggctagrctagcgataatctgtatctgccccaaacaagtcctgcccaatactatcaaaaaggaaagagaaaaatggtttcttctgcatgggaagcagcaaaggagaatctgtttatttcatacgcagctgaaataaatggtcacctgtgggaaaaaatgactctcagaacagcataaatatggtttttaaatgtatgctttctttgtggcttcctgtttcttaagtatagaaactttaaatgaaacagtaaaataaaaactccttcaagactttaaaaaatactaggaaagagcagagacatatgtgaactctatgacatgataaacttcaagagaaaaagcaaaatgaaataaaacaaaaaacaaatgcaaaaaactgttgagtaggagcacacatgaaataatttatcaatcgtatatacggatttatatcatccataaaggagagtcagcagattcattaggatccca

SEQ ID NO: 74848 - DNA, 634 bp, Homo sapiens
accacagcatcatcaggaaacaggaaaaataaatagttattttctttacagaaaacaacggggtgaggtgctttgacaatgttcgtatttcacatataagccatgcctgtcttatgtgttattttcaacttggcacttttattaagaaaacagtataattcagaaatattttcttttttgaattcaaaatgattacagtttgcatcatttatttgtacagcaaaatttctagttcattaggttcatcagtaatagacatattgctcttactatcatttctttttctctaacctactcagattaaaagataacacgaaggagattcaattagatgagagagttgtgtaaaataattgctttctctttcaamattttaagatagaacattctagattgcaaagtgtctgtgttttcatttcactgctcctcctttcatggtacgttcagttctactgagtctgtctgctttgcaattacccctaatgattgggacctcctataggattttgtgcccaaagggagggatgctcattccttggcacaaaggtgccattcgctggctaaactgtgttccaggaattgaacctacccacagtagactttttttcttttttcacttttttcacagtggatc

SEQ ID NO: 74849 - DNA, 873 bp, Homo sapiens
cttgccattcctttggaataaggtatgaaaaatgacattaaccctgggagcaaagaactctttgaatttgtcatgacttttctctgccctttcatgaaactaaacgcagggtgatttttggccactgacacgctagccacttttggagtaagaccagtgagtaaatttgattttaaaactgaccacgacttttcattgacatttataggcagagacagatgttaacttgtaataaatttgaaagcagaattttattttcagagccatgaaccaaatatgaactttccaatgccgcttcctccattcgcgcataacttttcagtatttattgtagtttggtctggcaatctactagaaatttttccaaatcaaattagttgaaatattgcaatgycatcttttaaaaatctttattgagatataattcaaaggccatacaatttacccattgaaaatgtacaatttaatgttttcttagtatatgcacagagttgtggaaccattaccacaatctaatttagaacattttttatcacccccagatgaaactgcatacccattagcaatcactcttattctatcccccatccttagttaatggcttcctgtttctagagatttgcctattccagacacttttatataatggaatcatagattgtgaactttagtgatagtatttttttcttttttaagatggagtctggctttgtcgcccaggctggagtgcagtggcacgatctcggctcacgatagtcttatttacttagcatgtcttcaaggttcataaatgttgtagcataaatcagtatttcattcctttttgtggcaaataatatttcattttatggatatatcacattttatctatcc

SEQ ID NO: 74850 - DNA, 928 bp, Homo sapiens
gtgcaaactaaaaggccacatatcaaaaagcacaagttggaaaaactaggctgatttattctccaagtaactttaggtcaaagttaaagatgacttactaaggccataaaatatcactggctggagtaaatttatgtctttgctttgttccctgtcattttgtaaccaaagctatttctatcctgccataatgtgtatttttaatcagacggtattagccacagcagagcaccacaagtcacaaggacagatgatcgtaactttatttakgttcaagatagatttctgtagcactacatataaagcaggatttataaacaaaattaaatctccacttcacttccataataattttgcttctaataaaatcattttgacctctaaatttcatctttaaaacatacttgaagaaatatataattttttgtgcatgcttctaaagtaacactagtctgaaaaaaataataaccactctattgattaaatcctgcctgtgataaagtagcataatgaagaaacctgaaaactcatatgcttatatttgaggtgttctcctgtaggacccatagtagtagataaagcctttcgcatgacatcagtcctgagcaagtacactgcagagttgcactgaacaacttctaagtcctcggactcaatcagaccttgtccagaactggctggattcctcaattcttcaaacctgatattttgttatggacaaaatcatccacacttttgtgacatgctgtttcttgaggtagaaggtaaaaaacataaaaatttaaaatatcattgcctgattcaccaatttattttattgaccgaaagagtggcgtacatatacttctttttctttctaaggcagcaaatgtgttggcattttaataagatttgcaccacgtgtggcttttctcaacgccactcaatt

SEQ ID NO: 74851 - DNA, 604 bp, Homo sapiens
atactttgtttttttcccagaaactctatgagaaactgattacatttctataactttaaaaactttttttggcttcagcagtttccccttctcataataaaatgtagggcagaacttgttacgtgctgggtttttttttttttttccttttcaacattcctcttagaaaagcaatagaatattcctgattgttaccattataagttttgatatctgcttctttgtttattcacttaagagctactctgtttacaataatgtctccttagacttgtgaatgtttctctctgcttttttcgttgtgtattttctgaatttataagctcagtaatctgtcacttaaaacacaagggtaaagcctgtcttctacatggtttgatagagcyatagaacatgcagttgaaagagacttaatagatacagagtgaaatgtagaatacagataataggcagtttcttatgcttgggctgagggtggtgcctgattggtgataccatgtatttgtatttgtattttttttctgaatgaatgaatgaaagaggttgagatgctgatttatgaatttaagaattcttttaaaaagaatttatgaatttaagaact

SEQ ID NO: 74852 - DNA, 588 bp, Homo sapiens
atgaagaggacaagtgggaggtgaagttgagaaagttaagctgggcaagcctgtgtagcgacttaaatgctaacataaagcaaatggatataataaattcaggaaataattgaaaactttgattatatagtagcggactgggactaccacaaagtagaatgtcagctccttactgctctggaaaactttggaaatgttggggccagctccgcaattttacaaggttgaacccagaaagtgagggacttggaaacatttgagttaaatataaatattaagattcttatcaaatctaatttaggcactcgttttagctttctaytgctgctgtaaaacattatcacagatttactagcctaaaacaatacaaatttattcttctacagctctgtgggttagaagcccaacatgaatttcaatgggttaaaatcaagttgtcagcaggaacttccttccctcaagcctctagagaagtctcttgaggcctaagagaagtctctacaggtctgagggaagaatgttccttggttttctccagcttctacaggatactcacattccttggctcatggccccagtcttccatct

SEQ ID NO: 74853 - DNA, 588 bp, Homo sapiens
atgaagaggacaagtgggaggtgaagttgagaaagttaagctgggcaagcctgtgtagcgacttaaatgctaacataaagcaaatggatataataaattcaggaaataattgaaaactttgattatatagtagcggactgggactaccacaaagtagaatgtcagctccttactgctctggaaaactttggaaatgttggggccagctccgcaattttacaaggttgaacccagaaagtgagggacttggaaacatttgagttaaatataaatattaagattcttatcaaatctaatttaggcactcgttttagctttctattgctgctgtaaaacattatcrcagatttactagcctaaaacaatacaaatttattcttctacagctctgtgggttagaagcccaacatgaatttcaatgggttaaaatcaagttgtcagcaggaacttccttccctcaagcctctagagaagtctcttgaggcctaagagaagtctctacaggtctgagggaagaatgttccttggttttctccagcttctacaggatactcacattccttggctcatggccccagtcttccatct

SEQ ID NO: 74854 - DNA, 588 bp, Homo sapiens
atgaagaggacaagtgggaggtgaagttgagaaagttaagctgggcaagcctgtgtagcgacttaaatgctaacataaagcaaatggatataataaattcaggaaataattgaaaactttgattatatagtagcggactgggactaccacaaagtagaatgtcagctccttactgctctggaaaactttggaaatgttggggccagctccgcaattttacaaggttgaacccagaaagtgagggacttggaaacatttgagttaaatataaatattaagattcttatcaaatctaatttaggcactcgttttagctttctattgctgctgtaaaacattatcacagatttactagcctaaaacaatacaaatttattcttctacagctctgygggttagaagcccaacatgaatttcaatgggttaaaatcaagttgtcagcaggaacttccttccctcaagcctctagagaagtctcttgaggcctaagagaagtctctacaggtctgagggaagaatgttccttggttttctccagcttctacaggatactcacattccttggctcatggccccagtcttccatct

SEQ ID NO: 74855 - DNA, 571 bp, Homo sapiens
tcacacctttctatccccaggcctcaattcttattttatctttactacttcattaatttaacccactcttatcccttaatccactttctctatgttcttcctccctaatttcagatttctgctaagcatatcacaagtcccatatcatcagccacattaattacaaattatttttaatttttctctcttcctcaatacttacaactagacagtctcttttcttcttcattctcattcattattttccattttatttgtcaccattttaattcaggggctgaattttcagcgtatatcaacactattagaatagcctcctaactgtgttggcctttaatccttgcctttcttcagtcctcatcatgccctcagattcaccatcctaaaatataatttcctattttttgaatatgctaaaaaatgactatggcagaygaagcaaaagtttcatccagtgtagttggaaaagtactaatgagaatttggaaaacctaaattttcatggttaaaccacactcagtctttaaacaatgacatgtccttaacttctccaggtaccagatttcttatc

SEQ ID NO: 74856 - DNA, 1257 bp, Homo sapiens
cttttccaaagatggtgacagtacctgccatgcaacatgctcttctgcaatgtgatcatgccagtctattgaatctaggctggtcttaatgacttgcttgtaatagaatggagtggaagtgatggtatgtaacttctgaggctgggtcagaagaagccttgaggcttcttccctggtctcttggaatgctttctggctgtgccttcttgggatgctctgtcttaaaaccatgtcaccattctgtggtaagtccagtcccaaataaacagtttaagccttccagtaatgtgagcctagccttctaatcatctgagcctaggcactagccacctgagtggagaaacccctggcagtttgcgtcttcacaaatgagcagacattatggagtctgcagacagtcattattatctccattcattgtccagagtcctaaactggagaacccatgagcataataaaaggttatttatttctaccactaagtttgggatggtctgttacacagcaataggtaatcataacagaatttaatattggaagtggggtgttgctgtaacaaaacctaaagtgcatgggaccagctggtgggtagaaagactgttcatgaagcttggaagggactcatggagactgatggtgagggattgaaagacagtaatcacagtgttatttgatacggaagtaagaagatctctgttatctagtggtagcaaattttgtaaaaccatcacccagggtaacatggaaaatagaaaatgaaccagtggaccactaatgaaattatggattggcaaaggagattaccaggcagaatatctaaagtgtcagctgtttcttttagccctgtctcatgatatatggatagagaaaactgagctaaaaacggaattcttgttttcaaacaaagggttctcaagcaaaaaagggcctcagagcaaaggtcaaatgcagaccagagttaggaaaatgcggtctcagggcagagatgaaactaaggtgtaactataaaacctttgttaagtcctcaaagatttgaggtggtgcctcatagaacctttcagacacacaaaaggccatccaagtatctttaggtcatgcctcctagttcctctctgttaaacaaaaggkcttctaataatcttaagggctttattccacagcagcctcacagggagcccaaggtagagaaggacttctgcctgagtgagtggatttataaattgatgcatagaagcttataaagttttaaaaataatt

SEQ ID NO: 74857 - DNA, 683 bp, Homo sapiens
ttttatatatctttaaaaagatgagattttcaggaattgacatggaaagcggaccatgatacactcttccataaaatcagcatgttgcaaaataataagtgtagtatgaacccacctgtagtacagaaggatatacattaactgttaacagaggtcatttctggggcataaaagcatggacagtatttactttgtacaccactgtagtatgttactttttggatcaataggcacatgttactatttccatcacaagtcacattgaaagagctgagaacaaatactctgcagatctctggatagatcccctatccaacataccagtatcttctccgccccaacttccctgcctgccttgcatgggtcagtggctctcaccaggttgtccatgagcctctagtaagatacagacatggtttagttaagacatcgggtttccrtagtaatcacaaagaattcactgtaaagattagaattgattatataaatgggaacttttatgttttataacttactgtaagaggaattatttttaaatttctataaggattccaactatatgacattctggaaaaggcaaaactatgaagacagtaaaaataacagtggttttcagtgggtagagggagagagatgaataggaggagcatggagaatttttaagacaataaaactattctgtg

SEQ ID NO: 74858 - DNA, 875 bp, Homo sapiens
tataaaagcacttctttgctttttaaagaatagtgttaacacatatatatgaatacctaaatatcattttgttttgcttgacacatcaattgagttattgcttgacacatcaataatttaaagttgtgggccaggcacggtgcctcacgcctgtaatctcagtactgtggaaggccgaggcgggtggatcacctgtggtcaggagttcgagaccagcctggccaacacggtgaaaccccatctctactaaaaacacaaaaattagccgagcatggtggtgtgtgcctgtagtcccagctactcgggaggctgaggcaggggaatcgcttgaactcgggaggcggagcttgtagtgagccgagatcgtaccactgcactctcagcctgggygacagagcgagactccgtctcaaaaaagaaaaataataataataataataataaagttgtgtgttgtatcttctaccatgattgtaatttttaaatatattgtcagttttacaaaatctgattgtcatatctttctggtgaattcaagttttcatcattgtgtagtgactctcctcatagcatagtaattttttgtctcaaagttgatggactctcatgttcatatagctgactcaaccctttgcagatgttgttttgccatgtattgttttctataactttctttgaaacttttttcgttcttatattttaggggtatcacttatgaatatcatatagatttatttttgttttattctgtcaatcttgtcttttaatgagtgagttcagtctactttcaggaattatgattacagatgctcctcaatttacgatggagtcatgtccgaataaacccattactagttggaaatatagaaagttaa

SEQ ID NO: 74859 - DNA, 1478 bp, Homo sapiens
tattatctacaccttctgtagaataaacccttttcttagagcctgagtctacaatcttaacttttctcatcagtgcttgagataagacttctttccttatttccaagctaccttttcatatccccagctctccaaaaactgtttgtttgtttgtttggcataacggaacaatttgagagactcctagtcccagctagtgattatcctggcagtagagtccctgccctcagccatgagcagccaaaataattggttttgcttcttgaagttattctacctgggtataacaaactctggtattccaaaaagcaggggagagggttagatgcatagcttagataagttaccacacggagaaatatacagtctaccaataatgaaacttaaacccaatcaaatcaagttagtgacttatttctcataggagcactttctgtcacctcaagaatgggatgacattacccacaagacaatatacctttgtgtacagagattaacaactatcccaattattttctaacatttccgaaaggtccttgaagcgcaaaagcaaactcactgacaataatgtgggttgcatttcacaaaacccttcctctgcccattacgtgaaaggggaagcagtatttcaggctcactccgaggcatacatttctctgtacaaggaccaccactgtttgattgccaatgataggcatattagaacaatcaagactcattgcttactccttcagagtacaggacaacaggttatagtctaacgaggataagaaagagtgcatggatttcctttacattttcttcatgtgctagttttacctgcaccaactatagtgggtaccataatttccaactcttctactacagagcttagaagccctataggaccctctcagaacccacccagctctgagaaactaagactcactttaatcaggaaagcacagcctacatcttgatttatatcttgaccttttccatgactgtatatttgaagaccaggcttctatagtttaaaccagtggttttcaatctactaacctgtgtcagtttgtgtcccctgagaagcatacatcaagacatgattacagataacaagattgtttaggggaacatctgtggaagrtataggaggagacatcagaaataggaagacagaatattcagacatcaatgcaagagtcacccctgaaagggagagaggaaaggaagtttggataggcagggcttccaactgtagcatagttctaagatagtctcagccaggttaatggggaatctccaagccaaagttgattattagaagaatcctgctactgcaggaatttctggtgctagtaccttcacgttacttagtcattagctgggagcagcctcaggaaagtggggcctggtctggatactccctcagtctcctctacctctaatggtttctttctcaaggtgtcaaaattggatatctttctctgattttgttt

SEQ ID NO: 74860 - DNA, 1465 bp, Homo sapiens
tgcatattgacctcaaggggccaccaaaatgtaaattaaatatacttaattcctttcctgttgcatgcacagccactctcatattgttcgaatgggctttcttacttcaatcaaatagaagttagacattgagtttcagatgcatactccctgagcctcagtttatttaaaaataatatttgtwtttgaatcatagtgtgctaaaggaaatagctatgtaaacctcctatagaggtgaagggggtctctagaaagacagtttgctgctatcattgtgtcctttcatggaagctcattattatttcaaaagctcagaggtacccctgtcatattatggaggtgccatcttccatgttcaaggccttccattagacatgggagatgagctggaacacaggtgatgatcctcagaaagaagcacagcaaaaatgatacttacaagtaggcaaggaacaaaaagatcagggtaaacagttattactgtgccaaaaggcacagatcaataatccaaggcaggtaaggccaacaggtatattgaagaagagtggactcctagtacatgttctaaatattctgaatactatatagattgttcgttattttaatgatagtacataatgctaaactgactcaacaatgctgtcaaataagctagtcacctcttagattgttcacctctaaaataaaataattttgcacataatatttagtccttaagtgtttcagcaaaaatgcaggtaaatcttacaatgctaacagaggtcttaacaaatttccaataccaaaaaaaaaaaaaaaataggctgatcacattacacaaaggccaaagaagaacaattctgctgccaacagacttttagttcagaaacattctaatttcagtaattcaaggaagacaactacaattgtatggtttttcccactacaagaagaatatcaataatccttgcctccacaataaattgttgtcaatatcagctacaaatttggtctctcatatcctcaagtaataaattttaaggaaacacaaacttagtttcagggccaaaattatctattaaatcatgtaagtaatgtgtttcttgttgaaattcattttcttgactttgttttttcccaaggtctaaacaatttttcttctgaaaatttttagagtgatgccagtagtactatctcccttcaaataatgtctaaatcatatttgtacttttttggctcctagacataccaagaatacaaaaattctgctctcagaccaagccaaaatcaactgccagatataaagatgggaatttccattttactcacattctgatgcttcacatgaaacaatgcaacactcacacagaataaaatatgatattttctcagcaagaagtttatcttttacttgaaaaccagagtctgggctacttctaacattgctgcagaagcaccattatgtgctaaaacactgtgaattaag

SEQ ID NO: 74861 - DNA, 866 bp, Homo sapiens
tagcagggtgcctaaactcagtaatgtggtaagagataaggcaacaaagcttcatgaacattgtattttcttccaacagggcacaaggaagatattaaactgagttccccccaaaatcccaaaaatctcctactgataatcaagatttgtggaatctataatgtgtctttattttggtttaaactaatgacactagattttcttctacctggcaaagaagaggtaggtatacattaaacaaaagaaaatgaaaaaaatggacctaaaatcatgtgggaaatagatcattgtcatcattgttcaaaaaagaaatgttgtggaatatttctgcaatttcctggccagctagtctttttcaccagacgcatatatctttttcaaatatcaaaagatagtaaagctatgcatgtaaaagtcataatagtaatagtaattataagtattataagggtaagaataatttacatgattcttactgactcccaagcatttgctaagcactttaacttttcaaaatctcagaatgctatgctgtacatatgataagaaaggagaactttcttagtttagaaaactgagttgcagaaaggttaagcaacttgatcaaagcaaattagtaatgggaagagcagaaatttaaacctaactcatctttcatacctatgaagatgcaaataagtcaaccaattacatttgtgtgtaatatatttgccctcttgatgaataytgaaccagagttagagcatcttctatttgtttcatgaaaaagcattgacattatacacgatttgtgtgttctactttgaaatcacactttgttactctaaacattatttgaataagaagttgctaataatttgagcagt

SEQ ID NO: 74862 - DNA, 833 bp, Homo sapiens
gtgaaatacaaaggctggaagaattgattatgccacttggttgctcttctgaggaagataaaagaggcagggacatgctctgctactccttgtgtgtagaagtcgcgcttggaaacaacacactgacatctctgccatgcagatcactccgataagctagtgtgctgaatcaactattatcatttaggaacttcctgggcccactgattgacagctacacagtgtatcttaatggtctttttgcaagccaattttaatgaaaaataaaattacatggaagagaatgggatcaaaagtaaaaaagaaaaagtatcaaaaatgtttcaccagtcatttcacatgaaaatagcaaggactctagtcctaggtagatgatgaaaaaaatcctgtgaccactctcgtgtttagacactttaccagaaacactggcagagtacstgtaatattagacgtttagcacagtggtttctttgtgactgctttcattaatagattcttatcttagactctttcttaatgatcacaaaccatcattggcccagatatgaacctcatagaccagatcaccatcagctcgttgacatttgactgattaccaattctcagcacacacatcagaaatcaagtggttaacaattttatttgtattttacacacattcttgctactactccaaactcaaaagctcttcagctcacaaaaacagttactctttctagcatgttctgttcgagaattcaagggcattcagtgcctcatctcagcccataacaagagccaatattaaaaaaaaaaaatcaaacttctgctaaaggttcacaatattcatgcct

SEQ ID NO: 74863 - DNA, 3454 bp, Homo sapiens
aatcaaatggaactgttatgacaaacagtttgggaagttaaataatctccttttcctattttagacttgtataagttcaaaataatctttaagatattcacactaaattgttacctatatagtatcttttaatgcaaaaatatacagtataattgaatataatatcacttttattgaatgcatgtctttcaatctcttttaataatctcttttaataaatgcttacaaggcttttgttttatgagttttattcctccttgagttgagaacacagtttcttaaatttgaccatgaacattccattgagagactgatgataaattcacacgtagcctccctttaactgacggacttaaacttgatccatggatttgcaccacgaacttcaaaagatgaatcactgctgtagatgtgatggcctaattcttccaaatgtggctcaggatcagtggtagcaaactgggcagcatcatcaatttctttcctcacctcagccccaatttcctttaattcttccacagtggcgagcttgctgtttaccattctatcttggagaattattataggatccctcttacttcttacttcctgaatttcttctcgtgtacgataactgactccaggatcactcatactgtgtccatgataacggtaggtttgcagctccatcagtatgggcccctttccagatctacagtagttagctgcaaattttgttgcctcacgaacacacagaacatccattccatcgacctttagcccagggataaaattgcccctcttgtagtaatcagggctggctgctgctctctcagtagatgttcccattccatataggttattctcacagatgaaaacacaaggtaatttccataaagctgccatattgaaagcttcggctatctgcccctgattcgcagcgccatccccatataaagtcaaacagatctcatcgtttcctttatatttacaggccagagcaatgccagcgcccagggggccctgtgcaccgacgatgccattgcccccatagaagttcttggtatacatatgcatcgatcctccttttcctttagcacaacctcctcttcttcccgtcagctctgcgagaatggatcggacagaaagtccccgagtatagcacacaccatgagccctataggatgtaatgacgtgatccgaggggtttatgccggcctcaaggcccacgcaacaagcttcctgaccatcgcacaggtgacagaaaccgcgaatgaatttctgtttgtacagctgatctgccttcaattccatgcggcgaacagtcagcatcatcctgtagtatttaagcccctccgccctagtgagcactgtagtgacagggggaccctcttccaacagataaagatcacatttcttaatttcaaatgtagcgtcatttgaggagttacgggatgccaccagcactctgcgagctgatttctgggcaactcgcctcaacacgcgggagatgaaggcggccagcatattcttcacggagtgctgtagatggcagcggcgtcccgtaacgaccgccggaaggcctggcctcggctccgcgtctccttccggtgctccaatgcgcttggcaccatccgggcagtgcacacgggtgatagaggcaggtcctgcacagcactgggacatgggccacgcagcctgagctgactgatttgtacagtgcctgccagctgtaaaatgaagactaaaagtgatttccttttctggaggacttgggcaaactacagggcatcctaatcgccgtcattgctgaacctcaataatctgagtcccttttccctgttaaaccctggagcactgtatctcaagctttcccgacaagcgtatcaaatagaagaaaggaacaaactcagtccctaaggcacatgagagttctgagagttagtccaaaggtatttcttcctaccaatatttctttaatgtcttgtttttgatctttaaaataggtatgaatatttatcctgctccataatgtgccatatgtattttaaggtaacaacaaagctgtaaattatttgtagcttaattaactttaaaaacaaaacaagcacacgcacgttaacaaaaaccccttttaaagaaaagtcagtactctcaaataatatgccacatttatcctgatggcgtctagcacctgtgacacttgaagtggggagggaaaatgtatacaaacctcggcctgaggataacactttaaacccagtaataaactttgcttggtgtgggaaaattggaagcagggagagagggttgaggtgcagattgtggtaaaaagtttgtagtttgtgacattccacttttccttactctgtttaataattctgaatctctgtttttacctagttttatccctattttctgactacttcacttttgctcttccttttgtttatttcctcttttttttctttttggttttctataaaaatgtcttcagcaggtttccatagactttcaggtggtatttatttatttatttatttattttgctttcatatcaatcaaactggaccagccttagtccaggaaatctagaaacatgttcttatagtgcctttttatgtagtaaccattagaaagtgtwacttcttataaagtgacccaccaaacaatacacagtttggactacaagagagcaacagagtttgcttatgccactggaaaccgttcaatcacaagagaagagaagccttagaccaagggatacaaagatcacatatcatttctctctttttgtgcttttaccaggaaggcgattttgtgccccaataagccaaccctaactagggatcctgttttatttagaatattaagccattcaccttaatgcatgctctgttttatatccattgcctatttgcaaatgataaattcttacccaaatgtccctattacatgttcaaagcagctgccttctctatatctagttgcaggtgttattttgggcacttcttttaatattcaggaagaaaagagaaaatagcttgttaaaaagttaagatacctcttaaaacttgatcgtctccccaccttctgaacccagccatcataataggcctcatcttttcactcaattgaaaattcaactgttggaattcatggtcttgctgtgttgtttgctccctctttgatagttagcctgtctctgctgttctctttcattcctccaggtattggagatctccagggagcattatctccataagaatgagaaaaatgacactgcaggatagaacagtagtgttaatgggtcagtgagtgacagctgagccttctctcagaggtatcagccaggccagtgctgccaggaacacaagagctgtacagtaaagtgtgccaatttaatcttgtcacacgtagcctggactgcaaagatagagctccccttaaaagcccagtgtgtcaagcctaaacc

SEQ ID NO: 74864 - DNA, 1415 bp, Homo sapiens
tgcatatgcttctattacaaatagcaacaattctcaaatcttaatgtttataaaagcagctgaggtatgtctattataaatgcttcctactatcattgattgtgattcacttggcatgagaaaaggcatagtaaccacatttttaacaaacacttcaggtaattttagtgtaggtgattcaagaacctcaggtaatagttagacccttgattatttctccactcactttacctgctcttacttcgtcctaggattctgattcaccttcatatttctggaaaactcttatttatcctttaaaactctgaggtcactcccttaagccactctcatattgtcagttgtggagctcagtaaatatttgataaataagtggaatacatacaaccagctttcctttgctttcaggttcaagctaaccaagccccaggtggtttagaagtttttgcctgtcccgagtattcagaaaattcagttaactaaattccatttacatgcaaaatgttagtaaatttccccaaatgggcatgattaacattcttctcacagccaggacagacctacaattttcaaatgaggctgtttcttctaaataattccaaacatctctctgtatttctgaaggaaatgtcaaatgactttgccctggagtgcaytagtgatcagagcatctgatcacattggtgtcatgactgaatcaagggacatttcctttgatatcagcctattttaaaaatggggatttcctctattctaatttaagctcctagaaatggtcctcttgcataactatacctccatcctgaagttggcttttttggtttatttaaaaaagagaaaattacctaatttagatttagttttgctcttgttgaagcaagtttttttccccctctgcgcctcattttgttgttattcctttagatcaaacttcaaagaaaaagtctgatgaatcaactattcatttactgaagctgaatttttgcttgccactagtttttctactgtgatgctcctttgatttctgttctgtctgcatcttttatgcctttcatgcatgtggagaaaattatagtgtagtctttactcaaaaaagaaatttcatcatatccccaaatcttggaaaatttaaagtacttttccaagtttgaaaatgattttagacagaagccttagacacagaaattaataaataagtctattgtattctaaataattgaacttttcagtagctaaggctgcagaacagacaggaatcaatttcacgagggatatcctagactgaacatcaagtgcaatgtatagttcctgagccagttatcacctggcttagaaaaatatttattaaaatataataaagttaagaccagttgggcagaagcagtacagtgcagtggccaagggtttaggatttt

SEQ ID NO: 74865 - DNA, 1415 bp, Homo sapiens
tgcatatgcttctattacaaatagcaacaattctcaaatcttaatgtttataaaagcagctgaggtatgtctattataaatgcttcctactatcattgattgtgattcacttggcatgagaaaaggcatagtaaccacatttttaacaaacacttcaggtaattttagtgtaggtgattcaagaacctcaggtaatagttagacccttgattatttctccactcactttacctgctcttacttcgtcctaggattctgattcaccttcatatttctggaaaactcttatttatcctttaaaactctgaggtcactcccttaagccactctcatattgtcagttgtggagctcagtaaatatttgataaataagtggaatacatacaaccagctttcctttgctttcaggttcaagctaaccaagccccaggtggtttagaagtttttgcctgtcccgagtattcagaaaattcagttaactaaattccatttacatgcaaaatgttagtaaatttccccaaatgggcatgattaacattcttctcacagccaggacagacctacaattttcaaatgaggctgtttcttctaaataattccaaacatctctctgtatttctgaaggaaatgtcaaatgactttgccctggagtgcattagtgatcagagcatctgatcacattggtgtcatgactgaatcaagggacatttcctttgatatcagcctattttaaaaatggggatttcctctattctaatttaagctcctagaaatggtcctcttgcataactrtacctccatcctgaagttggcttttttggtttatttaaaaaagagaaaattacctaatttagatttagttttgctcttgttgaagcaagtttttttccccctctgcgcctcattttgttgttattcctttagatcaaacttcaaagaaaaagtctgatgaatcaactattcatttactgaagctgaatttttgcttgccactagtttttctactgtgatgctcctttgatttctgttctgtctgcatcttttatgcctttcatgcatgtggagaaaattatagtgtagtctttactcaaaaaagaaatttcatcatatccccaaatcttggaaaatttaaagtacttttccaagtttgaaaatgattttagacagaagccttagacacagaaattaataaataagtctattgtattctaaataattgaacttttcagtagctaaggctgcagaacagacaggaatcaatttcacgagggatatcctagactgaacatcaagtgcaatgtatagttcctgagccagttatcacctggcttagaaaaatatttattaaaatataataaagttaagaccagttgggcagaagcagtacagtgcagtggccaagggtttaggatttt

SEQ ID NO: 74866 - DNA, 654 bp, Homo sapiens
actctgaggaacactttaaaatacacacaatatgccatatggtgagggcctattcttccataatatttaagcagaaggacttaagacatgtaatatattgctttctgcctataatacaaaaagttcagccaaaaactggtaattacatgaggaaataaaatattcttggtggggggaagacaaacttcaaattccaccatacagagaaagagattgagtatactgcgagcattactttaaattaatctggaatgaaagcatcatagatctcttaaaaacactaagtacttagtataggtaaaacaataaattttgctccasagagtacctctgtagcagtccaagtggtgcttatggtaacttagaactaaaatgacatttcctccgctattatgaattgcatctctatgacaaaaatgtgttccttaaaagactgagctggtagagtttctaatgtgtataaatataagttttctatactggagagaaaaattgccttggcttatatgaaaatcctcccttcattgaatcctaaacttgaaaaagataaaccaataagctttaaaaataaattaaaatgccataaaataacagctcataaataaaggctgcctattgcttctagtacccgagaacaactctaagttgctatgt

SEQ ID NO: 74867 - DNA, 654 bp, Homo sapiens
actctgaggaacactttaaaatacacacaatatgccatatggtgagggcctattcttccataatatttaagcagaaggacttaagacatgtaatatattgctttctgcctataatacaaaaagttcagccaaaaactggtaattacatgaggaaataaaatattcttggtggggggaagacaaacttcaaattccaccatacagagaaagagattgagtatactgcgagcattactttaaattaatctggaatgaaagcatcatagatctcttaaaaacactaagtacttagtataggtaaaacaataaattttgctccagagagtacctctgtagcagtccaagtggtgcttatggtaacttagaactaaaatgacatttcctcmgctattatgaattgcatctctatgacaaaaatgtgttccttaaaagactgagctggtagagtttctaatgtgtataaatataagttttctatactggagagaaaaattgccttggcttatatgaaaatcctcccttcattgaatcctaaacttgaaaaagataaaccaataagctttaaaaataaattaaaatgccataaaataacagctcataaataaaggctgcctattgcttctagtacccgagaacaactctaagttgctatgt

SEQ ID NO: 74868 - DNA, 723 bp, Homo sapiens
aacttggctagtactaagaatggtagtggtagtgaggatgggaagcagaagggggtgaggaggtttgggggtatgtggggtggggatggcaaagtgaatcaaacataatctaggtcctcagtataattagaactgaaggcaaaagtagatatctatatctacatctatatctacatctatatctatatcatccatcaacacaaagccagacaaggtataatgttaaaagctaaaggagtgaaggaaaaggagtgaggttkattgagggaatggataatgacagtagttcccgatatcctgagaagaggagaggataatggaatgtgtggccatctggaagaagaagagagggtcacccaggatttgttagcaaatctggttggttagatcttcaaaaaatggaatgaccataaagcctgaaaacacagattatattatgttatcagatattgtaatgtaacatcaacagaccatttattatgtattcatctggatttcctgactttgaggctaccctggctctctagaatctgaccacttctatcaccatgattgtctctctccttgagtcctgcaatagctttactagtctccctgttgtgtttttgctcacctctgccacctccaattagcctattgtcaacatggtaatccaagtaaaatcacagtgatccctttgacgcactgcttctcaaaaagaagtccctgctcgagcagcagccg

SEQ ID NO: 74869 - DNA, 635 bp, Homo sapiens
aggatttgaaacttaggtctttgccagactttaatatgcatgttctaacttcagtgggttacctattagtggatggtcagctaactgcaatattaacgaggtcaaaatcacaagctccaagttttcattagctggtcactttactcaggtctaaggccaaagaccttattcttaataagtcagctctcaaaatgaatatatacagatgtacccaggttcatcatcatygagagaggtcaaggattacatagtactgatggtcggcctaggaagactgagaaatgacttagtgagactaggaccacctcaagacgtgacctggagtcttctaattacgtaacctacaaaccaggaaaccaaagaaacagggctttacttcttaactgggcttcagacgttccttaagaaggagggccatgtgaaaaatagttgtatataatttgagcctggatgacagagattataagtgggtaaatgccaaaatgatcaaaaagagtaaggaagagccatttataacaccacctgaagaccatttgtccttacacaattttaagtggggtcttttaaaagaactgttgtgtacatagttcatgatgggtagctccaaaaagaagaaaataatacaaaagggactg

SEQ ID NO: 74870 - DNA, 691 bp, Homo sapiens
acaaaaaactgaaccattttttcccgagacaaatctacccttgttcgttcttcctctttcttgccccttgtagtagagaggtatcaatgagcataattaaacttgtcyatttgtgggtgtgtatgatcttgataaagaggagaaagggacgaagtggacctttctagtgaactgaatggattaaattaaagcaagaagcaaagtgttacctaactcagggtcagtggctcaaagagcaaaataagactgagtgggagaaaagactatatatatatatatatatatatatatatatatatatatatatatatatatgagatagggatatccatatctagctatggatatttatatcaatatccatagctagatcaaggccagaccaaggaagtcattgaagacaactagagtagatatttcatgactgaggaactagaatgcagagtatattcgagttttgaaaaactaaagattttgctgtgatttagaccataaagtgacagagtataaattaggtataggtagtaaacatggagagcaacggagaagctgatgagtacgttaaaaagaaaaaaaatataaaaggaagaatcaaaaacaaatggtctagtgtgagagattagaaagatggttataaatactgggatacttgttctagttagaagaaggaccagtttggaggcacggagac

SEQ ID NO: 74871 - DNA, 485 bp, Homo sapiens
ttttttaaaaatatgtcctcttaatcccatataatatgttctcaatttcagatatttctcatttgtagacttcacattttattatattacatagattttaattatttggtgaaactctatatagtctcatcaattttttcatcttttttttgtattctcccatttactttactataaacatttcagttagtctttgttatctaatatcaatatctagatcatctctgattcttcaactattttctgtttttttttattattttaaatcacatgacmttttttggtatatttaagttttgattgcagggcagacatcgttaaaaaaattacataggcttctaatgatgtttttattatcctgagagggtgtgtcttaccttaaaaaggccaatagaatgataggtgctcatcttaatctagtcagatactgtactgggctggggcttggcttcaggtttcttaagacaccagtatatctctggctg

SEQ ID NO: 74872 - DNA, 485 bp, Homo sapiens
ttttttaaaaatatgtcctcttaatcccatataatatgttctcaatttcagatatttctcatttgtagacttcacattttattatattacatagattttaattatttggtgaaactctatatagtctcatcaattttttcatcttttttttgtattctcccatttactttactataaacatttcagttagtctttgttatctaatatcaatatctagatcatctctgattcttcaactattttctgtttttttttattattttaaatcacatgacattttttgrtatatttaagttttgattgcagggcagacatcgttaaaaaaattacataggcttctaatgatgtttttattatcctgagagggtgtgtcttaccttaaaaaggccaatagaatgataggtgctcatcttaatctagtcagatactgtactgggctggggcttggcttcaggtttcttaagacaccagtatatctctggctg

SEQ ID NO: 74873 - DNA, 749 bp, Homo sapiens
agtcccaattcctataagcagatgtgaggaaggccaagtgatgcccgcacacgcaacgggttgcattagattacaggggaggaataccaaatttaggaaatctcaggcttttagaatgggctgcaagcaagcctgcccaaacgttgtccctgaggaagacattacttattttcataatggatagcaaacaagcctggtctctgmcctcaaatgagacactttctatcttcaaaagttgtcttctatacaaacctgaaacttctctgaaaagatagaacaaaaggctgtcagtacttccgttcccaagacgcacagaaacgctagagatccatagaaattgtcttgcaataatcatacctgctagatttcaagttaccatgaaccagatcccatctttttcatcaccatattcaatttcttccccactgtctagtgcatagtgcacagtataaggagctaagacttactgaggtctcatgatatgtcacaacttttcaaataccgtgtatgtaaactcaattctaactactattatatagttacaaatgttaccttcatttggcacctgaggaaactgaagtcaaaataatttagaaactcatctaagaccaaacaactaacaacagttggagcatatatatatatatatatatatatatatatatatacatatatatatatatatttctagaagacgtaaattggattaatagatggctggaaaattatgaaacagaaaagaaggctgt

SEQ ID NO: 74874 - DNA, 937 bp, Homo sapiens
  misc_feature (1)...(937): n = A,T,C or G
aannnnnnnnnnnnnnnnnnnnnnnnnnnnnnnnnnnnnnnnnnnnnnnnnnnnnnnnnnnnnnnnnnnnnnnnnnnnnnnnnnnnnnnnnnnnnnnnnnnnagtagtatattataatatttactaattattatagtaataataacgtatataagtacatcaataatgaatcaatacttatttggagtaaattatataaattatatgtcaaatatataaattatttagttaaaatcataagtaatacattaatgacaaaattatatttattatcatatattattttatgtgcatatgtataataatctacctgagaaaatgatctcaagttatgtaatattttatcatgtttaktgaaatgtaaatgatagggaatataatacatacaactttagtttggagagaataaaaatattttcaaataaaatgactctaagctttcaccctgaacataatagcaggtgtatttggagaacacgatgctaatgaatgtcatattactcttaggtatatttatattaaagacattttttgttgaagctagcttgtctattccaatgcaaacaggttctgctacttataatttttacaacctccttctagtcataaaccatcccaatatagtccccatggttagctatatttcgttcgtgccaccttataacagcttgtgtagagatatctttgccattccttcacattatgatatatctgagtgctacatgagagtgtctgggaattgggtagttgagtcatccctgagaagatttaccacatagcaactcattgtttacattgcctgcaaaggaatctcggcaaaagaaaaaaaaaaggaataacatgcttcctttcacttagaataaattgacatggtatatattatacaaagtgattactaatgaaatgaaaaatagtatatttgtgctcatgtatagag

SEQ ID NO: 74875 - DNA, 937 bp, Homo sapiens
  misc_feature (1)...(937): n = A,T,C or G
aannnnnnnnnnnnnnnnnnnnnnnnnnnnnnnnnnnnnnnnnnnnnnnnnnnnnnnnnnnnnnnnnnnnnnnnnnnnnnnnnnnnnnnnnnnnnnnnnnnnagtagtatattataatatttactaattattatagtaataataacgtatataagtacatcaataatgaatcaatacttatttggagtaaattatataaattatatgtcaaatatataaattatttagttaaaatcataagtaatacattaatgacaaaattatatttattatcatatattattttatgtgcatatgtataataatctacctgagaaaatgatctcaagttatgtaatattttatcatgtttattgaaatgtaaatgatagggaatataatacatacaactttagtttggagagaataaaaatattttcaaataaaatgactctaagctttcaccctgaacataatagcaggtgtatttggagaacacratgctaatgaatgtcatattactcttaggtatatttatattaaagacattttttgttgaagctagcttgtctattccaatgcaaacaggttctgctacttataatttttacaacctccttctagtcataaaccatcccaatatagtccccatggttagctatatttcgttcgtgccaccttataacagcttgtgtagagatatctttgccattccttcacattatgatatatctgagtgctacatgagagtgtctgggaattgggtagttgagtcatccctgagaagatttaccacatagcaactcattgtttacattgcctgcaaaggaatctcggcaaaagaaaaaaaaaaggaataacatgcttcctttcacttagaataaattgacatggtatatattatacaaagtgattactaatgaaatgaaaaatagtatatttgtgctcatgtatagag

SEQ ID NO: 74876 - DNA, 1083 bp, Homo sapiens
ctcagtgtatgcatttttcaagtggggtaataatattacatatagagttataatgaggattaaaagtgttgtatatgtaaagtgcttagaattgttctggcataaaaaaaactccataaggattcaatcaattaaattgtttaaattccactttttgaagtgcctactctatgctaggttctttacatctgaaattcagaygccagctggagttatcctgacccctcagatggaaataagtggttaagacctccttttctatggattatggtaaaccaaataatcttcccaagccttctttgaattccaaagggttccttatatttcttgattagctcaggctcccaacaccagcttcttcagaattattctcgtaagggattgttttgctgtagtccacattgtatctcacagatgtttaactcaaattaatactcacaggaaacttatagaggcgttcacgtatgtagtgacatttattaaagtttggaaaaaaggaggttttacattacaaaaaaaccgtcaattttattttatttatttatatatattttttgagatggagtttcgctcttgttgcccaggctggaatgcaatggtgagatctcggctcaccacaatctccgcctcccagaacccaatcaattttaaattcagtatcagtcatctctattctttaaggccttggaccaggtccacattttaagatctggcctcctgctgaattccttaatctttctctctcttcctttttcctagtgtctcagtccattcaggctgccataccaaaatatcttatgctgggtaatttataaacaatagaaatttgttgctcacagttctgggggctgagaagtccaagatcgtggtgccagcatggtcatgttcagatgagggcccactttctgattcatagatggtaccttctcactgtatcctaacaaggtggaagggacaaataagctcccttagtcctttttataagggcactaatcccattcataagggatctctccccatgacctaaacacttcccaaagaccacgtcttaatactattgcattggagattaagttgaaacat

SEQ ID NO: 74877 - DNA, 1083 bp, Homo sapiens
ctcagtgtatgcatttttcaagtggggtaataatattacatatagagttataatgaggattaaaagtgttgtatatgtaaagtgcttagaattgttctggcataaaaaaaactccataaggattcaatcaattaaattgtttaaattccactttttgaagtgcctactctatgctaggttctttacatctgaaattcagatgccagctggagttatcctgacccctcagatggaaataagtggttaagacctccttttctatggattatggtaaaccaaataatcttcccaagmcttctttgaattccaaagggttccttatatttcttgattagctcaggctcccaacaccagcttcttcagaattattctcgtaagggattgttttgctgtagtccacattgtatctcacagatgtttaactcaaattaatactcacaggaaacttatagaggcgttcacgtatgtagtgacatttattaaagtttggaaaaaaggaggttttacattacaaaaaaaccgtcaattttattttatttatttatatatattttttgagatggagtttcgctcttgttgcccaggctggaatgcaatggtgagatctcggctcaccacaatctccgcctcccagaacccaatcaattttaaattcagtatcagtcatctctattctttaaggccttggaccaggtccacattttaagatctggcctcctgctgaattccttaatctttctctctcttcctttttcctagtgtctcagtccattcaggctgccataccaaaatatcttatgctgggtaatttataaacaatagaaatttgttgctcacagttctgggggctgagaagtccaagatcgtggtgccagcatggtcatgttcagatgagggcccactttctgattcatagatggtaccttctcactgtatcctaacaaggtggaagggacaaataagctcccttagtcctttttataagggcactaatcccattcataagggatctctccccatgacctaaacacttcccaaagaccacgtcttaatactattgcattggagattaagttgaaacat

SEQ ID NO: 74878 - DNA, 1083 bp, Homo sapiens
ctcagtgtatgcatttttcaagtggggtaataatattacatatagagttataatgaggattaaaagtgttgtatatgtaaagtgcttagaattgttctggcataaaaaaaactccataaggattcaatcaattaaattgtttaaattccactttttgaagtgcctactctatgctaggttctttacatctgaaattcagatgccagctggagttatcctgacccctcagatggaaataagtggttaagacctccttttctatggattatggtaaaccaaataatcttcccaagccttctttgaattccaaagggttccttatatttcttgattagctcaggctcccaacaccagcttcttcagaattattctcgtaagggattgttttgctgtagtccacattgtatctcacagatgtttaactcaaattaatactcacaggaaacttatagaggcgttcacgtatgtagtgacatttattaaagtttggaaaaaaggaggttttacattacaaaaaaaccrtcaattttattttatttatttatatatattttttgagatggagtttcgctcttgttgcccaggctggaatgcaatggtgagatctcggctcaccacaatctccgcctcccagaacccaatcaattttaaattcagtatcagtcatctctattctttaaggccttggaccaggtccacattttaagatctggcctcctgctgaattccttaatctttctctctcttcctttttcctagtgtctcagtccattcaggctgccataccaaaatatcttatgctgggtaatttataaacaatagaaatttgttgctcacagttctgggggctgagaagtccaagatcgtggtgccagcatggtcatgttcagatgagggcccactttctgattcatagatggtaccttctcactgtatcctaacaaggtggaagggacaaataagctcccttagtcctttttataagggcactaatcccattcataagggatctctccccatgacctaaacacttcccaaagaccacgtcttaatactattgcattggagattaagttgaaacat

SEQ ID NO: 74879 - DNA, 713 bp, Homo sapiens
ccatggtggtacgtacatgcctgtagtcccagctactcaggaagctgaggcaggagaattgcttgaacccaggaggcagaggttacagtaagctgaggttgcgccactatgctccagcccacgcaacaagagcaaaactccatctcaaaaaagaaacaaaatgaacgttacaagagcaaaattttaccttcactttcccttcacaattattgcttttaattaaaaaaaaaggggggtggtggtggttgggaatgtgggcttatttggtttcattccataaactatggaactgacattacatattgggggtcagggtggggtataatratataatataggctgctgctggcctttctcatcttactaggtcgtatttattgtgcatccacactggaataggacagctgctgtttggctgctgctatcttggtgtaatttctttctagtatgtcaccttgcttttcctaccaattattaaatcatttgcatcaacctcttgtatatgtctgaggtttgggctctgcctttgtgcttatcaccagtattaaacacgggagcaccaaaggacaccgagggaaacaccacataaacacagtgatggatatagtggcatagcaacccagggggtgcaacatatgggttagagcctcatgttttctcaactttcaagttgtgatagaatcagggccctcacaagctataaacatagattt

SEQ ID NO: 74880 - DNA, 713 bp, Homo sapiens
ccatggtggtacgtacatgcctgtagtcccagctactcaggaagctgaggcaggagaattgcttgaacccaggaggcagaggttacagtaagctgaggttgcgccactatgctccagcccacgcaacaagagcaaaactccatctcaaaaaagaaacaaaatgaacgttacaagagcaaaattttaccttcactttcccttcacaattattgcttttaattaaaaaaaaaggggggtggtggtggttgggaatgtgggcttatttggtttcattccataaactatggaactgacattacatattgggggtcagggtggggtataataatataatataggctgctgctggcctttctcatcttactaggtcgtatttattgtgcatccacactggaataggacagctgctgtttggctgctgctatcttggtgtaatttctttctagtatgtcaccttgcttttcctaccaattattaaatcatttgcatcaacctcttgtatatgtctgaggtttgggctctgcctttgtgcttatcaccagtattaaacacgggagcaccaaaggacaccgagggaaacaccacataaacacagtgrtggatatagtggcatagcaacccagggggtgcaacatatgggttagagcctcatgttttctcaactttcaagttgtgatagaatcagggccctcacaagctataaacatagattt

SEQ ID NO: 74881 - DNA, 376 bp, Homo sapiens
gaattcaatagatctgcaaaccaatcactgaaatccactgcacaggwttcataacacaggccccaaggagcaaaatttggatggtatcaggcaacaggtggccaaagttctacatgtgatttggtttaaagcattcagggtagctctctggatttaggagggagttccactctacctgataccactatcagtaagagaatttggctatatgatctgagtttgtgaaaaactggatctctacgtcatcctttgtccctttcacacagtattaacgggaattactgatttgtctttctcttatcagacttacgcttactgagggtaggaggtgagcctcactcatcactgcctggcacaatgcttggctggcactcag

SEQ ID NO: 74882 - DNA, 376 bp, Homo sapiens
gaattcaatagatctgcaaaccaatcactgaaatccactgcacaggattcataacacaggccccaaggagcaaaatttggatggtatcaggcaacaggtggccaaagttctacatgtgatttggtttaaagcattcagggtagctctctggatttaggagggagttccactctacctgataccactatcagtaagagaatttggctatatgatctgagtttgtgaaaaactggatctctaygtcatcctttgtccctttcacacagtattaacgggaattactgatttgtctttctcttatcagacttacgcttactgagggtaggaggtgagcctcactcatcactgcctggcacaatgcttggctggcactcag

SEQ ID NO: 74883 - DNA, 1038 bp, Homo sapiens
tatgtatgtctgaccattctcacaagtcagcttcaacagcatggctgcatcttaccatctcatatatatggatgtgatacaattttcctaactaatcctctattgctagaaatttagagtatttataattttctctattctaaatggtactgcggtatttttctttacatgtttatattatatatatttttgtgatgttcctcctaatggccaaatcaagtaagaggcatatttctgaagttcataaaatcatttccaatacaacctatctggtatagttctctgctttgaggaaccacaatacctctctgctatgtcacattttgccctattaattatgctcaatatttgccactccacacccagtaactwatacatttctagagagtagacaccttcttactcgttcctatatcaatttaaatcaattcagattccaacaaatagtataaaaattaaatacaatggccaggtgctaggggtaataaaagatgaggtgtaattcctgcccagaacagaaggggaggccaactcacaacaaggtctgatacattaagttctacactatatagagatgtatggaaattactatgggaataaagatgagagagcaataaattcttccagggacaaaagggaataaggagaggaaagaaagaggtaattggaagctatgaagaaagggcaattgttgagttgctccttgaaacattcatagaaattcaccaggtgggcaagtgactgggtagattcaccagtagcagccagccaattcaagtttcaggttttttcccctctagagcactagttctacttaggaatttatgaagatccccaatgtgctaagccagggtttttcaaccttggcactactgtcattttgggcaaggtaattctttgtcttggggagctgtcctgaatgttataggatgtttagcagtatccctggactctactcacgagatgccaggagctttcttccagccttttaagttgtgacaactgaaaatgcgtccagacattgccacatgtctttcc

SEQ ID NO: 74884 - DNA, 1253 bp, Homo sapiens
tgcatgtaaaatgggcttacttgtttccatttttagtggaatgttcatttctcatgatacaggcttgctggcctttaaaatgaggacttggactcagtctattcccttctagttaaatgaagtttgactatttgagtaaaaagcccagatccatgtttttttcaagggtctgcttcactgaaagaagacatctgcacatacatagatcgcagagctatgtgaaaagctgacttttataaaactaaactaatggctgcttacgtaacacccagtgtgtttccttcagctggaacacagagagaggcacaccagagtgggagcttacatgtctcttcctgccctgccgcaaggcccccsctgctcctctccagctgggcctgcctgcaacacccattccccctaaagaagcagtaccagtcccttcatttgtttccttagagtgggaacacaaactatgagaatcaagggaatgaggaaatggactaatctgtggttttgctcaaacaacactaccactaaaaaaaacctgtaaccagaatttccaagacttaaatgtgtgtggtggtggcagtgatggtgagagatttaaatattctattttctatagatggcataggtgtatatttttaaatttgtatatttgtgtgtgtttatttttttatttgtatttctatttttacaaatataaaaatactgtgcataaggctgggcgtggtggctcatgcctgtaatcccagcacttcgggaggctgaggtgggtggatcacctgatgtcgggagttcgagaccagcatgaccaacatggagagaccccatctctactaaaaataaaaaattagccgggtgtggtggcgcatgcctgtaatcccagctactcgggaggctgaggcaggaaaatcgtttgaatccaggaggcggaggttgtggtgagatgagatcacgccattgcactccagcttgggcaagaagagtgaaactccatctcaaaacaaacaaacaaacaaaaaaaccaaaaaactgtacatacaaagagtaaatatgtgcctggagtacaattaataactgtaaacaatagatatatattgcttttgtgtgtacatggttaatacaatacataaaacatgtgcatacacagggtgtgtgcatgagtgtatgtaagcaggattatctcagcttacctcaacaccaggcacatacattgactaatgtactatacatacccctgaagtcaatgggtctatatttagtacaga

SEQ ID NO: 74885 - DNA, 544 bp, Homo sapiens
ctaaaagctcgtcgctaacagcacagaaggcaccctccaccattgttttacccctgacaactgagcatttaaacttgcttttcctcatttagcagctaagttttcatcatagtacttacattgtttagacatattatttatcttatatcagctgatgtaagactctcaagagaaaataaaccaccttcattttaaaaattgaaaacgtacagatgaatttgcagcagaaaaagtatgaaaaacaacacagcatatgtttttagaacatggttaagaacatgggttttagagttagaccactttggctaaaatcccaatcctatcacctaattcaaccatgattctaggaaattacttaatgtctctgagtctcgatttcctcaaaatgaggcgaagaactgtatttgtatcagagggttgtggcacaaatttaatgggatgacttatgtgaagcagtgtttgttaaatgaatacaaactatcatgttgaataaataaaatcttttmcaaaatgcaacacgatttatatgtgtactaattcttgc

SEQ ID NO: 74886 - DNA, 1150 bp, Homo sapiens
ttgtcagtaattgctttaggaacagtgttaaataactgtcccacatttatgagaatttgtgtcaatgatggatgaggagtacttacactagttcacttgactgatgcttgtgttactccaccaaaagtactattaacccataatctctatgtgggactgtacctattaaagcaaattaagcagatagagtcccctagcctcaaggagcttgtgatctgagatgagtaatgctggtgaatgtggttcataatataaatttttaaaaacctatatgtaatgataagaattgccagagctcgcataaccaaattagtcaattacatatgaaaactttagtgcatatttttttaaaaagagctgtgtattttatatagttgtcaatgaattggggggtcctaagaactaaacattttttttaaattttcctaaactcctctatcatttagtaaattcagaattacttcgtggatatttagaagtttgggaatgtctttaaaaataaaaaaggaaatataaacaagagcagggatctctctggggcttagcttgaaattggtatgaagggtaccaggtaaaccctggacaaaggatttagtggatacggagaaaataatgcaacatagggccatttgtcccatattgaggctggtcaaattccttgtaagaggggatgataatcatgtcctcagcagatgcaatgatacaacaaaaacagtgctattaccagtagaccagatggagaaaatgctgaggctgggtcactgacagcatagttcaggtgaggggagtctgattggtttaggtaaaaaatacagcatattaagggtcacaagaaggattttacaaagtcatttatcctgtcctggtttcatcctatgggtccatgtcttcctttctgttacatatcttcagtgcaagtggtgcttggtaaagggtttaaaagaggaaggggggaatatatagatactgggaaagagagagagagaaagactggctgactctttttccctaaagatcaagcgtttaaatctcctaaagaacttttcaactagacagtataagatatgtacaattcctcttatccagaatagagaaatatgaagtaacaatgyttcaaatgttttgagagctgttatttcttgaagtgatg

SEQ ID NO: 74887 - DNA, 666 bp, Homo sapiens
actatcatctttatcactcagaaaattccaaggattttaagagttctgtgccagaaacctggtacaaagaccaaatatcttcttatatcactgcaggccagcagactggaaactcccatagaatttttatcatgcagtcttgaggcagaattctttcatctttgggaaatttcaatctttgctctaaaggctttcaactgatcggatgtggccaacccatackatgtagggtaatttacttaaagtcaactatctataaataaatgttaatcacatctaaataataactttatagcaacatttagattggtgtttgatcaaacaagtggataccatagcctggccaagttgtcacacaaaagtaaccatcacagatgtattattttatttaaaatcatcagtattatatgaattaattcagaaataaaaaaggtgttgtcatagtgtgaacacttataagtgtctttcccacagaaatgtcaacagactgtgatttgaaaattgctgttttaaaagagaaaagctcatcattctacagaaatgattcaaagatagacaatccattaaatatcttataatgggccaaatactactagttgttaatttacacttgcaacatcaaacactttaccagctttttaacatgcaactgttgcatatgatgca

SEQ ID NO: 74888 - DNA, 666 bp, Homo sapiens
actatcatctttatcactcagaaaattccaaggattttaagagttctgtgccagaaacctggtacaaagaccaaatatcttcttatatcactgcaggccagcagactggaaactcccatagaatttttatcatgcagtcttgaggcagaattctttcatctttgggaaatttcaatctttgctctaaaggctttcaactgatcggatgtggccaacccatactatgtagggtaatttacttaaagtcaactatctataaataaatgttaatcacatctaaataataactttatagcaacatttagwttggtgtttgatcaaacaagtggataccatagcctggccaagttgtcacacaaaagtaaccatcacagatgtattattttatttaaaatcatcagtattatatgaattaattcagaaataaaaaaggtgttgtcatagtgtgaacacttataagtgtctttcccacagaaatgtcaacagactgtgatttgaaaattgctgttttaaaagagaaaagctcatcattctacagaaatgattcaaagatagacaatccattaaatatcttataatgggccaaatactactagttgttaatttacacttgcaacatcaaacactttaccagctttttaacatgcaactgttgcatatgatgca

SEQ ID NO: 74889 - DNA, 666 bp, Homo sapiens
actatcatctttatcactcagaaaattccaaggattttaagagttctgtgccagaaacctggtacaaagaccaaatatcttcttatatcactgcaggccagcagactggaaactcccatagaatttttatcatgcagtcttgaggcagaattctttcatctttgggaaatttcaatctttgctctaaaggctttcaactgatcggatgtggccaacccatactatgtagggtaatttacttaaagtcaactatctataaataaatgttaatcacatctaaataataactttatagcaacatttagattggtgtttgatcaaacaagtggataccatagcctggccaagttgtcacacaaaagtaaccatcacagatgtattattttatttaaaatcatcagtattatatgaattaattcagaaataaaaaaggtgttgtcatagtgtgaacacttataagtgtctttcccacagaaatgtcaacagactgtgatttgaaaattgctgttttaaaagagaaaagctcatcattctacrgaaatgattcaaagatagacaatccattaaatatcttataatgggccaaatactactagttgttaatttacacttgcaacatcaaacactttaccagctttttaacatgcaactgttgcatatgatgca

SEQ ID NO: 74890 - DNA, 1338 bp, Homo sapiens
tgggggttagggctgcaacacccgaattggtggagacaaaatccagctcctgacaataccgcgtatgatagctgcgtctctgcctgcagtactgttttccagggaaagcatctttgagtgtattcagaaagcctctctctggggccaggccttgcagagaatccttcagaaactggacaaccccacccaaggcagtcagtggggaggacacatttggtgcctcattggtccctggatctgcctcacagtcctcaatgttcctcctcgttccctctactctttctcctctttggttgaccttgaagctcattcctggtgaaggccccgtgggagcagtgcaatgacaagaggagcctgttttcaatagcaccctcacgctctccaggggtccattggaggcgcctatgacctcctgatgctgaggagcctagagtgggcagccctcgggcccaggctccacctgggtgaggcctgttttattatcaatactcaccacagtcatttgtgggagtgtaatgctcatattcccatttaagagatgaataaactgaggcaaggtgaagtgactcagctgaggccacaccacagtttaatggggaagccaggataagagctggcggcttctgtgtctgatctacactctgatgggaggtcgtcagagagccatgtaaacggtgaggaggtgacatgctggtcccttccataaaagctgttttgcaaaattaaaacacacacacagtaaagatccagatttatgcaagtgagagtgaggggctgactatttaccagtcaacagatctccccaaatggttctctgcttggggttgagatgctcctgaccagcagggcttggggagagacattcttgckccccctagagctggctgacccatacccaggggattctgagcaccaggggctgggagcagcatgtaccacgtgtttcccaagagttagtcatgtttgctcctaaaacttattgtaatcgaggaatctaattaaacaatacaccaactgaagaaacagtgcaaaaagaatgagtgactgtttctatgaaaacttagatgaactactttggaaagattcaataaaaagcatgcctaaatatatatactggggccaggagcagtgattcacacttgtaaccccagtgctttgggaggctgaggtgggagggtggcttgaggctaggagtttgaaaccagcctaggcaacatagcaagaccctgtctctacaaaaaaacaaaaatttttcaactggttgtggcagcacctgcctatggtcccagctgctctggaagctgaggtgagaggatcactcgagcccaggagttcagg

SEQ ID NO: 74891 - DNA, 1701 bp, Homo sapiens
ctgctctggggtgcctgtcccattctgtgccctgtgcatgtgcctcctcctaagaagatgaattctttggggtttataaagaacctctctcttctgtcttaattcagtgagagacacgccccttctgctgtcctgcagccataaattgaaggcccctgcaggcccctgaggcctaccctaaattttgctgtggtcttaaaaaataaaggtgttctacatttwaaaaaaaagaattcctgagacacaaggaccagtcagtatttataggctacaaaacaaataaaccgggttaacttcattttcccattgaacctgtgtgaggggcatagaggggtcagggttcaatcaggcttcccacagcagggcagctcccaggaagagaggttgaacctgaaagagcgcacagacaggcggggaccgcgctcttgcccaggcctacagctggtgggcaccagaccctggcctggaccctgggctcggacccctggttcgatgccgtgtgatgttgcactggctgccccgcagctgatgcagcggggaaggaacgggactgaggagcagtggcatttggaagtcagagtttccacaagcaccagttaagtgcatggatttctctcccagggatttccttcttcccagaccttggggccttcatctccagcctctcagaaggaataaattctcagaaatacaggatccacacacatagcctgccagaagcctgtgccactgcgtaagtgtgagtgactacggaagacaaggtggactccaaacccgacgctatgatccactcgagcctcgtccagggaatttatggagcacgtgggacctccctgccatccagaagcacagaggaggtgcgtccccacaacaatgccaggaacacacagcggggaattctctgacatcgagaggcttccagtgaggggcactggctgccctggaggtgacagagactccacatcagctacctgctgagatggtgctgggagcctcgtggagcagagcagccgatccgatccagggtacctgctacaggcctggcaccacctggtaggtcattgcgggaggacttgttcaggctctgatgaccctgtcagacagagagacagagagtccgagagaaacagagacacagagaaacagagaagcagagacagagacagaccaacggagggagagaaaaatacagagagagacagagatagagagaagcagagacagaccgagagaaaaaaatacagagagacagggacagagacagaatcagagtgagacagagagaacaagggaaagacccggagagagaaatgcagagaaagaaagagacagagacagagagagatacaaagagacagagacagaaatagagagacacgcgtgtctcccaggccgccgtcccgcccagttctaggcctggctgcagtcctgcccccggtgcccagagagcccttctcccatcacgggccatctccactgagccatgtgctaagcatcagctcctgggagccacggtgtcccctcacacctgcagtgaggactgagaaagctgcagatgggaggcgaggcagcgacacagccggctggcactaggcatggggtgacaaggtgcatggcgcggccaggacagccttgtgcaggggacagcggaagctcaggagacaaggtcagaggtggtggggccccgccacggagggcacc

SEQ ID NO: 74892 - DNA, 894 bp, Homo sapiens
gtgtttctggaatatggcttaagagttggagaagaaaaatagctataaatgacttgaatcaaatatctgaaatggactggtggtgatggtgaggggcagcaatgtgtaatttagggaagtgctgaccacaacataaaattgggaggaatctaaggcattggccaaatttataaatactacaatagaaatgcagatgctaagctgttggctaatcttactagttaagtgactaacttctgatgccatctggcagagtgattcaaatttgtgctagacacaaaatatatgtctttttccctctatttgcctgcatgcattaataaaaacactgttgcagtagacacataccaattttacaaggaaatgtttaggggtgaggtgggactgttaaatacttacatcaggtcaaaggtcactctgctgtttccagaggactgtcaggtagccaggaggcccagggccacttttgggcctgcttacaaaaccctaaattttccgcagttgaatgccaagagtcttttgcagttattttagagcaggggaaaaaatacaatgtgttgccaaataagcttaatttggtaggcaagcagtaaaaataacccaacagccaacatttagagaatgcgtactctcttaaatgctttatgtatattatttaatccttaaaacactgtgggatcartactttaattatccctattttcagatgagaaaacagtttgaaaggttaactaaatttacccaaagtcatgcaactgctaagtagtgagcaagccgcctgtcccagagtatagaatgaatacctatgatggaaagctacagagagacagacttttatttgatttaaggaagcgccttctaaccaagattttgggagctgaaatgggcaccttg

SEQ ID NO: 74893 - DNA, 715 bp, Homo sapiens
aaagaatttccttcttgttaaaggctgaatggtattatattatgtgtatataccacattttctttatctactcatttgtcaatggacttttggatagtttccacatcttggctactgtgaatggtgctgcagtgaacacaggagtgctaatatctctttgaaatmctaatttcaattcttttggataaatacccagaagtgagatcactggatcctatggtagttctattttttattttttgagaatcctccatactgttttctatagtggctgcaccactttgcattcccatcaacattgcacaacggttccaatttctccacatcctcaacagcacttattatattttgtgggttttttaaaataatagtcatcctgacaagtgtgactaatatctcattataattataatttgcattttcctgatgattagtgacactgatatttagcttagttttgttcatgacagttaggtgatttttttactttttttctcacagtgaactacatagaaattcaggtcaacattagaaacaaattaatatatgaatataagtctcagtcaccccatccctcaatgtccacatgtaatcaaacactattagtaataataactatcatttattgattactatagttacctggctaagcacttgacattaattatctcatttaactctaaccacaactccatgagggatttctattacacat

SEQ ID NO: 74894 - DNA, 617 bp, Homo sapiens
ttcagcctgaccccaaaatgcagaacatgtggaacagagccaaagctggtcttcagccaacatgtacatgagagagaaataaaggctggttattaccggccactgtgatttcagtggttatatatattcacagtatgacttagcaaaagcttactaatgcagtaaccataaatgcaaagataacaaatgactgaaatgagttataatattgaagaaaagaatttgctaactgctacaaataaaaacaggcaatataaactcatgaacaaagaaaatgtaataatgcaattttattagtaagaattatttgattatatttcatttattggcacattggttctttggatttcaagtgaaggactatttcaaatggaaatgaatatatatatatatatcaagacagggaagacgtccagggaagtgtgggagaaaagagagaaytgggaagaatataatcaatcccctgcagagtgcaataaacattagggtagttataggaggtgcaggttagggcacaaaggttgaatgctgaactgaagcatctgtggaggtccaatgcaaacccaaggaatgaacatctaactgatgtcacataacatgttttacacaggggtttt

SEQ ID NO: 74895 - DNA, 617 bp, Homo sapiens
ttcagcctgaccccaaaatgcagaacatgtggaacagagccaaagctggtcttcagccaacatgtacatgagagagaaataaaggctggttattaccggccactgtgatttcagtggttatatatattcacagtatgacttagcaaaagcttactaatgcagtaaccataaatgcaaagataacaaatgactgaaatgagttataatattgaagaaaagaatttgctaactgctacaaataaaaacaggcaatataaactcatgaacaaagaaaatgtaataatgcaattttattagtaagaattatttgattatatttcatttattggcacattggttctttggatttcaagtgaaggactatttcaaatggaaatgaatatatatatatatatcaagacagggaagacgtccagggaagtgtgggagaaaagagagaactgggaagaatataatcaatcccctgcagagtgcaataaacattagggtagttatasgaggtgcaggttagggcacaaaggttgaatgctgaactgaagcatctgtggaggtccaatgcaaacccaaggaatgaacatctaactgatgtcacataacatgttttacacaggggtttt

SEQ ID NO: 74896 - DNA, 857 bp, Homo sapiens
tacattccagtcttgacctgtcttttaattttcaacagcacttcaagatgctggtcaaagacaatcatttttcaaacattttttatcttcttttccaggttatcacctcctgactrtgattttgttaatgactcactgttttactccaatatccatctccactgaaaaatacctaagtcatcttttaaaaaaatcaaaaataaatgacttttctttatttgtcctttatattacgggtagagttatgttgattttttattttattgtatttattttattttattagagacagggtctcattctgttgcccaggctggagtgcaatgatgcgatcacagctcactgcagcctcaaactcctgggctcaagtgatcttcccgcctcaacctgctcagtagctgggactacaggtgcaagacactgtatttggctaatgtttttattttttgcagagatggagtttcactatgttgtctaggctggtttcaaactcctaggctcaaggaatcctcctgcctcagccttccagagtgctgggattacaggagtgagccacagcacccgtccctaagtcacctttgactctagctctttctctttcaactttatagcttgcaaaatgtgtgaactgtacaatgtttcatttcaccctcactgcagcgctgttgtctgaaccatggtgtccccgtgataactgtgcagatgaagaactagagagactcatggtcttacctcagctttgatggtcaatgcactctaaatgccattgcatagggaataactccataagtgacagttggggtgctcctcgagccagcctcaacatatgtgctatccgtagcattttactgccactt

SEQ ID NO: 74897 - DNA, 857 bp, Homo sapiens
tacattccagtcttgacctgtcttttaattttcaacagcacttcaagatgctggtcaaagacaatcatttttcaaacattttttatcttcttttccaggttatcacctcctgactatgattttgttaatgactcactgttttactccaatatccatctccaytgaaaaatacctaagtcatcttttaaaaaaatcaaaaataaatgacttttctttatttgtcctttatattacgggtagagttatgttgattttttattttattgtatttattttattttattagagacagggtctcattctgttgcccaggctggagtgcaatgatgcgatcacagctcactgcagcctcaaactcctgggctcaagtgatcttcccgcctcaacctgctcagtagctgggactacaggtgcaagacactgtatttggctaatgtttttattttttgcagagatggagtttcactatgttgtctaggctggtttcaaactcctaggctcaaggaatcctcctgcctcagccttccagagtgctgggattacaggagtgagccacagcacccgtccctaagtcacctttgactctagctctttctctttcaactttatagcttgcaaaatgtgtgaactgtacaatgtttcatttcaccctcactgcagcgctgttgtctgaaccatggtgtccccgtgataactgtgcagatgaagaactagagagactcatggtcttacctcagctttgatggtcaatgcactctaaatgccattgcatagggaataactccataagtgacagttggggtgctcctcgagccagcctcaacatatgtgctatccgtagcattttactgccactt

SEQ ID NO: 74898 - DNA, 857 bp, Homo sapiens
tacattccagtcttgacctgtcttttaattttcaacagcacttcaagatgctggtcaaagacaatcatttttcaaacattttttatcttcttttccaggttatcacctcctgactatgattttgttaatgactcactgttttactccaatatccatctccactgaaaaatacctaagtcatcttttaaaaaaatcaaaaataaatgacttttctttatttgtcctttatattacgggtagagttatgttgattttttattttattgtatttattttattttattagagacagggtctcattctgttgcccaggctggwgtgcaatgatgcgatcacagctcactgcagcctcaaactcctgggctcaagtgatcttcccgcctcaacctgctcagtagctgggactacaggtgcaagacactgtatttggctaatgtttttattttttgcagagatggagtttcactatgttgtctaggctggtttcaaactcctaggctcaaggaatcctcctgcctcagccttccagagtgctgggattacaggagtgagccacagcacccgtccctaagtcacctttgactctagctctttctctttcaactttatagcttgcaaaatgtgtgaactgtacaatgtttcatttcaccctcactgcagcgctgttgtctgaaccatggtgtccccgtgataactgtgcagatgaagaactagagagactcatggtcttacctcagctttgatggtcaatgcactctaaatgccattgcatagggaataactccataagtgacagttggggtgctcctcgagccagcctcaacatatgtgctatccgtagcattttactgccactt

SEQ ID NO: 74899 - DNA, 857 bp, Homo sapiens
tacattccagtcttgacctgtcttttaattttcaacagcacttcaagatgctggtcaaagacaatcatttttcaaacattttttatcttcttttccaggttatcacctcctgactatgattttgttaatgactcactgttttactccaatatccatctccactgaaaaatacctaagtcatcttttaaaaaaatcaaaaataaatgacttttctttatttgtcctttatattacgggtagagttatgttgattttttattttattgtatttattttattttattagagacagggtctcattctgttgcccaggctggagtgcaatgatgcgatcacagctcactgcagcctcaaactcctgggctcaagtgatcttcccgcctcaacctgctcagtagctgggactacaggtgcaagacactgtatttggctaatgtttttattttttgcagagatggagtttcactatgttgtctaggctggtttcaaactcctaggctcaaggaatcctcctgcctcagccttccagagtgctgggattacaggagtgagccacagcacccgtccctaagtcacctttgactctagctctttctctttcaactttatagcttgcaaaatgtgtgaaytgtacaatgtttcatttcaccctcactgcagcgctgttgtctgaaccatggtgtccccgtgataactgtgcagatgaagaactagagagactcatggtcttacctcagctttgatggtcaatgcactctaaatgccattgcatagggaataactccataagtgacagttggggtgctcctcgagccagcctcaacatatgtgctatccgtagcattttactgccactt

SEQ ID NO: 74900 - DNA, 857 bp, Homo sapiens
tacattccagtcttgacctgtcttttaattttcaacagcacttcaagatgctggtcaaagacaatcatttttcaaacattttttatcttcttttccaggttatcacctcctgactatgattttgttaatgactcactgttttactccaatatccatctccactgaaaaatacctaagtcatcttttaaaaaaatcaaaaataaatgacttttctttatttgtcctttatattacgggtagagttatgttgattttttattttattgtatttattttattttattagagacagggtctcattctgttgcccaggctggagtgcaatgatgcgatcacagctcactgcagcctcaaactcctgggctcaagtgatcttcccgcctcaacctgctcagtagctgggactacaggtgcaagacactgtatttggctaatgtttttattttttgcagagatggagtttcactatgttgtctaggctggtttcaaactcctaggctcaaggaatcctcctgcctcagccttccagagtgctgggattacaggagtgagccacagcacccgtccctaagtcacctttgactctagctctttctctttcaactttatagcttgcaaaatgtgtgaactgtacaatgtttcatttcaccctcactgcagcgctgttgtctgaaccatgrtgtccccgtgataactgtgcagatgaagaactagagagactcatggtcttacctcagctttgatggtcaatgcactctaaatgccattgcatagggaataactccataagtgacagttggggtgctcctcgagccagcctcaacatatgtgctatccgtagcattttactgccactt

SEQ ID NO: 74901 - DNA, 857 bp, Homo sapiens
tacattccagtcttgacctgtcttttaattttcaacagcacttcaagatgctggtcaaagacaatcatttttcaaacattttttatcttcttttccaggttatcacctcctgactatgattttgttaatgactcactgttttactccaatatccatctccactgaaaaatacctaagtcatcttttaaaaaaatcaaaaataaatgacttttctttatttgtcctttatattacgggtagagttatgttgattttttattttattgtatttattttattttattagagacagggtctcattctgttgcccaggctggagtgcaatgatgcgatcacagctcactgcagcctcaaactcctgggctcaagtgatcttcccgcctcaacctgctcagtagctgggactacaggtgcaagacactgtatttggctaatgtttttattttttgcagagatggagtttcactatgttgtctaggctggtttcaaactcctaggctcaaggaatcctcctgcctcagccttccagagtgctgggattacaggagtgagccacagcacccgtccctaagtcacctttgactctagctctttctctttcaactttatagcttgcaaaatgtgtgaactgtacaatgtttcatttcaccctcactgcagcgctgttgtctgaaccatggtgtccccgtgataactgtgcagatgaagaactagagagactcatggtctyacctcagctttgatggtcaatgcactctaaatgccattgcatagggaataactccataagtgacagttggggtgctcctcgagccagcctcaacatatgtgctatccgtagcattttactgccactt

SEQ ID NO: 74902 - DNA, 1752 bp, Homo sapiens
aaaaaaggggctcattaataaacatttattgagcaccaacagggtattatgttccagatatattcccttccctgtaggtttggaatccacaattttggctcccagcagtcacctctgccctgattttgagaagagtaaggtatctaagcaattgaaaggacattcaaatatttgtgaacttcaaagggggatagtccttcatctaaaatgtccttttagatggtcaaaacttctaaatattctacttgtctagcaaagcacagtgaactgtgagtttctgggatgcagataaaccatgattaggttaaaaatattaacactcatagataataattaggttctcaagttaaaaacatctgttctgttaggtgtgaggaccagagagaaaaaaagaaccacataaaaattgaagaaccttgtcaaggtcattggcatctaatttttaaagttatctgagctaggtagccattgtgctaaaaattccgtcaggaggcaaagttgaagaagacactatgtttttagaatgtgtgaagctttttactgaagcatgatacataattgaaaatgcctttagcaaattcctgctttaatgggaaaatactttgtcatgcagtttttcaattagtattcactaattcaaattggtttatcatttacccaactgcacattagatttttagtgatgcattttctcattttatttgtggattttccagttgatagtaaaactctggtggcttcagtaatgtttccatgggtgattctcagcatttttctgtctaatatagtagcccacttgaacttgactctggtgaaaagctatggggttgtagctgtttgaattagaatctgggatgggaggaagggagaaatttgaatttgaaataaagaaggtgatgattctttcatgtgccattgtctcttcccctcagattcaagagaattcacacctcagttatgaaaggcatcttccatcacaaatttaacattcttgcttgaaaacatcacaaatttaacattcttgcttgaaaatttcagctgggcaccgtggctcatgcctgtaatcccagcactttgagagtgctgaggtgggcggatcacctgaggtcaggagtttgagaccagtctgaccaacatggagaaaccctgtctctactaaaaatacaaaattagccgggcatggtggtgcatgcctgtaatcccagctactcagaaggctgaggcaggagagttgcttgaaccagggaggaggaggttgcggtgagctgagatagcgccattgcactctagcctgggcaacaaaagcgaaactccgtctcaaaaaaggaaagaaaatttctatagaagggccaatagtccaaaatgtggttcctaaaacatcagtcagtcaatcacttaagtatttactaagtactgaaggtaaacttataattatgttagatcatgggttgtggtcagtggaaacataaaataggtttacctattttttatgtttttttctatgttttttttcaatttggatgaggaaaaacttaatcaaaaataagttccttgaacaccrtaagggtcagaaaatttcaacattcattcattcgtttagtcattcattcatcgaatacttaaagaatatctctcctcaagtgggttactaatatcagattttctatgtttacatttattctcctcactggaaggtgagcttcatgacagtagaaaatgttaggccactgccatatcctcagagattagaat

SEQ ID NO: 74903 - DNA, 529 bp, Homo sapiens
tctcaacacttctggagcgttaaaaacttgttctagaatctgggaatcagtagtgagcaaaagttgtggaatgaatggkcaaaattccttgtcctcatagagcttatattttggtagaatgagataaactataaataataggaaggagagaaggagggaaggaaggaaagaaggaagataaaagtgcaaaagggagggaaagagagagggacgaaggaactaaaaataagtgtaaaaataatcacgtcttcatgggtaagtgttatgggaaaaataaaactggataaagggaatagggaatgctggagatctggttgctattttgtgcagaatattccagaaggtactaaaggaagtgagaaaacaggcaggtggatctctgggacaagaaaatccctgcagagggaacaggagctctgagaggtctggtgattggttgctcaaggacaccaggataatgaagagtctaagcagatggagcagtactaggagatgagatcataatgttacccgagcggcagatcgtgtt

SEQ ID NO: 74904 - DNA, 529 bp, Homo sapiens
tctcaacacttctggagcgttaaaaacttgttctagaatctgggaatcagtagtgagcaaaagttgtggaatgaatgggcaaaattccttgtcctcatagagcttatattttggtagaatgagataaactataaataataggaaggagagaaggagggaaggaaggaaagaaggaagataaaagtgcaaaagggagggaaagagagagggacgaaggaactaaaaataagtgtaaaaataatcacgtcttcatgggtaagtgttaygggaaaaataaaactggataaagggaatagggaatgctggagatctggttgctattttgtgcagaatattccagaaggtactaaaggaagtgagaaaacaggcaggtggatctctgggacaagaaaatccctgcagagggaacaggagctctgagaggtctggtgattggttgctcaaggacaccaggataatgaagagtctaagcagatggagcagtactaggagatgagatcataatgttacccgagcggcagatcgtgtt

SEQ ID NO: 74905 - DNA, 1223 bp, Homo sapiens
gcatcagaaagaccatatacttttattatctatggagtaagtcaggctaggggctgaggaacaattgaaaagagtatcttgggtacataatgaagttttagagtttctcacctcacccgctacggcttcctgtttgcccaagtcacatttccaccctgtcataaatacaccstggctggagctgcaaactctatcaataacaacaaaaagccatgacatgagcctttcctgtatttgcaacactctttggattgccatggcaacaatagttttaattatggagaggcaaaatgataacttttatatcagatgtggctcacttttccctgtggacaaaactctgatttgagagaggctttgcatgtggattttccttctaggctggattttattatctgctctaacagacagctcttttgcttatggaatgaaccagaagaagccaaagccctggctgaaggggctgctggacactggcccttgtggaggcgaattggaccctttggtctcggaggcagcctgatgtgcttgtcacatgtgcatttaagaaccaagtgagccattgctctcgagggctgcttttggcctcccctttcaaccagtggaaatctgcatgttaggatagagacttgcgtgaagtatcatctggtaatcatccttgacaatgttcaggattatgctggagggacaaacaagtaattccattgcagtagcagtcatggaaatatacaaatcatagcagctttccaatcagagctgtggagggggaaatgtgggagagaaaacctcttcctctgtctgctccccctgcccttcatttctggatccacttgctcactcctcgaatttctcttcaggtttggaaaggtatcacaccatctctaaataattctgggctccctcattttgaaagctcttgcaaagctaaataatcttcttcgtaggtaaacataaatcattgtctaccttctttgctccttgagtagaccttttgatacattcattaattatggccactgcctggtggtgcagtaatggctgagtcactgccgtgagcatctttcctggaacgctcccatttctgacactgaacccgaaaatccaattcagtgttaaagaggcccttcattgtgacactggacagccaggtggtcaggcaagtaaaagaaatatgcctgaaaaatgcagcagtgtggttgtaggagtgagggttggagaaagcg

SEQ ID NO: 74906 - DNA, 624 bp, Homo sapiens
tactgctaaactccatctctggacctctaaggcttcacatacggggtgtttctgtgtgccagtcacaggctacagagcacagagacaaagagccttcccttaaggagcttgcaaatgctagagaccagtggcacaaaaggatttttagagcaacagaagctttgatagatcgtgtggtgtaaaggttagaagcacaaactctatggcccgaccaccaagatttgggtccagcacttggcaaatctgtgacctagacaagttattaacctctctgagccacatttgctcctctaaagtagggacagtgatgatgcatgcgtggtaaggttaagagcagatgagttcatgtatatataaagggcttggcctggcatgctgctcatgcctgtgcygttgccttcctcccaacgagcaatgcctgctgtagttcagaggatggccactctgaaactgagagaagaaaccatcttagatcttgaagaatctatatgaatttttcaaacagaaggatgagggctgtttcaagcttgggattagaagtggcctattcaggggactttcagaatttgtagagaattctgagttacacagggaagcagagattgtatttaatgcagttatact

SEQ ID NO: 74907 - DNA, 753 bp, Homo sapiens
ctgaattataaccataaggtaaagcttccttgaaaaaggaacaaagccccattaagcccttcgtcgtgatggttgtggttgcggctgctgctgctgttgttgttctgtttatttgtttgtttttaatgaacatactgatatataagtgctctgggggaattcatgatgctgagattcatgaaaagcaaagtaagatttatgagttgcgattgaatctgcccctaccagcctggagacacttcccgtctggtactgaggcattgctggcatgtttagtgcttttgtttcagttttcaatctctgaacacatgaagaaatattaaaagttctgagggcaaggatgggagaaggagtccacaaatcccaaagatatacaacagcacccaaggaaaatagtatggcatagtagattaaaaattcagaaacaacaacaaaaaaagcgtgtcaattagctagtgtttgctaagtacttgtcattttcacttacgcttctctctggttcctcatgtgttactgacccacaacttcgcaaggctattgaactaaagattcacaaggtggtctggcataaagaccaattttaaatcaatatgccatgtaactatcctcccccaaaagwtcgtaacactatacaatgagaaagtcaagaaaatataataaattgttattcaattttttaatgaattgcgcccttttaaacataccagtggtgtggggggtggggggcagttagattccaactctcacttggat

SEQ ID NO: 74908 - DNA, 649 bp, Homo sapiens
cttgggtttgaatgctgcgtctgctgtttacaggctgtgtgactttgggaagttttctgaacccctctgagccgcttttgtggtttgtaatgcagatctcttggaggggtatgatggtgtgtgctaactggccaaaatgatgcctgcagcataattagggctccgtaagtcatcytatatttcattgaatctggcatgccactcatttgaagaggcacctttactttagctcctctaagaaaggaaaacagctgccaaataaactgacctgccatcagttgtaagatgcacccagatttcagagataacaaaatgtaatataaaaaaatgtgtatcttacaatcgatgaaatgcagtagttctttttcttctgattggtggtttgtgtgcttctggggcttctgtctctggaagatagcagggtacaatgactgatgaggcggccccactccggaagtcgcctctgcccaggcactgctgcctgctccttttgcctgtgctgctgcccctgggtggcttgttcttgagggtctcagctttgcctgtggtttctggcttctgtcaaggtccgtttgagtctacaaggctgctcagcctttctgaggccagggaagccattttcttttctttttttttttcttcttttttt

SEQ ID NO: 74909 - DNA, 1006 bp, Homo sapiens
gcttccagccacagttgtgtgtggggtgtgtgtgtgtgtgtgtgtgtgtgtgtgtgtgtgtgtgcaggcatactcaggcaagtacattagaagaagcctagcagctgcctgatagagaaatatgagtagcaaagggataaatcatgccacatgtcaaagcaacaactaatttccaacccaaactctctggactgttttgtttacctagtgcctgcatatattcccagcacacttcctgcccgttagcactcatctttaacaccacacttagagaggggcctctttcaggaaactgaagccatcattcattattgattttatagaaggattataaataaactcaacatatggtgccatgaactcagtaaacttaatgtcgttagaaattcattttggttaacttctagtccagccccattcaatagaaatayagtgcaagccacctatgcaatggtttattttctagtatacattttaaaaagtaaaaagaaacaggtgaaattaactttaatacaatatgttatgtaacctactatctcaaaaatattatttcaatataagaaagtattaataagatatcttgcattatttttgtactgttttaaatccattgtgtgttttaccctcacaacacatttcagttaagactagccacatttcaagtgctcagtagccacgtgtggctagcagctacaattttggatagcaccagtcaagacttagttaagaataacccatgtgtgaactataatatgaaaattcattttccaggtaaaagaagaaattgtagatttgaaaatctgattcctgctgactacagtaaaatttgtattagtaacaagtgttccaaatccctcaaatatcagaatgcactgaatgcaaatgaaagtattccatgatctatatatagtgaacaaacctcaaaagcttttaaaaacaaaaaacaaaaaaactttttctgtgttgaagcaaaaagtctctaactgtggccagggaacaatttaac

SEQ ID NO: 74910 - DNA, 370 bp, Homo sapiens
accctgctaaacatggaaagttctccaaatgtacacttaagtgaaaaaagtaacttacagaatactatatacagcatgataatttgtgcatatatatatatgattctacatgagcgttcaaacgtaaatgtgtagaaaattaaatatctcaaaggatacacaccaaaccgatagatacagtgtttctgggtttttkttttttttttttgccaaagagagaagtgaaatgacctcacaggaggaaaggttaaaaaggagatatcttctttatataatttataccccttgactttttataagaatgtataaggtattacatgtacaaataaaaagtatacgttgacattttttaggaagtgcaaaggaatat

SEQ ID NO: 74911 - DNA, 601 bp, Homo sapiens
aaatggagtctcctatgtctacttctttctacacagacacggtaacaatctgatctctcttgcttttccccacaaagaacataggtttgtttgttatgatgaagggtcagatggatggtaaacctggcctgtatcaccttcacaaccatacgcaaagacacagatggatcagtactgtcctctaagaggaaactcggccatcattgttccctttttggtattctattcttttagtaattctgagaaggaagaaaaacaaataaataaacaaacaaacaaaaggcatggtactgattcagaaatttctttcctcatctcagtcttctctccagtcagattatttcttccatacagttgagtaagaaaccttgaaccccgtagtcagcagacaatttctgttccaggcatgctctctctgctgccttagaatagacaatattctttgtatacttcactagaaactttcaggatttattttaaaaatttaaaaacaaacattcaatgaatttatttcacrgtgttattcactgaacgtgtctttttccctaaaacccctggtgcttaggcaaaaacgatatcacaatttgggatgctgtgtgct

SEQ ID NO: 74912 - DNA, 1124 bp, Homo sapiens
aacctgcacaatgtgcacatgtaccctaaaacttaaagtataatattaaaaaaaagacattattatccccttcaccattttgtctcttttcatagctatggcacttacatttaactgaagacaagatttcatttttgttatgtttgttatttttttctgtctgaggaagaactaaataaacatgcaaaacactaagggaatgttaaggaagtggaggtcatctgtctctgatcccatctgagagtctggattttagtcttcacagagaaatgacaaaaacaggttaaaggaggcatgttgagtgtgagactgaaaaaaagcaatgccactcataaaatacaaatatgattgggaaagaaggtcaactatcacacacacctccaagtagaaacaaacagatatcctcaggaagttcacaagcaaagacttctatatccagacaagaaagaggaactaccacaggaccctacaggggagctttgttatatgggcctccatgtccatgctgtagcaagagacttcccctaagtggtctgctggtactgcccttcagtgtctatacagtaatatgaacaaggctgctcccgcctatatgtaaaatgttacctctattcatttcctacttccatgcaacaaattaccacaaataaagggcgttaagcagcatacttctatagtctcgcggtttctatgaatcgggagttggacatggtctacctgaattttctgtttcagggtctccccaggctgcaactcaggtgtcagctgatattgtgctctcatgagagtctagactgctaaagatccatttccaaactcctgcaggctgttgatggaattcattgagatttccgattttgttctggctgtcagccagaaggtgtccctaggtcctaatctgcttccagtgtcctaccttgtgtcccatacatagctatggctatggctgtttgcttcttcargtccagaaggggaatctttctaacccagtccctctttttttatttttattttactttaagttctgggatacatgtggtgaacgtgcaggtttgttacataggcatacatgtgccatggtggtttgctgcacctatcaacccgtcatgtctgttttaagctcc

SEQ ID NO: 74913 - DNA, 1277 bp, Homo sapiens
ctgcaaattcccaaataagtactacaccaagaatgtaagcagacattcaataaatatcaaattaaatcaagggtatcactatgaactcactaattgaaaactgttggactatatcctttctaactactgctcattataaaggctaccatctcagatgaactctaagctgttcaacaatttagtagactagagctctaggaattttatgccacgggcataactcacaaccactgttaaaggtagatacagaaaaaaaaattatccccctctttcccttccttcctccttccctcacttccaaatactaactcaaaaatctcccagaaaatctagttttgggcaggcccttttttcttctctcctctaaattttctccttcatggaaatggacaagaacttctttctcagtccttcccgggacaccgctgttctcttcaactcctcatcttccttcactgcactaagcctccttcttatgtgctgtgtcatccccctgaggaattaaatctatttgaaatatgttttctgtggaagaatcaacttgatttttcaaaaataagaaaagcactgccacggacttgtcatttacctgaattttgttagaaacagaacataggacctaaccaaggagcaagagtttttattgaaactggaggaatatgaaagaacatctgtgaacacttagttgttcgtaagttctgtaatttcttttctttgtttttttttttttttgagatggagtctcattctgtcatccagactggagtgcaatggcgtgatctcagctcactccaacctccatctcctgggttcaagcaattctcctgcctcagcctcctgagtagctgggattacaggcacacaccaccacgcctggctaatttgtgtgtgtgtgtttgtgtgtgtgtgttggygtgtgtgtgtttttagtagagacggagtttcaccatattggtcaggctgatctcaaactcctgacctcgtgatccacctgccttggcctcccaaagtgctaggattataggtgtgagccaccacacctggtcaagtttcgtaatttctatacaggtcttaatgttgctaatttagtaccaatatctattctctcctctatctcaatgatagacccttcacatttatccttactcaggaccagagtagagccctatattttcagtctttcttgtggacatgtaggtgtatggcaaaattctggtcaatggaatcaacagagatatcatgaagaaaattactgaaaacttccttaaaagaatgct

SEQ ID NO: 74914 - DNA, 529 bp, Homo sapiens
tctagtcctagctatctcccttcgtgttgtacaggatattaaaaaaaaacccaaaaacttgattcttcaggttttarcattttaacatcctgccttacgtttacatttttgtttttatctaaaaataaatctgatgactttgtttggtttatagagcaagaacaaggatatgatgaaaaagagtagtctatagagtgatgaattgaaggacttttccagacatctattgtttatctcaatcaacaattgctgattagggtatatgagttattagcattttatataatttttgtgtcatttggtggcatgtgtatatatttttatgatgaagatagtctctctcaaaagataaagcaaatattgagttagaaatgatgttaattatatttagatataagatttcttttcctagcttaagatgttgtcatttaattgaatcaattagaaatcttttttaaataggttgttcctttaaatttttaatcaaagttttaaattcttgcttcaagtattttttcttatgcagaaa

SEQ ID NO: 74915 - DNA, 643 bp, Homo sapiens
tctctgaaaaaataaaaataaaaatatcacaagggtcttttctgacctttcctcctccctccccaaatttcagagcatgattcttccagagcctgacttgccaatctrgtcccaaaccctgactctcaacccttccccttcttcctgacaacaggttgtttccaattctggaaagcctgtggaggaaacaggaacagagatagcaagaaccctccctgcaaaccaaggcggactgggcactggaaaaagtgacagtgatggtggaacctggtagggaggaggggggcctgaagacagaaaggcttattgtgcacagaggggaagaagagccattggccctgtcctgtgacactgactgactgactgtgcccagccatgggatgccaaggagagatgcttgccccctcaggacaactgagacccagaggccttgctaagtcccagaagacaaggacagagaaaagacaaataaaacatgcagaagcacaaggaaaggaatagcagtccatttcctccacccctcggctctagactacagggtcgttgaagagagatggctctggtggaagaggcaggaggatttcaaccagcttcatgcctcagctaacaattccagaagaagagtactacagggccatggcag

SEQ ID NO: 74916 - DNA, 1170 bp, Homo sapiens
gtgaatttctccctccttgttttctaaggatatcatgtcagtggtatttttatttgctagtgtattgtactaatgtttggtcagaaatcrtaagggactgctgtgaagcatctttcctgttgtccttaacatttatggagccttaacatttatggagagtgtatcttatgtacatctctgaccccatcatccattttttttccactctcctttatgaaaattcactaccgctattaaagccttgtctccttggtgaggtgtgtgtcttgtgactgtgctggtgaattttgccttcttttgacccctcccaatcaacggataccgacagtgaaattcctactcaggcgttgagatgttcatctgaattgaagtttgatgttcacccatcacttccctgaaggcactgacagcctcagactttcatctgccagctcacccttcctcctagcagacacaagcagattaacatatccccaagaggctgatgtctttagttgctgaagccactcgattcttattacctgacagtgttctgtagtgagacatttattttcaagtgctacctgctaggatatcttcatgagatacatgtgtcatttttgatggggggccccaaaggggacaacagctccaggcttctcaggtttgcctggagctgtcaagatttacccagtgtaaatcttggtggtggcccttctctcgctttagattccaagttcagacccagtttactctattaaaaagtaacgtaaactataggaagtgacatagcagtagttgggtacagtcattggggaactcaaacaatgtgaagtttgtggtcctgaatgatataatgtggctgtctacacagacttaaatctcaggataattgtccttcttcatttctttgtgacaagagtcctggcctcagcagcagagcgtgtcactctggcaacttctgccactttgttgtggtgattgtgagttgatgcttgacactgatgaggtctaatttcccagtggactttgggaagggtctgacagtggtgtggatcactgttcttgcatacaggagctatttatatcattttcctctgtgttcaaagaggatactatgggcagaagttgctatctgtttctttgtgtttgtgtatgtgtgtgtttgcgtgcatgtgcatgcctatgtgt

SEQ ID NO: 74917 - DNA, 1170 bp, Homo sapiens
gtgaatttctccctccttgttttctaaggatatcatgtcagtggtatttttatttgctagtgtattgtactaatgtttggtcagaaatcataagggactgctgtgaagcatctttcctgttgtccttaacatttatggagccttaacatttatggagagtgtatcttatgtacatctctgaccccatcatccattttttttccactctcctttatgaaaattcactaccgctattaaagccttgtctccttggtgaggtgtgtgtcttgtgactgtgctggtgaattttgccttcttttgacccctcccaatcaacggataccgacagtgaaattcctactcaggcgttgagatgttcatctgaattgaagtttgatgttcacccatcacttccctgaaggcactgacagcctcagactttcatctgccagctcacccttcctcctagcagacacaagcagattaacatatccccaagaggctgatgtctttagttgctgaagccactcgattcttattacctgacagtgttctgtagtgagacatttattttcaagtgctacctgctaggatatcttcatgagatacatgtgtcatttttgatggggggccccaaaggggacaacagctccaggcttctcaggtttgcctggagcwgtcaagatttacccagtgtaaatcttggtggtggcccttctctcgctttagattccaagttcagacccagtttactctattaaaaagtaacgtaaactataggaagtgacatagcagtagttgggtacagtcattggggaactcaaacaatgtgaagtttgtggtcctgaatgatataatgtggctgtctacacagacttaaatctcaggataattgtccttcttcatttctttgtgacaagagtcctggcctcagcagcagagcgtgtcactctggcaacttctgccactttgttgtggtgattgtgagttgatgcttgacactgatgaggtctaatttcccagtggactttgggaagggtctgacagtggtgtggatcactgttcttgcatacaggagctatttatatcattttcctctgtgttcaaagaggatactatgggcagaagttgctatctgtttctttgtgtttgtgtatgtgtgtgtttgcgtgcatgtgcatgcctatgtgt

SEQ ID NO: 74918 - DNA, 1170 bp, Homo sapiens
gtgaatttctccctccttgttttctaaggatatcatgtcagtggtatttttatttgctagtgtattgtactaatgtttggtcagaaatcataagggactgctgtgaagcatctttcctgttgtccttaacatttatggagccttaacatttatggagagtgtatcttatgtacatctctgaccccatcatccattttttttccactctcctttatgaaaattcactaccgctattaaagccttgtctccttggtgaggtgtgtgtcttgtgactgtgctggtgaattttgccttcttttgacccctcccaatcaacggataccgacagtgaaattcctactcaggcgttgagatgttcatctgaattgaagtttgatgttcacccatcacttccctgaaggcactgacagcctcagactttcatctgccagctcacccttcctcctagcagacacaagcagattaacatatccccaagaggctgatgtctttagttgctgaagccactcgattcttattacctgacagtgttctgtagtgagacatttattttcaagtgctacctgctaggatatcttcatgagatacatgtgtcatttttgatggggggccccaaaggggacaacagctccaggcttctcaggtttgcctggagctgtcaagatttacccagtgtaaatcttggtggtggcccttctctcrctttagattccaagttcagacccagtttactctattaaaaagtaacgtaaactataggaagtgacatagcagtagttgggtacagtcattggggaactcaaacaatgtgaagtttgtggtcctgaatgatataatgtggctgtctacacagacttaaatctcaggataattgtccttcttcatttctttgtgacaagagtcctggcctcagcagcagagcgtgtcactctggcaacttctgccactttgttgtggtgattgtgagttgatgcttgacactgatgaggtctaatttcccagtggactttgggaagggtctgacagtggtgtggatcactgttcttgcatacaggagctatttatatcattttcctctgtgttcaaagaggatactatgggcagaagttgctatctgtttctttgtgtttgtgtatgtgtgtgtttgcgtgcatgtgcatgcctatgtgt

SEQ ID NO: 74919 - DNA, 1170 bp, Homo sapiens
gtgaatttctccctccttgttttctaaggatatcatgtcagtggtatttttatttgctagtgtattgtactaatgtttggtcagaaatcataagggactgctgtgaagcatctttcctgttgtccttaacatttatggagccttaacatttatggagagtgtatcttatgtacatctctgaccccatcatccattttttttccactctcctttatgaaaattcactaccgctattaaagccttgtctccttggtgaggtgtgtgtcttgtgactgtgctggtgaattttgccttcttttgacccctcccaatcaacggataccgacagtgaaattcctactcaggcgttgagatgttcatctgaattgaagtttgatgttcacccatcacttccctgaaggcactgacagcctcagactttcatctgccagctcacccttcctcctagcagacacaagcagattaacatatccccaagaggctgatgtctttagttgctgaagccactcgattcttattacctgacagtgttctgtagtgagacatttattttcaagtgctacctgctaggatatcttcatgagatacatgtgtcatttttgatggggggccccaaaggggacaacagctccaggcttctcaggtttgcctggagctgtcaagatttacccagtgtaaatcttggtggtggcccttctctcgctttagattccaagttcagacccagtttactctattaaaaagtaacgtaaactataggaagtgacatagcagtagttgggtacagtcattggggaactcaaacaatgtgaagtttgtggtcctgaatgatataatgtggctgtctacacagacttaaatctcaggataattgtccttcttcatttctttgtgacaagagtcctggcctcagcagcagagcgtgtcactctggcawcttctgccactttgttgtggtgattgtgagttgatgcttgacactgatgaggtctaatttcccagtggactttgggaagggtctgacagtggtgtggatcactgttcttgcatacaggagctatttatatcattttcctctgtgttcaaagaggatactatgggcagaagttgctatctgtttctttgtgtttgtgtatgtgtgtgtttgcgtgcatgtgcatgcctatgtgt

SEQ ID NO: 74920 - DNA, 1711 bp, Homo sapiens
ttacttaaaatgtaccccctaacgagatagaagaggctgctctcctacataactgttacttatgcttcatcatttctgttttttctttttatatttgttcagttttattcatataatatcaagaaacacactatcagtccaaaaagactaggctatgaagagataattagcaacctaaattttaggggctaatgcaagcaagtaagcaaacaaacaaacaaaaatatctatttatctcatattttgtgtattcaatacaagtcagttgtgagcactggtctatttcttctgatttcagaatccaagctgcctgagaaggtaccatcttaaaagtcgacaatcagagtgtcaaaaggaaaaatattaccaccaattaaatgctccagcaccgcataaaatagattccttcaacttccaaattattggcaagatacacatgctactatgtgcttgatgggtgaaattagaaattcttggtgagtgagtagactgattctcacagttcattcttttggcccctaaatatttgacttactccctcattcccaagcaaaatactctcataccttgcctaaagcagaatatctgaaattctaatcattaggttttgggttgttaagaggtgtggctttgttttcaaatggaaaaaggtctgattgtgaaagagaaaataggaaaggagaaactgaatgagtcttcaattgcagcagcttggttttatggaayttgaaaatttcgctattgatttccttaaaattcttcatacccaggcactctagagatagtccttgtatagctataggatagacataacgattttgatggatgctggttggttctagccaacagagagggaaacaatgacatgttagtttagaaagttccgcatgacatcatttgtttttaataataaagaaatcaaattttagaataattaaatactttttggaaaaacttatgattagtaatctgtaaaactgacatacgaaaaagtaacattaacatatcattatatgcatgtgtgtgtgtgtgtgtgagagagagagatagatgagagagagggagagagacctgcagagactgagaaaatgatatagataggtagctgatagatagatagagagagagagagagagataggtgatagatgattgacagatagataaagtttggttgtgtaattcataactctaagtcttttttttagcaaaatgactttctttcacaactgcatcatggttccaaagggcacaactgaacataaaaaccatcagcaatgataagataatgcgttattttatgataagattctacaagtttatcatcatgatacaagccaaacttcttccccagatctttatttatatgattgggagagtggggaaaggtggaatgttaaagacgtctcttgaattatttgtgtttttttcagcaagtattatgggtaagcatgtacatagctttgctaattcctccattttcttcccgcattattgggaaaataccacatgcctacagaccaagctttagggcaatgacttaccgccatcatataaaacattcataattgtttccttgagagtttcaagaccctagttcccaaggtcgtctattatctgcactttgccctctgaccatttatctggtgcactgggattgtcacttcaaagaactgaccttgcattttcatgatgcgactgcatatgaaaaa

SEQ ID NO: 74921 - DNA, 689 bp, Homo sapiens
ttgcaaaacatagtgaataagaaaattaagccaatatcacaaacccttgtagcagagcacatctccccatgatttttttttaatcccayttataaacaagtattgtacctagggtggacgaattcctagtcttacttttgggaacgccctattctgtctacagaatagctgttcttttactactttactttcttaataaacttgtttttgcttttcactgtagactcttcctgaattatttcttgtgtgagatccaagaaccctctcttggggtctggatcaggacctctttccagtaacagaatgacccatggggcagttgagctaaagtataatggaaattagaaactccaaacaggcactctgtcaagttgttatagaaacaattttctgctgcacctaggtctgttgcttaactcctattcttgtgtccaatgaaagggctgttcccatgggagaattaaaacctaatttataattgctttcttattcctgaaaagatagatttcccagctctctttcaatcactatttcccaaacaaatttaattgtgaacaaatgcttagtgatctatctgtggaaaagacaccacttgcccaatattttgtttgtttccctgaatttcccaggctgtctcaccatcgggtagaggccatgtgactacttctggccaatgggcatgagggatg

SEQ ID NO: 74922 - DNA, 689 bp, Homo sapiens
ttgcaaaacatagtgaataagaaaattaagccaatatcacaaacccttgtagcagagcacatctccccatgatttttttttaatcccatttataaacaagtattgtacctagggtggacgaattcctagtcttacttttgggaacgccctattctgtctacagaatagctgttcttttactactttactttcttaataaacttgtttttgcttttcactgtrgactcttcctgaattatttcttgtgtgagatccaagaaccctctcttggggtctggatcaggacctctttccagtaacagaatgacccatggggcagttgagctaaagtataatggaaattagaaactccaaacaggcactctgtcaagttgttatagaaacaattttctgctgcacctaggtctgttgcttaactcctattcttgtgtccaatgaaagggctgttcccatgggagaattaaaacctaatttataattgctttcttattcctgaaaagatagatttcccagctctctttcaatcactatttcccaaacaaatttaattgtgaacaaatgcttagtgatctatctgtggaaaagacaccacttgcccaatattttgtttgtttccctgaatttcccaggctgtctcaccatcgggtagaggccatgtgactacttctggccaatgggcatgagggatg

SEQ ID NO: 74923 - DNA, 689 bp, Homo sapiens
ttgcaaaacatagtgaataagaaaattaagccaatatcacaaacccttgtagcagagcacatctccccatgatttttttttaatcccatttataaacaagtattgtacctagggtggacgaattcctagtcttacttttgggaacgccctattctgtctacagaatagctgttcttttactactttactttcttaataaacttgtttttgcttttcactgtagactcttcctgaattatttcttgtgtgagatccaagaaccctctcttggggtctggatcaggacctctttccagtaacagaatgacccatggggcagttgrgctaaagtataatggaaattagaaactccaaacaggcactctgtcaagttgttatagaaacaattttctgctgcacctaggtctgttgcttaactcctattcttgtgtccaatgaaagggctgttcccatgggagaattaaaacctaatttataattgctttcttattcctgaaaagatagatttcccagctctctttcaatcactatttcccaaacaaatttaattgtgaacaaatgcttagtgatctatctgtggaaaagacaccacttgcccaatattttgtttgtttccctgaatttcccaggctgtctcaccatcgggtagaggccatgtgactacttctggccaatgggcatgagggatg

SEQ ID NO: 74924 - DNA, 689 bp, Homo sapiens
ttgcaaaacatagtgaataagaaaattaagccaatatcacaaacccttgtagcagagcacatctccccatgatttttttttaatcccatttataaacaagtattgtacctagggtggacgaattcctagtcttacttttgggaacgccctattctgtctacagaatagctgttcttttactactttactttcttaataaacttgtttttgcttttcactgtagactcttcctgaattatttcttgtgtgagatccaagaaccctctcttggggtctggatcaggacctctttccagtaacagaatgacccatggggcagttgagctaaagtataatggaaattagaaactccaaacaggcactctgtcaagttgttatagaaacaattttctgctgcacctaggtctgttgcttaactcctattcttgtgtccaatgaaagggctgtycccatgggagaattaaaacctaatttataattgctttcttattcctgaaaagatagatttcccagctctctttcaatcactatttcccaaacaaatttaattgtgaacaaatgcttagtgatctatctgtggaaaagacaccacttgcccaatattttgtttgtttccctgaatttcccaggctgtctcaccatcgggtagaggccatgtgactacttctggccaatgggcatgagggatg

SEQ ID NO: 74925 - DNA, 689 bp, Homo sapiens
ttgcaaaacatagtgaataagaaaattaagccaatatcacaaacccttgtagcagagcacatctccccatgatttttttttaatcccatttataaacaagtattgtacctagggtggacgaattcctagtcttacttttgggaacgccctattctgtctacagaatagctgttcttttactactttactttcttaataaacttgtttttgcttttcactgtagactcttcctgaattatttcttgtgtgagatccaagaaccctctcttggggtctggatcaggacctctttccagtaacagaatgacccatggggcagttgagctaaagtataatggaaattagaaactccaaacaggcactctgtcaagttgttatagaaacaattttctgctgcacctaggtctgttgcttaactcctattcttgtgtccaatgaaagggctgttcccatgggagaattaaaacctaatttataattrctttcttattcctgaaaagatagatttcccagctctctttcaatcactatttcccaaacaaatttaattgtgaacaaatgcttagtgatctatctgtggaaaagacaccacttgcccaatattttgtttgtttccctgaatttcccaggctgtctcaccatcgggtagaggccatgtgactacttctggccaatgggcatgagggatg

SEQ ID NO: 74926 - DNA, 932 bp, Homo sapiens
catcagagaataaaattactttagataggcagagattgatttgtgttgaggccagataagaccattaagcaatttttagcctttctatgctgaatgttttccatttgcctgtcgagacgtattttctagccttttctactctgatctctgcccagaggggttgacccttttttactgtatcaaccaggcttctttggtttctcacttctatttgggtttggtgaatgagagargagcaaaattctgggtattacttagcttattctgtacatgaagaacatgagttgtcaatggctgtgttcttctatgaggtaatagctattgtagggttatgcctacctgctgggtacagctgcaactactgcaaaagctgttgctacagttctctgagtcctgctcatgcttcccttcccttgtctttactaggctacgcctctgagtgctttgccaaccctcattgctttctctacttatgcctttgtgaatagtccattaatttttcctcaatggctcctgtttccaaccctgactgatatatatactgtgttcctcctttggggcttaccatgtcactctggatcccacacttgcttttgcgttttacacaaatgagctgagctaaaagtaagagttgaaattgagcctctgcttctctttgccagctgtgtacctgtgtgcatagctgtctccatcttggaggggtgactttcagacccttgcaagaagcccccttccaggctagcaatggttctggtaacgcaattcagcaaatagaaatgttctgttttcagtgccttgtactaggcccagtaatatggactggataattttcctgagaaaagaagaaagaagctgctatatacctgaaccatggttaaaccacaatcaacttctctctagcaaaaacagcaaaggagcagagattttgcagg

SEQ ID NO: 74927 - DNA, 590 bp, Homo sapiens
tgttcaagagcagattccgatttggcaggttgggggcagggcctgagtctctgcatttccatcaaactcccgggtgatggtgatgcggctgctgctgggccacaggtcacactttgagtgccaaggctatgaaaaacaatgcagacagcaacgtaaatgtgatttttaaataaccctgtcataaattgctttgggacatattttggattttccaagattgttggattgttactcagctgtcaggattctctagatatcagttgtttttcttggmctgtgacctttctgggtctccagctgttcctctataaatccaaggggttgaactagaagatctctgaagtcctttccagatctcacagtctatgattttaagcatccatgtcaaaggagaattatggtttcatttgcattttctttttgtataaacctaataaaacatgaacccaaagttttatgctacaacagttcttaacataatgttaaaaagtaacagtaaacatgctttactaaattttggatgattcaggaagattagtgtcaacattcaaaggtttttccatgttgaagtcttgaagagaaagggtggg

SEQ ID NO: 74928 - DNA, 675 bp, Homo sapiens
tatagcaccttctggcccctttggggggctgagtcctctgcagaagccctacaggcccgccaaactcaacctctgacctctaccctaatatttccaagaccagcctcatgcataacaatgtcctcttcttcaaacccactctgcactctcatattcctttgctccctatactcaaaacacccttgcccctcctactcctccaaactcatccttgcaagcccaacttaaatttcacctccacacagcatcttccttacgcatggagtcatcrtgaattagtccctctggggcactctgcgcaactaagtttataaccttggtttagccccactctcagttggccatatactgtagctgtttgggtggtgaccactgcccttgctaggccactgtaagctcctgaaggttagactcccttctgccggcatcccctggttggcatagacccccagcccatgcacagtgggcactcagggaacacatgcaaagctcaacagctaccaacacatgcacagaaccctggctgaactgaagcaaaaagagctgttttactttcctcccaggcctctgtagcaccagcttagggaagcaccatgaggggtgggtctggctatgtcatgaagagaaccaccttctggaggcctctttcttcagagaaaccactaacacataaca

SEQ ID NO: 74929 - DNA, 1072 bp, Homo sapiens
  misc_feature (1)...(1072): n = A,T,C or G
agaatggtcagaagtaaagtaagtatcttttgctggaaaatcagagctagtaaatagtgtgagagctcaatattagcagcagaaaaaaaaacttttatagagattttaggtcaggcacagtagctcacacctgtaatcttagcactttgggaggccaagggaggaggatcacttgagcccaggagtttgagagtagcctgggaaacatagtaagactctctctatttttaaaaagaataagaaacattaataataataataaatgttttaaatgccaaagctgaaagcctttaaaagccaaagatcacatcctgttttctatttagccccagtaagaaaaaccaaaaacagcagcaatcaataactgtgaataaggtactctaccatgtacctacatgtttatatttacttgaaccttgctctaaagcatcacattgtttttaaatagaaattaatcaaaatgtaccgttataaaagcaaaagaagaaactgtaaagaaaaagacaaccaataaaaaagttctatttaccgaaaacctgccagcacaaagttaaaaggcaaacaacaaatcaaaaggaatatttgcaacatatagttattatcattaatatcttaattaaaacataaaaagccctgannnnnnnnnnnnnnnnnnnnnnnnnnnnnnnnnnnnnnnnnnnnnnnnnnnnnnnnnnnnnnnnnnnnnnnnnnnnnnnnnnnnnnnnnnnnnnnnnnnntatatacccatttacagatttaaattgagttttcagtgcatgaatactaaaatcaacaaatatttaattgaccataaggaaaaggggtgcagaaggatgtgataaagmcatgtaaatccattctaactaggagaagcttccatcacaatgagtccccaagtgacagtggatctgcagcaccagggtgtttcatgaaaggacgtgggatcatacatagagtgttcgtccagatctgctaaatcgcttcgcttcttggccttttggctgagatcaagtacagacctaccagatcttctcagacttaatcctgtaagctttgcctctattctatatga

SEQ ID NO: 74930 - DNA, 707 bp, Homo sapiens
gggatccagagcttgtatcttggccaagccctcccagaagtttctaacatacactgaaggttctcctgcttcaagagccaagatcctcaggcacaaaatcaggcaacaggagtcctgggctctgcccttgcttgtggagttctggaaacgaatgcatttggagtaggtgatgtttaatgatcctttctgttctcaattcctgtaatacaaataaacaataaaatacttacatctttattatttacattatagtttaaagttgtatatattgatgcaaacaattaggtaagataaaataaacagaaaaaataacagatttattcatcagaaaatatgatctattcatcagagaatgtcaaagaaatccaagaaatgtctttgtatgaggaaaatgagcaattgtggattttaccaaaggattagagacactgggttttcttcaaatctgtctgtgaggcyttcaaagggcagggcctcagcccagagcacatgcttggtacacacatgcatcagtggttccttgagctgtattaaattcatggagagaaaaaaatcaaggtcaacttgtgcttttttccccgactgtaaaggttttgcctgtaatcccctgctttatgtgaataatttgtttcacatgagttgaatactgtttaaacaagccaagtatcacattccttttgtctgaatagctgtagaggacatatttt

SEQ ID NO: 74931 - DNA, 707 bp, Homo sapiens
gggatccagagcttgtatcttggccaagccctcccagaagtttctaacatacactgaaggttctcctgcttcaagagccaagatcctcaggcacaaaatcaggcaacaggagtcctgggctctgcccttgcttgtggagttctggaaacgaatgcatttggagtaggtgatgtttaatgatcctttctgttctcaattcctgtaatacaaataaacaataaaatacttacatctttattatttacattatagtttaaagttgtatatattgatgcaaacaattaggtaagataaaataaacagaaaaaataacagatttattcatcagaaaatatgatctattcatcagagaatgtcaaagaaatccaagaaatgtctttgtatgaggaaaatgagcaattgtggattttaccaaaggattagagacactgggttttcttcaaatctgtctgtgaggctttcaaagggcagggcctcagcccagagcacatgcttggtacacacatgcatcagtggttccttgagctgtattaaattcatggagagaaaaaaatcaaggtcaacttgtgcttttttccccgactgtaaaggytttgcctgtaatcccctgctttatgtgaataatttgtttcacatgagttgaatactgtttaaacaagccaagtatcacattccttttgtctgaatagctgtagaggacatatttt

SEQ ID NO: 74932 - DNA, 1010 bp, Homo sapiens
  misc_feature (1)...(1010): n = A,T,C or G
attttgtttccctggagcctagaatgtgtttgttgcatagaaaattcctgttgattgctgttggcttggactcttttttttccttcaacttttattttaagttttggggtaaatgtgcaggatatgcaggtgtgttacataggtaaacgtgtgccatggcagtttgctgcaaagatcatcccatcacctaggtataaagcccagcatccattagctattcttcctgatggtatcccttcccccacccccactgacaggccgcagtgtgtgttccctgcaatatgtccatgtgttctcattgttcagctcccacttataagtgagaacatgcggtgtttkgtttcctgttcctgcattagtttgctggggatgacggctttcagctcctcctatgtccctgnnnnnnnnnnnnnnnnnnnnnnnnnnnnnnnnnnnnnnnnnnnnnnnnnnnnnnnnnnnnnnnnnnnnnnnnnnnnnnnnnnnnnnnnnnnnnnnnnnnnaaaaccttattgttgaagcatactattatatttttaaatgaaactcaaaatagcacttcgaggttttctactctttgttttctattttaaaatttgctttctaccactttagattagatcagcatttttaggcttttcctataatctaacacataaaggaatatagtatttttgaggtttgaactaagatgctttaattaatttgagatgtctttgaaatgatttgtcaaggtccaatgtttcctaaaagtacatgtagctatcttccaaaattgttttttctttcctccaattttactgaattatactttggtgaagtccagtaattcaagtgtttggctaacaatcatcaaggccacaaaaacccagcctctgctcttggcagtatcaggaacttcatagaatacatcactttcaaattgcagctgcaaatggtcttgttaaaggtaattcagcaacatcagtcaagatgttgccttgacacataatggaggagattagaaataatgc

SEQ ID NO: 74933 - DNA, 732 bp, Homo sapiens
tgggtatctgtatgcaagatattcttaataaatagaggttctttttagacattattattcaatattattcaccgtgattttctagcagttatctactacattatttcacaattatctactacactagtttgaaataaaagaatgcaatagagacctcattagttcaaagaatgttttctatgtttctttgtgggaatagcagaagttactctaaaactggtagatgctttataagataaatacacgcatgcrcacacacacacacacacacacacacacacacacacacacacacacacacacacacactgtattagtctattctcatgctgctaataaagacatacccaggacggcataatttatgaaggaaagaggtttaattggctcacagttcaacatgacgggagaggcctcaggaaacttacaatcatggtgaaaggggaagcaaacacatccttcttcacatggtggcagccagagaaatgcagagtgaaggacgggggaaagccctttataaaaccatcagatctcacgagaactcatttactatcacgagaacagcatggaggtaacagcccccaagattaaattacctcccactgggtccctctcatgacacgtggggattatgagaactacagttacaagatgagatttgggcgggggacacagccaaactgtatcacacaccccggtatagttcagactgtgctcaatttcgtacaagtt

SEQ ID NO: 74934 - DNA, 732 bp, Homo sapiens
tgggtatctgtatgcaagatattcttaataaatagaggttctttttagacattattattcaatattattcaccgtgattttctagcagttatctactacattatttcacaattatctactacactagtttgaaataaaagaatgcaatagagacctcattagttcaaagaatgttttctatgtttctttgtgggaatagcagaagttactctaaaactggtagatgctttataagataaatacacgcatgcacrcacacacacacacacacacacacacacacacacacacacacacacacacacacactgtattagtctattctcatgctgctaataaagacatacccaggacggcataatttatgaaggaaagaggtttaattggctcacagttcaacatgacgggagaggcctcaggaaacttacaatcatggtgaaaggggaagcaaacacatccttcttcacatggtggcagccagagaaatgcagagtgaaggacgggggaaagccctttataaaaccatcagatctcacgagaactcatttactatcacgagaacagcatggaggtaacagcccccaagattaaattacctcccactgggtccctctcatgacacgtggggattatgagaactacagttacaagatgagatttgggcgggggacacagccaaactgtatcacacaccccggtatagttcagactgtgctcaatttcgtacaagtt

SEQ ID NO: 74935 - DNA, 732 bp, Homo sapiens
tgggtatctgtatgcaagatattcttaataaatagaggttctttttagacattattattcaatattattcaccgtgattttctagcagttatctactacattatttcacaattatctactacactagtttgaaataaaagaatgcaatagagacctcattagttcaaagaatgttttctatgtttctttgtgggaatagcagaagttactctaaaactggtagatgctttataagataaatacacgcatgcacacrcacacacacacacacacacacacacacacacacacacacacacacacacacactgtattagtctattctcatgctgctaataaagacatacccaggacggcataatttatgaaggaaagaggtttaattggctcacagttcaacatgacgggagaggcctcaggaaacttacaatcatggtgaaaggggaagcaaacacatccttcttcacatggtggcagccagagaaatgcagagtgaaggacgggggaaagccctttataaaaccatcagatctcacgagaactcatttactatcacgagaacagcatggaggtaacagcccccaagattaaattacctcccactgggtccctctcatgacacgtggggattatgagaactacagttacaagatgagatttgggcgggggacacagccaaactgtatcacacaccccggtatagttcagactgtgctcaatttcgtacaagtt

SEQ ID NO: 74936 - DNA, 372 bp, Homo sapiens
gcaccatggctgcctccacccgggaaggagctccactcggcttcctgggactccccaggcctgaaacccagtgagtgaggactgtggacgtgatgcaggggtgccaggagcctcccacatggccctgcaccgcagggagctgggctggagggtgaagcctccatgtgatgttcgtggagccggggcatctcccacctgctgggacctcctcgccctgagtttgagatttcccctgaatgatcttgyctgagaaaaacaaattgtcctaaccctgaatccaggcccacccatccccacatcggtccatccacccacccatccgtccacccatcgccctgcccacccatccgtgcacccatcacccctcccccc

SEQ ID NO: 74937 - DNA, 1742 bp, Homo sapiens
caaaaaagcaaaaggatctattgcattttgttctacaagaatattttgtgatgtattcagttggactatatttgttccttaagaggacacaatttattagaaataattttgctatatggtgccacatgccactctgaccttactgaaaggaattctgacactgaagaaccaaaagagcttattttaaagcacccttacctattattaacataccaagcacagaaccaaagagagtagaatgacacagccctttgaattttgattgttatagtctatagtcatttaaaaactgttactggaatattttttaaattacagggttaattcataattcatcatgtatgctctttttcataaacccatgtattatttatatgtattatcacatatacaaatttattaatatgcccattaatttaacaaatatgtgttgagaatttatttattgaaaggagaatgaatatattttcttttcaaaagaaaagactggtgttccaccccagtcctgacttttcaaaccacattcagaacaaactgcatagttttccagaaattattttaaaagctttaacttgaatctagctttcataaattctggctaaaatcttgacgaacaatgcaaaaatacaaaggtcagaaatgtgttattttaagaatagcatttaaaagacgatgttttaacttttaaaaaggagttcaggttactgtaactaacgggaaatgtgccagattgtactgctttctaacttcacgcaagcaatctaaatgagctaaaactcaggatatagtcaatgttatgagattttgctgacaaataatatgtattcagaagcaacagatcagcattagaagttttaaaacttacaagtatgtctggccagcgagtagttggatccaccactagtcaacccgaatccctcaggaatttggctagagcttcgaggtctggtcaatagtttaggaggttcaatttcagcaccaaattcagctcctattactccaagtaaaacaatagcggtagcttgcttccgtctttcctcgtaagatgtagaaatttttttcatttgtgggacacttgataagcaacctgaagaccaaaacatagaatctcaacttagaacaaatcaatatacaaaaagacacatgattagaaaaacattcaggactgcacgttcggaaagaatagcattttcagcaaatggcactaggacaaatggttactcacaggcaaaaggatgaatttagacagacccctatctctaaccttccaaaaaaaaacctgaaaattgatcataatcctaaatataacagctaaaacaaaaaacaactctaagaaggcaacataggtgtatatgtttgtaattctggattatataatgatttcttagatatgataccaaaagcaccagtaattttttaaaaattttacrtaggatttcatcaatactaaaaacttttgtgcttgaaaagacagaatcaagaaaggataaagacaacccacagaatcagagaaactattgtcaaatcacctatctaataaaaattatttccagaatatataaaaactttcatgactcaataataagaacaatctgaatagatatttttccaaagttgtatgaatggtcaacacgcacatgaaaagatgctaaacatcattagtcatgaggaaaatgcaaagcaaaaccacaatgagataccacttcacatccatgagaatggctgcaataaaaaagaccatt

SEQ ID NO: 74938 - DNA, 1320 bp, Homo sapiens
cctatacctatgtaacaaacctgcacgttctgtacatgtatcccagaacttaaggtataattaaaacaaaaacaaaaacaaaaactaaaaagcaaagtgtggtctgggcaccagccgcatccatatcccctgggagctatttagaaatgtaaaaccttaggtcacacccagacctcctgggtcacaactgcattttggcaagcttcctggatgattcgtgtgcacctacagtttaagaaacacttcacaggagtccatgtggaacctcacaggtgctgttgatagtttcattaggcaccaggctgggactggctctgggcaccaccattcactgtgtcccaaggtggaagcccaggcctcttgcacaggggtgcactaaggtatgctgctccccatcaaaagattggcccaagcccagatcctaaagccaatctctctggggcatctgttttcccatctgtatgacggaggggttggaaaggctgatgtcagaagaccagtatggcyttatcatgtgtttggtttttgtttgagggggattgataggatgatttctgtccatgttcatgttcatgttccagaaacatggtaggttgagatgaaaagggcatgacaagaaccacagcagcttccagatgaggctagtgtatggagatgtgagattcgggatgtttcattttacatagatcatattctgtaaggttattcttctagttctatgtttctttgcatcataggaaaaaggaatcggatccagggaaaacgctgtaccactggggcccgggtgccttaagtggttttctgatcaactccatagaatcagaatgtcaggactacaagtcatccgtgtccctgcaaaggacatctcatcttcattgatcatccatggtgctgagcatttaagaggcaccagggatgtaactttgaatcagaagagacctggttcctgcccttgtggagcttacattcccgtgggtgagacagataaagagcagtagttataagcaaaagggggaaaggaagatgcgggggtagggagtggtttgcaagaggagtcaggtcacacagggttggtgtgggatggggcattaacaggaagagaacactatgagatttgtgtttcgaagaaaccattggctgatgtgcgagattggagaggagtaagagaaggcatgaggagaccaattaggagactactacagcttccccagagggagatgacgaagggagggcaactgcttccattgcagggagcgagacccagccccaaagaaagcaaccaaggatgaaactgagaactggggtagaaggtactgacac

SEQ ID NO: 74939 - DNA, 1320 bp, Homo sapiens
cctatacctatgtaacaaacctgcacgttctgtacatgtatcccagaacttaaggtataattaaaacaaaaacaaaaacaaaaactaaaaagcaaagtgtggtctgggcaccagccgcatccatatcccctgggagctatttagaaatgtaaaaccttaggtcacacccagacctcctgggtcacaactgcattttggcaagcttcctggatgattcgtgtgcacctacagtttaagaaacacttcacaggagtccatgtggaacctcacaggtgctgttgatagtttcattaggcaccaggctgggactggctctgggcaccaccattcactgtgtcccaaggtggaagcccaggcctcttgcacaggggtgcactaaggtatgctgctccccatcaaaagattggcccaagcccagatcctaaagccaatctctctggggcatctgttttcccatctgtatgacggaggggttggaaaggctgatgtcagaagaccagtatggctttatcatstgtttggtttttgtttgagggggattgataggatgatttctgtccatgttcatgttcatgttccagaaacatggtaggttgagatgaaaagggcatgacaagaaccacagcagcttccagatgaggctagtgtatggagatgtgagattcgggatgtttcattttacatagatcatattctgtaaggttattcttctagttctatgtttctttgcatcataggaaaaaggaatcggatccagggaaaacgctgtaccactggggcccgggtgccttaagtggttttctgatcaactccatagaatcagaatgtcaggactacaagtcatccgtgtccctgcaaaggacatctcatcttcattgatcatccatggtgctgagcatttaagaggcaccagggatgtaactttgaatcagaagagacctggttcctgcccttgtggagcttacattcccgtgggtgagacagataaagagcagtagttataagcaaaagggggaaaggaagatgcgggggtagggagtggtttgcaagaggagtcaggtcacacagggttggtgtgggatggggcattaacaggaagagaacactatgagatttgtgtttcgaagaaaccattggctgatgtgcgagattggagaggagtaagagaaggcatgaggagaccaattaggagactactacagcttccccagagggagatgacgaagggagggcaactgcttccattgcagggagcgagacccagccccaaagaaagcaaccaaggatgaaactgagaactggggtagaaggtactgacac

SEQ ID NO: 74940 - DNA, 1320 bp, Homo sapiens
cctatacctatgtaacaaacctgcacgttctgtacatgtatcccagaacttaaggtataattaaaacaaaaacaaaaacaaaaactaaaaagcaaagtgtggtctgggcaccagccgcatccatatcccctgggagctatttagaaatgtaaaaccttaggtcacacccagacctcctgggtcacaactgcattttggcaagcttcctggatgattcgtgtgcacctacagtttaagaaacacttcacaggagtccatgtggaacctcacaggtgctgttgatagtttcattaggcaccaggctgggactggctctgggcaccaccattcactgtgtcccaaggtggaagcccaggcctcttgcacaggggtgcactaaggtatgctgctccccatcaaaagattggcccaagcccagatcctaaagccaatctctctggggcatctgttttcccatctgtatgacggaggggttggaaaggctgatgtcagaagaccagtatggctttatcatgtgtttggtttttgtttgagggggattgataggatgatttctgtccatgttcatgttcatgttccagaaacatggtaggttgagatgaaaagggcatgacaagaaccacagcagcttccagatgaggctagtgtatggagatgtgrgattcgggatgtttcattttacatagatcatattctgtaaggttattcttctagttctatgtttctttgcatcataggaaaaaggaatcggatccagggaaaacgctgtaccactggggcccgggtgccttaagtggttttctgatcaactccatagaatcagaatgtcaggactacaagtcatccgtgtccctgcaaaggacatctcatcttcattgatcatccatggtgctgagcatttaagaggcaccagggatgtaactttgaatcagaagagacctggttcctgcccttgtggagcttacattcccgtgggtgagacagataaagagcagtagttataagcaaaagggggaaaggaagatgcgggggtagggagtggtttgcaagaggagtcaggtcacacagggttggtgtgggatggggcattaacaggaagagaacactatgagatttgtgtttcgaagaaaccattggctgatgtgcgagattggagaggagtaagagaaggcatgaggagaccaattaggagactactacagcttccccagagggagatgacgaagggagggcaactgcttccattgcagggagcgagacccagccccaaagaaagcaaccaaggatgaaactgagaactggggtagaaggtactgacac

SEQ ID NO: 74941 - DNA, 719 bp, Homo sapiens
tgtaacataggtcactgacaagagatggttaaatatctttatatttaaaaaataagaaaaagagaaatccgtagcagaaaatggataaaggttgaaaaagtatttctcagaaaggaaacaaggatggccagtacacttatgaaaagatgctaagccctattgtcaaggaaatgcaaattaaaagcacaatgtactataatattttaccttccagactgaaaacctaaagtccaacattatcaagttttgtggaggacttggaacaaccagaactcttttatacttattataagaatgtaaattggtttagtctctttggaaaacaattgagtatattatcttgtgagtccacccttttctatatttagagaaaccttttcacatgtaacccaggaaacatgtacaagcatgttcatagcaaacagtttgaaataacacaaattggaatcagcgcatgtgcattaagtattggacaaatatactgagcaaaaaaagaatggaaaaagaatgaacttttatgaagttcaaaaccatgtaaaatgaaataatttattattagggatacaaacrtatgtagtaagaaaaatgaaagctagggaatgaaaccacacaactcagaacaatgattactctaaagggtgctaagaaagggggtgaattcaggtagaactacccaaggggcttcataaatattgtaagacattgatattttttatgtt

SEQ ID NO: 74942 - DNA, 2369 bp, Homo sapiens
aaggacacatttttatttcagttatcctcccctaaatatgagattttcattcatgggatactagctagcccatgaatttagccaaggatatatcagtagttcatttctataacagaggagaagacataagtcagtatagctgaaaggatcagcattttaaaagaatgatggtagttgatgaatcaatttcacctattaccatgttacactaataagagagaaaaaaggatacttagaaatgaagggtagtaaatatggagcaaataaactaaaatgatataacagagtatacaatcaacgtatggaatatactactaccgaatgttatctcattgaataatgtgaatagattcttcaaacatccaggggattttatgaccatagaccacatttatcttcatataagttaaaaaaatggtaatcggccgggcgcggtggctcacgcctgtaatcccagccctttgggaggccaaggcgggcggatcataaggtcaggagatcgagcccatcccggctaaaacggtgaaaccccgtctctccttaaaatccaaaaaattacccgggcgtagtggcgggcccccgtagtcccagcaacttggaaggctaaggcaggaaaatggcgttaaccttggaggcggagctttcagttaaccgagatcccgcccctgcactccagcctgggggacaaagcgaaaccccgtccccaaaaaaaaaaaaaaaaaaaaaaaaaaaaaaaagatggtaatcaaatctcatgcttctggaaggaaagtgattgcctattatacattattttggataatgttttatttggtttcctctgaattatcggctggcataggaaggatactaataaattgtcttttattctttgggattttttgtttgactcactttgtggctctggtctcccatcgttttgtattgcagttaatcgcgcacatatccaagcattttccatcctcaaattattaactccatactaaggagaactaagttgatcaaacgtgtattttccaaataactattaaagtaagttacatatgataaggggtcaataagtaatgtgctatgcattcttctctcttagggaaaaagtgagctattgaaaagattcaaatagtattcttctgaaacggtgcttagagaaaaagagtatttttttcatctatatttagttataggtaacatgattgattagctgtattatgcagttttattttttccaagattttatcaagttgtttttctgagacatagaaaagatattattattattattattattattgttattattattattattagtttgagacagtttcactcttgttgcccaggctggagtgcaattgcgcgatcttggctcaccacaacctccgtctctgggttcaagtgattctcctgcctcagcctcccaagtacctgagattacaggtgcatgccaccacacctggataattttttttgtatttttaatagagctggggtttcgccatgttggccagtctggtctctaacttctgagctcaggcaatccacccaccttggcctctcaaagtgctgggattacaggcatgagccatggcacctggccccatttagcttctctttcaaaattagcctggaatctcacctcaccacctgcacttggataagtcgccaacacagcccaaagccaatcattgaccacgtggctcactgtaatagcctcctaactggtctccctgcctccactgttctgattcatttcatcrtggcaaccagaattatctgtttatagtaacagacacatcatgttatcttcctgatctaaaccttcccttggcttgccatcttttgtaaaataaaatccaaagatttttgtctttttcaggaccctacatgacctggattatgattgtattttcagcttcatttcctctcgcatgttttctatgttgctttgacccagtcctattctcgccctgctattctgcaagcgcatgcctacagtacccacttttaccattgttctcctggatacttaaagggctgtgtatttcattctgattagtcacctcctcaaagaagtcttgcatggtgattcctatctaaaataggaaccccagccatagtgataccaattattactacctgacattatgttttattttatattttatttgctccttgtctgaattcctcactaaaatgtaatgttcatgagcacgggaacgtcatccactgcaatattcctagtactaagagtaacacctatcacctagtaggtactctgtaaatactggatggattaatggatattacatttatttatatttatgtaaaatatgtttaaagactacatatattgcttgctaaatggagtc

SEQ ID NO: 74943 - DNA, 1106 bp, Homo sapiens
gcatatccaaaaataggaagggcattaattaatggataacctacctcagcaaacatctgtaaattgagattacaattgtttgtcatgaagtataattactgatatttttgaggtacttgaatattacttgttcttaaatggtccatctagaaaagcaggcatgttaatgcaaacatttggcactttttaatgattactgaggttcatttgtagttttgtacaaatattgaataccatgatggaatggagagagttttgtaagtaaatagattttaatattaatcagttttataacgtttaacaagtaatttaaagatcgtaaggttttttcttaaagttaagtggttaatgtaggctctatgatcttttatggatataaaattcttaaactacgattatttgatttgcatttaaaaggaaagctcattgtgccatttatctctactattaggcataataaaacctcaattaattcacattgttttgaggcctgcaagtcaaaagagtgaggtgaaatttaaaactgtttttaatttatcttactgtaaascacaaagtagtttttttaaaaccttcttatcaataattttaaaaagaaaatgcaaagttcataaaatttcctttagggtttcaaacagaatctgatcaaagtaatcatctaaacttcagttgaatgaagaaaaaaatgaagataaagaataaaatatgagtcaccatatgttaaaataaatttatcttagcctcagtttctgctgaggccacaagatgattgatgtcaacattctaaagtgaggtgagagacaatcatgcaaaaggcagtttagagaaatggatttctaactcttagctccttgctcacaataagggcataaaactggcagggttttgattagacagggatttctttagagaatgctgtctgtgagatggaggatggtgcttcttactctacagttgcactgaaactttaagaagactacttagcttaacgagtctcctgtagcttgataggcacagtggacagtgtctgactcatacttaagaaatctgaagcaataaagatcaggtatctagctaccctgacagcagagggattaacaggtact

SEQ ID NO: 74944 - DNA, 566 bp, Homo sapiens
aaaaaaagttttgaacctactgtgattttaaagaataatgaaattgaaaaagttggggattctacacatgaggtaatcaatacactttaccagtccctgagggagcggtctcagaaggtccatgtcttgtccaaggacatcatcagatgaagaattagaaccaaaattaaagccctgttagagtattagctatgccatattacacgatactttttccttctgcattaccctcttattttctaattcttctatcatgcaactaagaagaaatgagagggccrgacgcggtggctcacgccttgtaatcccagcactttgggaggccgaggtgggcagatcacctgaggtccggagttcgagactagcctggctaacatggtgaaaccccgtctctactaaaaatgcaaaaattagcgagatgtggttgtgggtgcctgtaatctcagctacttgggaggctaaggcaagagaatcacttgaacctgggaggtggaggttgcagtgagccaagatcgcgccgttgcattccagcccgggcgacgacagcaaaactccatctcaaaaga

SEQ ID NO: 74945 - DNA, 811 bp, Homo sapiens
tatggccagcctataagttaaatcatttatacatttgccaccagagagaaagaaatgaaaaatatagcagagcaaaggtctggggatgggtggagcacacattttatacagaggctgggttcctttggataacaggcttcccctggcttggattctcggtcctctttttccaacgatttaatgttctgcacctcttcccctactcctagagttccagggtctttctaccccacaaaacaccctgttgagtaaggcckcagtagaaaataaccttaaaccctcagatttagcaaatcctggccaaccagatgctgacctgctgttatcattgaataatacttttaaaaagacttgatgtctattaaaaagtcataggacactaacagaaaaaaatgatttaacaacgtggtattgccccaattctaaatctccatgtaagaggatacatttcctcttatatctcctgactctaagcataccaactcaaactttacaactatatctgacctcttctccttacaacataactcctctcctagaattcaagcccttatcataaagtctctggatgaaaatcaccaatcttgagttctcgacaatagagctaacagatgaaagagtaacagataaaacaaagtatatatcctgctcattatgaaataactgggaggtatgggactataccagggcatttgtcattgatagttgaaatcaggctctgcccacgatgacaaatttgtgctgatgctaaggaggaagacattatttataattttaggaagcacttgaacattgcaactggtctgttctc

SEQ ID NO: 74946 - DNA, 673 bp, Homo sapiens
tccaactacttgggaggctgaggaaggagaatagcttgggcccaggaggtggaggctgcagtgagctgtgattgtgccactgcactccagcctgggcaacagagtgagaccctgtctgaaaataaaaaagagacagagagagataatactgccagatcccaacctcctttgataaccatgagataaaagattcttgtgggtgtttaggaatgaggcctttaccaaaaggcaataggagacatggaagaagaagagcatcatcaaatttgtgtttcagaaaaatgtccctgattgaaggattccacaggctttggagatgtgagaaaactggaggcagagaaaataattaggaggttgttactagaatgccagtaagaaattatgagaatttagaagagagcagtggggaggtagaaaggagattaaacacgatgaaggagatattattaacttatgtgtctatcaactgagacggaggatttaagagagaacagctacgaatattcccttgggtagaatttggtgactttggatratggaggcacttgccacagggatatagaatgagcaggtctgaagtggggaacaatgatgccattttggacatcacagatttggggtacatttgtcacatccaaatgaggatgtctgataggtcagaagagaagctgaa

SEQ ID NO: 74947 - DNA, 839 bp, Homo sapiens
ttttttttgagacaggatcttgttctgtctcccagggtggagttcagtggcgcaatcttggctcactgcaacctccacctccggggttcaagcaatcctcccacctcagcctcctgagtagctgggactacaggcatgcaccaccactcctggctaatttttaatggagatagggtttcaccatgttggttaggctggtctcgaactcctcacctcaagtgatccacatgcctcggcctcccaaagtgttgggattacaggcgagagcgactgagcccggtctgcaagttctttcttaaaagaagacccgagcagccacctttatggccctcaccacagggttgctatctttcaggaatagagagaaggctagtgtggcccaagctgaaagatcaagggaaagaatgcaaagatagaagccagagctgggccctcctctttgcctccccaggtggctctgcacctcccaccctcagactgcattgcccagctcctgtgctccctgggmtggactgggttctgccaatgggaagcctggcaaaagatcagaaggagagaggagaataaagtcagtgtgtttatttccggattcctcctgggaggttgcctggggctggctgcttcattcatggcctctgctgtgtgcaattttccctccttttgggttccaggaactgctccctctggtcagccctctgggcctggtgcttctggcccaggtccctgcgtgccaccccttggcttcccttataccctacccctgtgctttggaattaatccatcatcagtaagctctcctcgaattatccttatccgggagggccatctgctccctcctg

SEQ ID NO: 74948 - DNA, 839 bp, Homo sapiens
ttttttttgagacaggatcttgttctgtctcccagggtggagttcagtggcgcaatcttggctcactgcaacctccacctccggggttcaagcaatcctcccacctcagcctcctgagtagctgggactacaggcatgcaccaccactcctggctaatttttaatggagatagggtttcaccatgttggttaggctggtctcgaactcctcacctcaagtgatccacatgcctcggcctcccaaagtgttgggattacaggcgagagcgactgagcccggtctgcaagttctttcttaaaagaagacccgagcagccacctttatggccctcaccacagggttgctatctttcaggaatagagagaaggctagtgtggcccaagctgaaagatcaagggaaagaatgcaaagatagaagccagagctgggccctcctctttgcctccccaggtggctctgcacctcccaccctcagactgcattgcccagctcctgtgctccctgggatggactgggttctgccaatgggragcctggcaaaagatcagaaggagagaggagaataaagtcagtgtgtttatttccggattcctcctgggaggttgcctggggctggctgcttcattcatggcctctgctgtgtgcaattttccctccttttgggttccaggaactgctccctctggtcagccctctgggcctggtgcttctggcccaggtccctgcgtgccaccccttggcttcccttataccctacccctgtgctttggaattaatccatcatcagtaagctctcctcgaattatccttatccgggagggccatctgctccctcctg

SEQ ID NO: 74949 - DNA, 674 bp, Homo sapiens
ttttatccatgattgtgttattgcctgtttgaaagctgcccttgctcccctcttggttggcaccaacccgcagtcctgggcttggcctgcaggtcctgccaactcagctcctgcttcattctctsatgccatcttctatcacactcttccttgtttaccctgctccacctgcgctggctaatcttcaaaagtgccaagcacacccccaccctgaggcctgtgcaggggctgctcccctacctggcctgagcctccctgacatccccatggcccctttctcactgcagctttctcagttcccccaaggggaagaccaccagccactcccactctcttgcccacgtcattatttttcagaatgctggtttcctaaggaatcccccagtcactgcccttccttctgtaccctaggtctttaaggagaccaaaataagacaaggaatgaggacaggacagagctgctcacattcagtttattcctcctagaatccttatcaatcagccaagtcacctcccttggggcagagcaaggtaaggggaatagagacatggagatcctccggatgcccctgtgcatggaggaggggtcaggagtggtgaaatcctcaatgcttctcacacctgtcatcatattatgataatctattgcatggatgcatccctcaggtcccttt

SEQ ID NO: 74950 - DNA, 674 bp, Homo sapiens
ttttatccatgattgtgttattgcctgtttgaaagctgcccttgctcccctcttggttggcaccaacccgcagtcctgggcttggcctgcaggtcctgccaactcagctcctgcttcattctctcatgccatcttctatcacactcttccttgtttaccctgctccacctgcgctggctaatcttcaaaagtgccaagcacacccccaccctgaggcctgtgcaggggctgctcccctacctggcctgagcctccctgacatccccatggcccctttctcactgcagctttctcagttcccccaaggggaagaccaccagccactcccactctcttgcccacgtcattatttttcagaatgctggtttcctaaggaatcccccagtcactgcccttccttctgtaccctaggtctttaaggagaccaaaataagacaaggaatgaggacaggacagagctgctcacattcagtttattcctcctagaatccttatcaatcagccaagtcacctcccttggggcagagcaaggtaaggggaatagagacatggagatcctcsggatgcccctgtgcatggaggaggggtcaggagtggtgaaatcctcaatgcttctcacacctgtcatcatattatgataatctattgcatggatgcatccctcaggtcccttt

SEQ ID NO: 74951 - DNA, 757 bp, Homo sapiens
ttggctgcctggaataaacactacattgccccaggttttttggcagttaaatgtgatcatgtgacttaaccgtattctagtcaatgggcatatgtggaagtggtgtgtgcaacttctggagagcacccttactaggcggatgcacctttctttccactttcctccttcctgcaggctggaactgcccataaaggctggcaccccagcagccaccttgagaaatgcagtgatgatgctgagtggcaaggcagaaggcacagggtccctgcacctgaggattgctgctccaaacctgggccaccagcctgaagatcccgccagggagaartaaagctctgttttgctgaagccactgctattttgggggtctcatctcttccagctgattctaacctgaaactgaaccttaattcaatctggctgatccatgaacaaccatcacgccttgtgctctgtgtcagataggtttcttaagggagaatgtcacttactgacagtgatttgtcaacaccaaagaggaaaaaatatcagagaaaggtaagagagagaacaatagagagagaaagagagacagagacagagggggagagagagagagagagagagagagagagagagcagacttggtttaattccctcttttcccttattcctttctgcccttttctggcctttctgcccttgaaacttagcacttccctcagaagcctcccctgtgaacacagccccaagatttccctattattttccccctccc

SEQ ID NO: 74952 - DNA, 757 bp, Homo sapiens
ttggctgcctggaataaacactacattgccccaggttttttggcagttaaatgtgatcatgtgacttaaccgtattctagtcaatgggcatatgtggaagtggtgtgtgcaacttctggagagcacccttactaggcggatgcacctttctttccactttcctccttcctgcaggctggaactgcccataaaggctggcaccccagcagccaccttgagaaatgcagtgatgatgctgagtggcaaggcagaaggcacagggtccctgcacctgaggattgctgctccaaacctgggccaccagcctgaagatcccgccagggagaagtaaagctctgttttgctgaagccactgctattttgggggtctcatctcttccagctgattctaacctgaaaytgaaccttaattcaatctggctgatccatgaacaaccatcacgccttgtgctctgtgtcagataggtttcttaagggagaatgtcacttactgacagtgatttgtcaacaccaaagaggaaaaaatatcagagaaaggtaagagagagaacaatagagagagaaagagagacagagacagagggggagagagagagagagagagagagagagagagagcagacttggtttaattccctcttttcccttattcctttctgcccttttctggcctttctgcccttgaaacttagcacttccctcagaagcctcccctgtgaacacagccccaagatttccctattattttccccctccc

SEQ ID NO: 74953 - DNA, 725 bp, Homo sapiens
tggaggaagaggtgtggatcctccatgctgtctttggtcaagttgagctaccctccaggaacattcaactgctcataacccaaaatctctccaaacattgtccttttgggtttttatggaggcttcattaggtaggcattattgattacaccattggctgttggagatcaactcaaccttcagcccctctcctgtctccagaggttggtgggtggggctgaaatttccaaccctctaatcactctgttggtttccctgacaacaagcctccatattgaagctatccaagagcccactagaagtcacctcatccccacaaaaatgcttctatcacccaggaaattccaagggatttaggaactctgtgccagacattcctagcactcaggaaattacaaaggtctaggagctctgtgtcaggaatcaggrtcacagaggaaatattagaacagaatatttgtccctggttcctcagatagatctcctaaaatccctgtagataggcgtgctagaagaatcttctgatattttgtctttgacctcagtttttgacacagttcctgaatcccttggaatttcttgaattacagaagcatcttttattctaatgaagtgacgcttggtgagcttctcaggatgagagctcgttgtcaggaatcaaccatatgattagtgagttggaactttctttttttgtttgtttgtttgtttgtttgttttgagac

SEQ ID NO: 74954 - DNA, 1197 bp, Homo sapiens
gtcacctgtagatagtcagagtctctgtgaacctgtgtccctgcttcttcccatcactggtttctgattcgaacccagagtgggtgggattctctcaaatcagcaaagaccagatggtatggccaagccctggcttggctgcaaagaaggctggtgaacagatcatctgatattttgagctttaactctgggaagtagactttgcctcttaaaggtagaggatactccaaacagaggaaggaggttcagatgctggatggccagaatacgcacatctcccttccagccttccgccacggtctcttgtgagcattgcctaaacaaatcggcattatttaatccagctagctgtgggacacagatgcagtcaggattccgaaacctctgcatctgagggccagaaaaatggactcttgggaagcttctaggaggaacaccatccagctgacctcgccctgccaatactttctgcttttggccaggtgacacttttcttctttagaattcctagaataggcactcagtgaatatctgatggggaaaaaaagaaaaaaaaaagaaaggaaagaaaaagaggccttgggtaaccacccctccctcaggtcccgggatccatccctggctctgtgtgatatggttcacttcactgctgtgggcctcagtttccccatctgttaaaaaaaaaaaaaaaaaaaagacccagcctggctagcctgcagtgcctccggctccagcagtgagcgtcaaggagctaaagggtgtggggctgtcccgcccacggtgcttcatggggttggctgcacataatgacagtgtcccagagctggcgcttgtgtaacaggcagatttaccgagaggggacgactgtttgctcagcagccgagaagtctataattagactgtcacaacatcagcaaaagtacaggatcaatgtaatcagagaagaaatggaaaakaacacggcatcagtaaagtcctccagtggttccccatggtttccggagcactaatcacccaggcgaggttcaatgtcccgcttgtgggtttcctcctgggtgatgaccaggttggtttaggcctactctgcctgcccctctcagcagcctggttctcctcctcctctctcccttctccactccctctgctcactgagtcttagcgatgaggggccaaaagaaacaggacttgcaccccaaa

SEQ ID NO: 74955 - DNA, 881 bp, Homo sapiens
tgcatctggaagtattagaaacccaaagaataaaaggatctgtggagctgaggtaaaattggcatacataaatttctctatttaaattctattaatttaatttcaggaagccctattaattataacctttccataattacttaataataataattgttatttaaaattataaacccggaaaccttgaagtaccttctgaatcattagtattggaggctgtctacatatgttttatttgtttacatatattaattcacatcaaactgctattcaaaaaaataaggtgggggacttcagatgacatagcataaaacaaatcaaaacaaaaagaaccacatgcacacaagaaaaatctttaaaataaagataagttacatagtgcaatagagataatgattcaattgtaaaaaaatttattttctggaagcatgggaatgattaaaaaaaacacacacacaacaaatgctgttggaatagggtggagcagaaagatccccagccatggaggcagggacccagtttaaggtcaggcaaagrcgttttgtgagtcaaagtttcaccgtctgttcaaggcggaagctctctacagctccaagtgctaactttataattacttgggtcagacaaaaatctttccctggcacatattcacatgtctttcaggtagagcagagactgaagatcttaaaaccaagatgaacatacatgacaaagtcacgggggcattactcagtgaggggtcttcaggaagttgaaaagaatttctgagattggagtactaagagtcaattctggcatcttgttcccttcctcattttatgtgctcaaaataacgagcagatgtaatgtaaaataatgtaaaataatttttatgttgtaaa

SEQ ID NO: 74956 - DNA, 733 bp, Homo sapiens
tgactgattccagctcagatattaactaaatctgggaaggacagtggagagccaaaactaagttaggaagaaatataaatatgtccagaaactaggcaatctygtatgagcaatgtcagtgtattcaaaaaagtcactaaaagcaataaataagtgacaaaccttatcatctaaactatagaagttttgatagtgaaaaagagttctattaataactatcaggacaacataaactgagctgttccagaaaataatttgtaagatcactcttgttaggtagagagagggtgggctacagagaaatacacatcaaaataagtgtgtataactgagaaacagttatgaatgaggaaacaatggtgtgacaagaaagttaagatgaaatgctagtacagtcacaaggtcacagaagtccacaggtgaagagagtcaattgagctgctcagagacagaggaagaattgactggaagctaaaatgcttaaccttcaagacaccttccaagattttagcaatttgttcacatgattctatatctcataaagtaaggaaaagtggtcgggcatggtggttcatgcctgtaatctcagcactttgggaagtggagatgggaggattgcttgagcccaggagttcaaggccaagagctatgattgtaccactgcactccagcctgggtgacagactgagactctgtttcaaaaaaaacaataaaaaagaaagaaagagtaaga

SEQ ID NO: 74957 - DNA, 733 bp, Homo sapiens
tgactgattccagctcagatattaactaaatctgggaaggacagtggagagccaaaactaagttaggaagaaatataaatatgtccagaaactaggcaatcttgtatgagcaatgtcagtgtattcaaaaaagtcactaaaagcaataaataagtgacaaaccttatcatctaaactatagaagttttgatagtgaaaaagagttctattaataactatcaggacaacataaactgagctgttccagaaaataatttgtaagatcactcttgttaggtagagagagggtgggctacagagaaatacacatcaaaataagtgtgtataactgagaaacagttatgaatgaggaaacaatggtgtgacargaaagttaagatgaaatgctagtacagtcacaaggtcacagaagtccacaggtgaagagagtcaattgagctgctcagagacagaggaagaattgactggaagctaaaatgcttaaccttcaagacaccttccaagattttagcaatttgttcacatgattctatatctcataaagtaaggaaaagtggtcgggcatggtggttcatgcctgtaatctcagcactttgggaagtggagatgggaggattgcttgagcccaggagttcaaggccaagagctatgattgtaccactgcactccagcctgggtgacagactgagactctgtttcaaaaaaaacaataaaaaagaaagaaagagtaaga

SEQ ID NO: 74958 - DNA, 676 bp, Homo sapiens
gatgaattgatgattaaactgtcagtagcaaatacaaaagtttttggcaggaacggggttttgagaacaaacctcccaaggcccaaggtatgaagacagacaaaggcgcatagatagcgcatccacctgtgcactcgctcttctgatcagcagtgtccagaggcctagctaagctcaggcctcctttgcagctggacagtgggctycccaaatgtcatgcccactattgcagggcagacacttggcacctgacatcagtgattacaagagaaaacaaaatgattatttggaatacatgcttatagtgtaagttcagtgattactgaataaacaagcaaaaacctgagtaagaatatctagtactgtactaatcaaaactgcccctggacattgtagaagagagtcctgtctaattctattccctgcacttattcgttctgatctttcacaccttttcctcaacatcaatcccagtcaatcccagagaactcccagagagctatgacaaaaaggtgtgtgtgtgtgtgtgtgtgtatgtgtgtgtatatgtgtgtatgtatatgtgagtgtatacagggatggtggatataaatacatatatgcttttatgtgcatatgtatagaaacatatatttctatgtgcatatataacacaatgcaaatatatacatatatg

SEQ ID NO: 74959 - DNA, 531 bp, Homo sapiens
gggccggaagcaagtccgggtatttttgggaaactttgttctcacaaggtgcgcaacactcgcgcgcgcgcaacactcaccaggaagtttatgtcgccccggggccactaggcggtagctgcacgtcgcgcaatcctggctgcattcggcccgcacggtcgccaggagcccggggccgagcaacagcagccaagtgcaaagtgtcaggaaccgcgccatggactgcgaggagagagggacgcgtgcttcgagcctgcctgggcgcagaacggggtccctcggcaggaccctcgccgcgacagcctcagcaggggatcgtcgagcaaaagcccgcaggaatgctcctttctggggccccgccctcccggccgacagcttttaggtagacstggaggcgactcagatcgcctcgcggttcccgggatggcgcggtcgcccccaacgcgaggctgcctggggcacccggctcttttcctgggcgtccgcggcccagggcaagattccggagagaacgccgcagaccaggggcga

SEQ ID NO: 74960 - DNA, 2569 bp, Homo sapiens
ttaggtattataagtaatttagagatgatttaaagtatacaggaggatgtgggtaggttatatacaaatccattttatatcagagacttaagcatctgtagattttggtgtccatggggaatcctagcagcattcccccatgaatactgagggataactattaactcccccacttactagccgtaagtcctttagacaacttatttatcctctttctcatctatagaatgtgcataataatggaacctacctctttaaatgtttgttgttattaagcaaactaacgtgataaagagcttgtaagtgtgtgttctgaaacatttactgagtaagccctcaataaatattagctcttgttatcttggtactgcttccttctacagttttgcttctagaatccagtactgatacacacacacacacacacacacacacacacacacacacacacacacacacattttaatatcatgcttgctctatccaagttccctgcatcttcccaaggagaactattcaagtctgagctcctagacattatgtctcgcttacaatattttcaagaaacctttctttcatccaagacattagtcttaaagaagaacacagcatagttctgtttccacccaaatggcaagctataataatgagttattaatcagagaaggttctggcgtcggagatttctacctgcggtaatggatgacccaacagttaggtgggatgcagctgtgacagtctaggggcatccatcatcctaggctagccgtctggaagtcaatggcaggagagcctgaaaacagtaggcaaaatggcctcaggtaacgcaccaaggctgagcatgaggactccagtttctgcctattgggaatccacaggaataaacctctttcttcttttggaaagattaatgggaactaggatacaatgtgaaaatcagttgtagaaagagagcagctcacttttcagaactagcaacagacaaaaacaaggaggatgaattcccatttgttggaaggtgattcactaggttgccttgatttagtgagaaatccactatgtatgtaggcatccagatgtggtaggaataatacagaagagaaaagaactatgtcaactgtaaaaccaaaagaaaaaagctaagtaaggyatgactggagatggataaacctatctggcttaggcaatgctatatttagtgtctaaatttggaaggcattaagtggaaggctaagagctcaatatttctcttttaggaagtagggagccattaaaattttaaacagagaggtggaataatgcatgcagtgctctagaaagcttctctgcttgtgtacacagtatatattaaaggtgtaaggacggtagtatcagttaagaaataattctgtcaatagtccaggtttcaggaaaaagcctctcttgcattgtcaaagtttcaatcaaaagtcttgaagatacatttggattttagctgatattcaggatgtgctaatatgaaaacataaccaaaatgcacctctattagtttttctaataaggaagtttctatctaattgtaactttttacctgttgaccaaatctcacgatctccccattctcaccacactgcctagcctccggtaaccactaatctaccctctacttccataagatcagctcctttggctcccacatatgagtgagatgatgcaatattagtctttctgtgcttggcttatttcacctaacaaaatgttctctagtttcatccacgttgctgaaaatggcaaattacattttttaatggccagatagtatttcattatgtatgtataccatttaaaaaacttatttaacctttgagagaaaaaaaatttggtattctattatgctgcaatgtgactatggttaaaagaattgtattatatatttcaaaatagctagaagacaggattttgaatgctctcactataaaaaataataaatatataagatcataaatacagctaaataccttgatttcatgattatgcaatatatgtttgtattaaaacatcacactgtatcccatgaatatgtacaattgttatgtcaattagaaacaaaataaaaatcatgaagtccctgagaagtaaataaatcctgttcttttggtattagttaagcttacgaataacccttaaaggtaaaataaataagaaagcacacacattcaaaactgtgtaaaatgataaaacaggcaacaacagtaaatagaaaagaaagataaggtatattacattactatgatatgctgtgaagtaatcgttactctctctggtggactaagcaatccagctactgaatttattggtgagctacagatgatgggttactcaatggtatgactatctatcctcaactatggcctggcaattaaagtaattttgatttctgtagctggcccatcccctttcttccaaacattcgaagatatatatttctctttttaaaatatttttcaaagtaatcttgacaatctcaaaatgttgatcaatttttacttttggcagaaaagacgaaatatataataagaagactctatgc

SEQ ID NO: 74961 - DNA, 739 bp, Homo sapiens
tccagctaaggttaaaaagtgtgcagttgacagttggatgttttcttcattttattttgttttaatgtccaaatgttcacctatagggagggatagatacagaataattctttgggaaaatctcagaagaaaatcccttgggaaaatatgcaaaccaactgtgatggctaatactgtcaacttgattgcattgaaggatgcaaagtattgttcctgggtgtgtctgtgagggggttgccaaaggagattaacatttgagtcagtggattgggagaggcagacccaccctcagtctaggtgggcaccatctaatctgctgtcagygtggctagaataaaagcaggcagaagaaggtggaagaactagactggctgagtcttctggcctgcatctttctcctgtgctagatgctttctgccttcaaacatcagactccaagttctgcagcttttgggcttttggacttacaccagtgatttgccagggactctcaggccgtcagccacagacgaaaggctacactatcagcttccctacttttgaggtttgtggactcagaatggctttctggctcctcagcttccaaacggcctattgtgggactgcaccttgtgattgtgtgaatcaaatctcctaataaactcccctttatatatacatgtatcctactagttctgtccctttagagaaacctgacaaatacaccacccatcctcaatactcacatgtatatagagat

SEQ ID NO: 74962 - DNA, 627 bp, Homo sapiens
cggattccgagggtatctggcgccagggagcctgagcccaattcccagggtgctggaggccgctcttgcctcccccatcggtgcccatggaccgcattcacctcaactccctcttcatcarttaggcttctctttactccctccccggccaaggagcctcgatttcccccaccaccctgtattttaaaataacagtccaaacagtacacttctttccatcttaagaagcaactcaactctttgtttcttcccagaattcagctgcctctctgaggagtggtggaggagctgcgggagccgagaagcccaagagccctctggacccagaaaagtcctacagatgcccactcctcaccacacaacagaaggagctctggtcctgcctgccagccccagagggcactcaaactttggaggccagccacccggatgaagtgaataaggcctgaaaattgcttgtttgctcgtattgtaaaataataataattaccattattatttttaaactgtctaatttctctagggaaagtaacatcgaaagcctaaaacagacgccaaaaggcccatagaacacagagggccctctctgcctctggccaccacagcccctaggccaggcatgggtat

SEQ ID NO: 74963 - DNA, 627 bp, Homo sapiens
cggattccgagggtatctggcgccagggagcctgagcccaattcccagggtgctggaggccgctcttgcctcccccatcggtgcccatggaccgcattcacctcaactccctcttcatcaattaggcttctctttactccctccccggccaaggagcctcgatttcccccaccaccctgtattttaaaataacagtccaaacagtacacttctttccatcttaagaagcaactcaactctttgtttcttcccagaattcagctgcctctctgaggagtggtggaggagctgcgggagccgagaagcccaagagccctctggacccagaaaagtcctacagwtgcccactcctcaccacacaacagaaggagctctggtcctgcctgccagccccagagggcactcaaactttggaggccagccacccggatgaagtgaataaggcctgaaaattgcttgtttgctcgtattgtaaaataataataattaccattattatttttaaactgtctaatttctctagggaaagtaacatcgaaagcctaaaacagacgccaaaaggcccatagaacacagagggccctctctgcctctggccaccacagcccctaggccaggcatgggtat

SEQ ID NO: 74964 - DNA, 634 bp, Homo sapiens
agatgcttgaaacaggaaaggcagggagtgggggggggtgtaccctgtgtttaagcatttcttaactccacttggctcctaaatactcagaactatcaaatgtggactcttcgtggtatcatcttgccaaagcacatggcaccagctcctttgacgcgtgtgcrtcctgcccttgccttgcaagctaaggatgtgtgtttctgcagctgtgtttattccccttatcttcctttatctttcacaaggtaccagtaaaaacccttccattctttccttatccatctgacttatatgccttttttattcccagtacccaattgcctcattatctagggggcaggaggatgtagttattaagaatcagaatcagacaaacctgaattttagtcctaactctgccacttgactgctgtgtgactttgatcaagttacttaacctctctgagtctgtttccttatctgcaaaaatggacataataatgggatctatttcattggaccaatgtaaagtattttatgagattatttaataatctgtctatatacctgatcatagtaaaggctcaataaatgatagctatgttaacaaagctgttaattgaaactcagagaagagagatatcagtgtgaatat

SEQ ID NO: 74965 - DNA, 634 bp, Homo sapiens
agatgcttgaaacaggaaaggcagggagtgggggggggtgtaccctgtgtttaagcatttcttaactccacttggctcctaaatactcagaactatcaaatgtggactcttcgtggtatcatcttgccaaagcacatggcaccagctcctttgacgcgtgtgcgtcctgcccttgccttgcaagctaaggatgtgtgtttctgcagctgtgtttattccccttatcttcctttatctttcacaaggtaccagtaaaaacccttccattctttccttatccrtctgacttatatgccttttttattcccagtacccaattgcctcattatctagggggcaggaggatgtagttattaagaatcagaatcagacaaacctgaattttagtcctaactctgccacttgactgctgtgtgactttgatcaagttacttaacctctctgagtctgtttccttatctgcaaaaatggacataataatgggatctatttcattggaccaatgtaaagtattttatgagattatttaataatctgtctatatacctgatcatagtaaaggctcaataaatgatagctatgttaacaaagctgttaattgaaactcagagaagagagatatcagtgtgaatat

SEQ ID NO: 74966 - DNA, 1453 bp, Homo sapiens
attcccaggcgctgggcactggggagtggagcagaagcagagggaccttgggttccggggcccagcggccttccacgctggtctgggaaccaagcaagccctagggcagtgcgaggactgggaagggaccctgggggaccgctagaggaggtggcgcgtggagggcgcctgcaccctggggtcgctcagagcggagagtctcgggtggataggtcagcttgcagatcctctaggtctcttctctgctctctggccgctctgattgcgggatctgggacttggcgcccgtacaggccgggtcacctgtgcagaacaaatttgctgccatcatccccgcttcaatcctggccccggcgatctaaaatatcgccttcaggtggggcagggagaaaaratgtctttggggtttaaatagtgttctccttgtacccggaccaactggcatttatttacaaatgtcacccgccaccccagcactgggaaagtctcaaccacatctggagaacgcccgagagacctcccactctctccttgttttgggttacagggaaagccaacgggtctgcaggcctccgggagacgaggatccggaggtttggggcagctgcacccacttggccttgctcagctctaaacagccgaccaggaggccgggggaaggtttgccctgtggggcaacgcccttccggctcccaggatgtcgggaggcggaggctggccgggtggcccgtagtctgggcctccccgcaagctgcaaactgaggcgcttggcgcgggcggccagggagggcgcaggggagcgcagcacgcaggcggggaggccgcgaagcccttcaaggaccccgattactttcctttgaaaaacaacaacaacaactgctccctccccgcacccccgccccccgccttagcctccggggactggcgctccaagcaattgtcgccccggacagtaaacacagctcagttgcctcaactttctccatgcataaaagttcctggcgtgcggggaaatttgaatatttgatcagcccctttgagtgaccctcattagtccggcgccctgctaaggccgggcattgcaagaaagctgctgggctcggcatttgtacgccttgttagcgcagcttaatgaagccgccccgacggctcaaaggcggcctcaggggccggcgacgcgcacctctcggcaccctgctctgcctaatgagccccgccgccctctaaaggaccctccaccccccacattctgaaacaggggaagtttggctctgtcttgaaccacggcacctcccactgccaggcccaggagggtgggcacaaacccagcctagctgcctgcagttacccattcccaagagagaggggctggagagttgggaggtgtgagccatactggttgggggcagtgcagggaggggagcgggtggcaggagaggcttttgctgtctca

SEQ ID NO: 74967 - DNA, 647 bp, Homo sapiens
atgtggattgatactttcagttgcgtagttagttcatagaatgtaacaggatcagggacccaggaaccttctcagaagcctgtcactcatgccctgggagatctccttttttgtttaaaaactcttgaawcctgtttgccttccccttcttctcatttcagagagggtcagcaggccagggctgggggaccaaggcagccaggggtacgccacccagatccaggcaacatggctctacatgtctgcaactaaaaactttgaggaccgactctctctctctctttctctctctctctctctctgtctctctctcctctcttcctctccctctctccctccctctccccaccccctcctccttggcttcacaggacccagtaactgaacctgaagacccaccttcctaggacccttgccttagaaatctcttttttcatgaattggatctcactttaattctccccattcactctctgagctgagcttattggtcagggaatctaagacctaggcagggggcctgattatgcctcagacagtgacaggatctatgaaagcaacagacacaattcctagtggggcatgggcttggtcaaactactggtgcagggacagtgaacaagactggcccgtggctggggagcaag

SEQ ID NO: 74968 - DNA, 669 bp, Homo sapiens
cccagagcaaatcccagaggtcctgatttgcagcccagtctttggatttaccacaaacaaacaaacaaaatacagtatctaattgaaaataaaaggtctggttgtagaaatattttagaataggcatccatcattttgcatgtcacaactatgtcaagaagtcccaagagaaattatttctgtgaaaatattttcttttctttgttaaaaattgtgttaccatctccatcaaaaaataagaaaaatgtgattagaagtttctcttgtatataactggcatcccaaccatatccatttttggcagagccatattttraggactttatcatcttcaactcaagagcctgaagaaactaagattactacagtgggtatcagcagttttggatgtgtaggaaaaacaaactgcattgcatacctaaagacagaatgccaagcaacaagaagcatatttttaagtaacaaaactagaactaaaaccgacaaaaaaggctatttagctttgcaaaagccattattttctttacatctattctagagagtaattaaattctaagcagcattagagttctttctcacatcattgataaaaagacttgggaaaagtcctatcatgtgatctacttctaagtgaggaaataaaaggaaattgtaaaatgagagtctcac

SEQ ID NO: 74969 - DNA, 725 bp, Homo sapiens
agaagaaaaatactatgcccaagttgttactttcaataagcacactgtttaaaaaacatcttcattttgctttgcaaaacttcagtttgtatttaaggtatttctatttgaaggaagaattaccrtattaacatgtacttatttgagcctaaaactcccttgagtattgtctatccctctaccctccacatcttggtaaagccattgcctggactgtgcaatggacaccaagaggattgattgccgtagatgttgcctactcccttctctttctacccttacccccaagccctccctcacccccacccactgctgccagattttttttttttttttttgagatggagttttgccattgcccaggatgaagtgcagtggcaccatctcggctcactgcaacctttgtctcccaggttcaagcgattctcctgcctcaccctcccgaatagctgggattacaggcccgctaccaaaattaccaattacctggctaattttgtatttttagtggggatggggtttcaccattttgaccaggccggtctcaaactcctgatctcaaataatccaactgcctcagcctcccaaagtgctgggatcacaggcatttgccactgcacttggccaatcttgaacccagttcaaaccttctcattgctgtggagttttaagactcctgattcttttacctcccctgctgacacacacacatacacacacactgc

SEQ ID NO: 74970 - DNA, 700 bp, Homo sapiens
cagcttcaataaatcctcacaacaacccagatgagagttccattattgtccccattttaactgaagagtaaattgagactcagagagaaaagtaatttgctcatggtcacatagcttctagtgcctggcatgtatgaggcctgcaatgagtgatgattaatattattttatagtgggaggcacagttgggatttcagtccaggtctaacactcaatgaagcctttacacgtggcctctatgtagtcctgcctcatagaattcatattgtgcatgaaaaggaggcatgccatggccaagtgctgccagcgggaatccctgtcctaagggaggcatattgtgtatgtcacactttcagtagctccctgtcagttgacagcgtgtggcacgtaaagcagaatgattgagataggagtctccaaactcaggtaggrtgcgtgaagtttccagaagttcatgaatacattcagtgttagtgcaaactatggctaggttcatagcttgcagatgtcatccttcctaaaactgatgtgcccgagaatgctctgcaggcaaggctccatgccagctccacgtttctgcaccccaggtttctgccagaccagatactcacctcatctgggcctgtcctctgcgcaaaagtaagagacacccgctctgaagagtgcaccccatgggcacagggctcgatgagatgccaat

SEQ ID NO: 74971 - DNA, 565 bp, Homo sapiens
cagaaaaggcagtgtgacagaggtaagcacaataggctacagaaggccagaggggcatctcatcagcctacggaagggggcaaggaaacattagggaaaacatctagtaaaacaaaatctagggcaatgcttaagttgtgctacatttatttaytcaatatttgggggacacctattgtttgtctgccattattctagacaatggagacacagtattgaacaaaacaaagtccctaatctcacaaaggttacattcatgtagaaacagacaacacacaagaaaaaaaatagtccaggcacagcggctcatgcctgtaatcccagcactttggaaagccgaggcaggtggatcacttgaggttaggagtttgagatcagtctggccaacatggcaaaacccagtctctattaaagaatataaaaattagctgggcgcaggggctcacacctataatcccagctacttaggtggctgaggtatgagaatcatttggaccagagaggtggaggttgcagtgggctaagatcataccactgcaatccagcctgggcgacagagggagat

SEQ ID NO: 74972 - DNA, 565 bp, Homo sapiens
cagaaaaggcagtgtgacagaggtaagcacaataggctacagaaggccagaggggcatctcatcagcctacggaagggggcaaggaaacattagggaaaacatctagtaaaacaaaatctagggcaatgcttaagttgtgctacatttatttattcaatatttgggggacacctattgtttgtctgccattattctagacaatggagacacagkattgaacaaaacaaagtccctaatctcacaaaggttacattcatgtagaaacagacaacacacaagaaaaaaaatagtccaggcacagcggctcatgcctgtaatcccagcactttggaaagccgaggcaggtggatcacttgaggttaggagtttgagatcagtctggccaacatggcaaaacccagtctctattaaagaatataaaaattagctgggcgcaggggctcacacctataatcccagctacttaggtggctgaggtatgagaatcatttggaccagagaggtggaggttgcagtgggctaagatcataccactgcaatccagcctgggcgacagagggagat

SEQ ID NO: 74973 - DNA, 565 bp, Homo sapiens
cagaaaaggcagtgtgacagaggtaagcacaataggctacagaaggccagaggggcatctcatcagcctacggaagggggcaaggaaacattagggaaaacatctagtaaaacaaaatctagggcaatgcttaagttgtgctacatttatttattcaatatttgggggacacctattgtttgtctgccattattctagacaatggagacacagtattgaacaaaacaaagtccctaatctcacaaaggttacattcatgtagaaacagacaacacacaagaaaaaaaatagtccaggcacagcggctcatgcctgtaatcccagcactttggaaagccgaggcaggtggatcacttgaggttaggagttygagatcagtctggccaacatggcaaaacccagtctctattaaagaatataaaaattagctgggcgcaggggctcacacctataatcccagctacttaggtggctgaggtatgagaatcatttggaccagagaggtggaggttgcagtgggctaagatcataccactgcaatccagcctgggcgacagagggagat

SEQ ID NO: 74974 - DNA, 565 bp, Homo sapiens
cagaaaaggcagtgtgacagaggtaagcacaataggctacagaaggccagaggggcatctcatcagcctacggaagggggcaaggaaacattagggaaaacatctagtaaaacaaaatctagggcaatgcttaagttgtgctacatttatttattcaatatttgggggacacctattgtttgtctgccattattctagacaatggagacacagtattgaacaaaacaaagtccctaatctcacaaaggttacattcatgtagaaacagacaacacacaagaaaaaaaatagtccaggcacagcggctcatgcctgtaatcccagcactttggaaagccgaggcaggtggatcacttgaggttaggagtttgagatcagtctggccaacatggcaaaacccagtctctattaaagaatataaaaattagctgggcgcaggggctcacacctataatcccagctacttaggtggctgaggtatgagaatcatttggaccagagaggtggaggttgcagtgggctaagatcataccactgcaatccagcctgggcracagagggagat

SEQ ID NO: 74975 - DNA, 613 bp, Homo sapiens
aaaaccttattataaagcaccaagctttataatagctgtattgaagggcaaatcctctttctgtgaacacagacactcttttcttgcttggtctttgtgctttttaaatagcttccttacaaagaaagaaagactaaaggraagagcagggaaagaaagctaaagaagcagagtattttagactggagagttaccgataatctacaaagaaatccagggcacaagcctgtgagtttggacaaattacttactctgggtttttcacacaggaatgaggacacttgattcagtgttttctgatctttaaagggaggtgaatttttacactgtactgtcaactctcatctctttgctgtgcaagtatgattgtgccttgatccctctcctcctgccttctctcctctcttatttcttgtgtctaaagggggagattaggggtagtttatcaatctgcaggaagcaaatggttaaagagaaacaacaggcttggcgatttaccaatgataagaccctgagttagtgtcctccttaagcctcaatttacttatcggtaagatagggttaaaaatacctatttggaaaggttgtttttgtaagtattgaacaaaataat

SEQ ID NO: 74976 - DNA, 656 bp, Homo sapiens
cccatttttgcttcacttcccgtttctttctaaactgcattaagagccagctcctccttctcatactttcttcccgcagtagtggtaacatgggcagagaagaaaggggggtgaaagggaaaacatcatttctcttaaccctcctcttcagcccagaggagggttaagaagataactgacacttgttccccctcacctccctccctgtttatacccagatggagagagagggagaagatgagcaattgatgtgtgaccgacggaggtgggttccatcaattctgtgtccccaggtcccccagcaaggtggggatttgccttcagctccatggagcagggctctagggcctcagtagtgcccaacagcacagccaagtcaccaaggggaccaagcccatgggcacctcccctctggtgggcatttcagataattttcttcaggagccttgaacaaaagggaaatcacaactgaataaatgaaggtaccaaaatttacatcaatcagtgttatatgatgtatgttggacagtaakatatatgtttcaaagtaataattttgtatatattttaaataaagtattattgctctttcggtgtataagcctaagttcttgccaaaatttgcaccaagaccatacatattaagcccaggatcc

SEQ ID NO: 74977 - DNA, 518 bp, Homo sapiens
cgctgccgccttgcagtttgatctcagactgctgtgctagcaatcagcgagactccgtgggcgtaggaccgtctgagccatgtgtgggatataatctcctggtgcgccgttttttaagcccgtcggaaaagcacagtattagggtgggagtgacccaattttccaggtgccatctgtcacccctttctttgactaggaaagggaactccctgaccccttgcacttcccaagtgaggcagtgcctcgccctgcttcggctcgcgcacggtgcgcrcacccactgtcctgcgcccactgtctggcactccctagtgagatgaaccgggtacctcagatggaaatgcagaaatcacccatcttctgcgtcgctcacgctgggagctgtagactggagctgttcctattcggccatcttggctcctccccccagtttcatttcttagagtgaagagtgtaaggaatgcattcaattttatcattttaaatttttttaaatttatttttattttattttattt

SEQ ID NO: 74978 - DNA, 518 bp, Homo sapiens
cgctgccgccttgcagtttgatctcagactgctgtgctagcaatcagcgagactccgtgggcgtaggaccgtctgagccatgtgtgggatataatctcctggtgcgccgttttttaagcccgtcggaaaagcacagtattagggtgggagtgacccaattttccaggtgccatctgtcacccctttctttgactaggaaagggaactccctgaccccttgcacttcccaagtgaggcagtgcctcgccctgcttcggctcgcgcacggtgcgcacacccactgtcctgcgcccactgtctggcactccctagtgagatgaaccgggtacctcagatggaaatgcagaaatcacccatcttctgcgtcgctcacgctgggagctgtagactggagctgttcctattcggccatcttggctcctccccccagtttcatttcttagagtgaagagtgtaaggaatgcattcaattttatcwttttaaatttttttaaatttatttttattttattttattt

SEQ ID NO: 74979 - DNA, 1374 bp, Homo sapiens
accatcccttgtcactaccataaggtggcagtgtgttttctggctcctgaaaaaactaacactgattccatagcatatccgagtggctgatggaaactgctgaaaaggccaatacccacgtggaaggctctgacatctcagatactagcacagtgaccccagggtctctgtgggagttcatccacgcttttgtcatttcaaatccttaacgaaaatcatagaccgaaaaaatcttatcctgtaaatggagctgagggatcacccaacccctctcatttttaaagataagaaaagtgaggcctagaatggttgggctatgtgttagctgcccagaatggagaagctgctggccccaactaagccaggcactatgcattaacagtccatgatacataaggccatctactaactcatgcacataaggaaggcagagttttttgtttttttgagacagggtctagctctgtctccaggctggaatgcaatggtgcaatcactgctcactgaagcttcaaactcctgggctcaagcaatcttcctgcttcagccttctgagtagctgggaccacaggcgtgaaccaccacacccagctaatttcttcttaatttttagtaaagacaagatcttactgtgttgcccaagctggcctcaaactcctgggctcaagcaatatgcccacctcagcttcccaaaatgctgggattacaggcatgaacccccatgtccagccaaggaaggcagagtttaaaaccataccatgtatcaacaaaatcaagaagcctccctttgaatctgtttatctagctatctattcaattcagttgtcagtaactaaaatgcactgtaaattttaccaataaacatgtggcatctcccacaagtgaatacgaggctgactacaaaggaaattgaaaaataacttcatggctgggcgcagtggctcacccctgtaatcccagcactttgggaggccgaggcgagcagaccacctgaggtcaggagttctagaccagcctggccaacatggcaaaaccccgtctctactaaaaatacaaaaattacctgggtgtggtggcrtgcacctgtagtcccagttacttgggaggctgaggcaggagaattgcttgaacccaggaggtggaggttgcagtgagctgagatcacaccactgtactccagcctgggtgacagagcgagactccgtctcaaaaaaaatagtcattaaaaaaaaaaaaaagaaagaaaattaacttcatttactcacaaagcatattactagttccaaactatactccaaattattaaagaatgggaatgagaacaaatgccctccaagaccccttcaaggggtctgcagatggtggagacagaga

SEQ ID NO: 74980 - DNA, 600 bp, Homo sapiens
gggatcctggctttaggcrtgagtatctttctttctttgcatcttcctacaatttacagtttttgtataaatacaatgacttatttatttatttattttttttttttttgagatggagtctcttgctttgttgcccaggctgcagtgcagtggcacggtctcggctcactgcaacctctgcctcccaggttcaagtgcttctcctgtctcagcctcctgagtagctgtgattacaggcagccgccatcatgcctggctaattttttgtatttttagtaaagatggggtttcactgtgttggccaggctggtctcgaactcctgacctcaggtgatctgcccacctcggccttccaaagtgctgggattacaggtgtgagccaccatgcctggcctacaatgatgtttttcaagtttctattttgccattttaatatagaacttttatagaaaaaaaaatgtttctctgagaagcagtttctcaattaacctggataaacatatctactaagaccatgaagccatagacagatagcaatgtccatcacaggggaaaactgaacacagtggcgtgctgtataatgacatttccattaacaac

SEQ ID NO: 74981 - DNA, 600 bp, Homo sapiens
gggatcctggctttaggcgtgagtatctttctttctttgcatcttcctacaatttacagtttttgtataaatacaatgacttatttatttatttwttttttttttttttgagatggagtctcttgctttgttgcccaggctgcagtgcagtggcacggtctcggctcactgcaacctctgcctcccaggttcaagtgcttctcctgtctcagcctcctgagtagctgtgattacaggcagccgccatcatgcctggctaattttttgtatttttagtaaagatggggtttcactgtgttggccaggctggtctcgaactcctgacctcaggtgatctgcccacctcggccttccaaagtgctgggattacaggtgtgagccaccatgcctggcctacaatgatgtttttcaagtttctattttgccattttaatatagaacttttatagaaaaaaaaatgtttctctgagaagcagtttctcaattaacctggataaacatatctactaagaccatgaagccatagacagatagcaatgtccatcacaggggaaaactgaacacagtggcgtgctgtataatgacatttccattaacaac

SEQ ID NO: 74982 - DNA, 600 bp, Homo sapiens
gggatcctggctttaggcgtgagtatctttctttctttgcatcttcctacaatttacagtttttgtataaatacaatgacttatttatttatttatttwttttttttttgagatggagtctcttgctttgttgcccaggctgcagtgcagtggcacggtctcggctcactgcaacctctgcctcccaggttcaagtgcttctcctgtctcagcctcctgagtagctgtgattacaggcagccgccatcatgcctggctaattttttgtatttttagtaaagatggggtttcactgtgttggccaggctggtctcgaactcctgacctcaggtgatctgcccacctcggccttccaaagtgctgggattacaggtgtgagccaccatgcctggcctacaatgatgtttttcaagtttctattttgccattttaatatagaacttttatagaaaaaaaaatgtttctctgagaagcagtttctcaattaacctggataaacatatctactaagaccatgaagccatagacagatagcaatgtccatcacaggggaaaactgaacacagtggcgtgctgtataatgacatttccattaacaac

SEQ ID NO: 74983 - DNA, 600 bp, Homo sapiens
gggatcctggctttaggcgtgagtatctttctttctttgcatcttcctacaatttacagtttttgtataaatacaatgacttatttatttatttatttttttwttttttgagatggagtctcttgctttgttgcccaggctgcagtgcagtggcacggtctcggctcactgcaacctctgcctcccaggttcaagtgcttctcctgtctcagcctcctgagtagctgtgattacaggcagccgccatcatgcctggctaattttttgtatttttagtaaagatggggtttcactgtgttggccaggctggtctcgaactcctgacctcaggtgatctgcccacctcggccttccaaagtgctgggattacaggtgtgagccaccatgcctggcctacaatgatgtttttcaagtttctattttgccattttaatatagaacttttatagaaaaaaaaatgtttctctgagaagcagtttctcaattaacctggataaacatatctactaagaccatgaagccatagacagatagcaatgtccatcacaggggaaaactgaacacagtggcgtgctgtataatgacatttccattaacaac

SEQ ID NO: 74984 - DNA, 587 bp, Homo sapiens
aattcacttttcatgaggcacttaaagtcatttggggtagcaccaaattaagttgttactctacattcatttagtaggtatttatttttttaaataaagaaaaacgagtcaggtttgctacagagatgagttgtaaagtctgagccaaattattcggcagtatccaaacacctggctgccacaaatgactactttaatgtatttctaatgagggctggattcagaccaagaygaagacacttaacccattaagtaaaatttcttcaagttttcttaaaagatcacaaatttgtaatattagcatgaaggaataagccaaataacttcattttttttttcctaacagaaatgttagctgcatatcagacccagaaaatacagcaagttttttggctgggcgcagcggctcaggtctgtaatcccagcactttgggaggccaagacaggaggattgcttgaggccaggagtttgagaacagcctgggcaacacagggagacccctatctctacaaaaaaaattttttaaattatctgggtgtggtagtgcgagcctgtggtcccagctacttgagaggctgaggtggga

SEQ ID NO: 74985 - DNA, 1465 bp, Homo sapiens
taacctctgctgctcagtgttaatattgctcaaatcccagacctcaggcaagactctgagggacaagaaaacccaagggacaagagaaaagggaaggataagggccctgcaccaacagagggaataggggctagttttgggaagtgggccaggcctggcttaaggtgaacctcaccatcatttgcaggctacaggcatttgtactagcctaagagaggtgcaaagggggaagaaatcaaagagcaaaacccatcatcatggtcggggtttgaccagcaagaataagcccctgggaaaatgaacactaaatgcccccaccctgctccccgcatttctctttggaattatggcggtatacctggggcttctggcagaactgatgcactttgtggctggagttctgaagctgaaagtacaagacaacaaagacactctactccaaacccacctcactcccccagcaaggcctgctgtgttgaaagtctctttgcggaataattccctgttggaaacattcatttcttcaagaaaatacatttatcaaattctcacctacacctgcttaaaacacaaggcctctgaaggattttactctgagtgaccattagaaatggtgttcacactgtgaatgagtttcggttctctgataggcagtgtcttcatcccatcgagatgctataataaaataccgtaaactgggcagcttataaacaacaaaaatttatttcttacagttctggaagctgaagtccaagatcaaggtgctggcagattcagcgtctgttgaggactcattttttggttcatagatggtgccttcttgctgtgttctcagaaaatggcgggggtgagctaagctctctgaggtctctttcctaagggcaccaatcccattcatgagagctttgtgcatatgacctaatcacctcccaaagtccccacctcctaaagcaatcgccttggaagctaggtttcaacataggaatactgagaggacataaacattcagataacagcaggcagagagctgggggtatgtggtagtggagtggtggactgggagctcagacaggataaaggccttgacactgcccataggcaaaattcccyggacttcataaggatctccagaaggcatttaaagaccactttcaactctaaatttccagaggctgtgatgagtgtctcttagaatctggattccaacccagagagccctggtttgaaagtatatgttcttccagctttacttcattctgcaattctctttcacatgctcctccaggatggctcctgggacagctgcattccctggttatcttaggagatgggtgttcccattgtctgtacttagaagatggattgaaatcaccaagtctgcagaaatgaagagaggaaatcaagcctgttggtgcacagatctttgcccttctaacccagtttgtgctcatctttcctagaggaa

SEQ ID NO: 74986 - DNA, 717 bp, Homo sapiens
agtttgtggtattatattacatttgccgaatttttgacattttaaagtctggaggttaaattcaagtgatttacattgacaaactgatacattttatgaccttcagtttcttcatcttcaaaagagtcatattgggctaagattcttttaattctataagtcttggtttattacttttaggttacagtcattctctactctgaaattccattagttaacctggagtataatagagactaaatacattctgggtattatttacttcaaatatcaattgctgatattattagcttaagtatgagagacaaggtatttatgaaaaatgaggctggctttattaatttttttagcatacccagttaatgatgaatatattgctagctaacacagakatttcaaaaaaattataacatattgatagaaaaccaaaggaactcacccaggcagaatgagcttgtgtagagtaaatatttagtattcagtaaacactggatcacaccataaaatagatgatatagaccagtgctcatcaattgttttaagggtctctgtggtttctggttggtaaagatatacttttgtctcaaagcacagttcaaaacccgtgcattcatacatcattacagagcccagcaatgcattttctatagtcagattatcacatggtaatgaggaccactatataaacatgttcagtattttctttactgtgttagt

SEQ ID NO: 74987 - DNA, 1913 bp, Homo sapiens
gggatccttggaaggcatagatgcttcaaaaattattttgaaatgtgaaacttaggggactatttgttcttctagatattaagatgtattttaaatctctaataattaaacagaaagtagtaggcttgcaaagcaagtcagtcacatataaaaaaatagctctgacatagattctagtatattttatgtataaaaatatgttttaagtatattaatatataattgtattatatgttaattatgtatgttatataattatatatgttataggctaataaagttatatattatgtaactagtatataattttatgttttaaaattatgttttataaaataatattttatgcatattttatatagcttagtacatgataaagcattgcaaactattggggaaacattattctacacacatggggaaaatagtcataataaagaagccatggaagttcttggtataagaactgagttactatattgccactgtaggaatcattcagttgtaagaaaaagtattcaacctaaattctctatttttctaatttaaaaactgaaattccaaaaaacatacatttttattgtratcatttagacagtttaattgtatatcttatgcttgcttgatagtgacttgagtaggatatttttacttttaatttgctaagtttttttgttacatcaaggaaaaaggaaaggacaaaatgaactgataattactcaaaaccttggctttactaatgatattaaaccttttagatgaagtagatggaggagatacacaaaagaagcaactcataaatcctcatgtggaacttcgtaagtatgagatattatatcattggtttggggagagggactacagttgagccatctctattatttgagaattctagcttcatactaaataaatgtcccagttcttgaaatgaatattaagtctttatgctgacatgaggtatatttaatcaacagtttataaaatataaatttaatttataaagaaatttaatcaaaagtataatttatttgtaaattatgctcttatttctaatagttaaacatttacttattatgtaatctagagccacagaattttgacagttgcatttagaattgtgtatatgtgtgccagaaacgtattatccagaataatatgtacagtacattttaagatatttattaagaattactataaaagtacaatgatgttaatatggtaggtaacaagtgtaaaattagaactgagtcttttttttatgtgatttttatttttttctctttttttggaaagtatgtaaggatggtcatacgatgttctttaattccccctgaagatcagtttaacaaaattgtgataaatagggatttggatctaacatgcaaaatgccatcatgaagaaacttaagtggttgcatttggccagggtagggagtgagggagcggaggaggaaagatattttctgagtcataaagctttttaaaaaaacttctgttgtttatagaattttcagatgctaatgccaagttttactgtcggctctactatgcgggagagtttcataagatgcgtgaagtgattctggacagcagtgaagaagatttcattcgttccctctcccactcatcaccctggcaggcccggggaggcaaatcaggagctgccttctatgcaactgagggtgagcctttctcatcgtttattgattggttcagtagtcttcatctctttacctcagaaaatgcagcaggaaggatattgcttaataagaactttcataactatgacttactagttttaacagaggtgtttataaagttttatttagtagttttaaaaagtagatcttctagaactgaacttagatgtgttattgacaaaagtagagggtttttgactatataaatccaca

SEQ ID NO: 74988 - DNA, 1913 bp, Homo sapiens
gggatccttggaaggcatagatgcttcaaaaattattttgaaatgtgaaacttaggggactatttgttcttctagatattaagatgtattttaaatctctaataattaaacagaaagtagtaggcttgcaaagcaagtcagtcacatataaaaaaatagctctgacatagattctagtatattttatgtataaaaatatgttttaagtatattaatatataattgtattatatgttaattatgtatgttatataattatatatgttataggctaataaagttatatattatgtaactagtatataattttatgttttaaaattatgttttataaaataatattttatgcatattttatatagcttagtacatgataaagcattgcaaactattggggaaacattattctacacacatggggaaaatagtcataataaagaagccatggaagttcttggtataagaactgagttactatattgccactgtaggaatcattcagttgtaagaaaaagtattcaacctaaattctctatttttctaatttaaaaactgaaattccaaaaaacatacatttttattgtgatcatttagacagtttaattgtatatcttatgcttgcttgatagtgacttgagtaggatatttttacttttaatttgctaagtttttttgttacatcaaggaaaaaggaaaggacaaaatgaactgataattactcaaaaccttggctttactaatgatattaaaccttttagatgaagtagatggaggagatacacaaaagaagcaactcataaatcctcatgtggaacttcgtaagtatgagatattatatcattggtttggggagagggactacagttgagccatctctattatttgagaattctagcttcatactaaataaatgtcccagttcttgaaatgaatattaagtctttatgctgacatgaggtatatttaatcaacagtttataaaatataaatttaatttataaagaaatttaatcaaaagtataatttatttgtaaattatgctcttatttctaatagttaaacatttacttattatgtaatctagagccacagaattttgacagttgcatttagaattgtgtatatgtgtgccagaaacgtattatccagaataatatgtacagtacattttaagatatttattaagaattactataaaagtacaatgatgttaatatggtaggtaacaagtgtaaaattagaactgagtcttttttttatgtgatttttatttttttctctttttttggaaagtatgtaaggatggtcatacgatgttctttaattccccctgaagatcagtttaacaaaattgtgataaatagggatttggatctaacatgcaaaatgccatcatgaagaaacttaagtggttgcatttggccagggtagggagtgagggagcggaggaggaaagatrttttctgagtcataaagctttttaaaaaaacttctgttgtttatagaattttcagatgctaatgccaagttttactgtcggctctactatgcgggagagtttcataagatgcgtgaagtgattctggacagcagtgaagaagatttcattcgttccctctcccactcatcaccctggcaggcccggggaggcaaatcaggagctgccttctatgcaactgagggtgagcctttctcatcgtttattgattggttcagtagtcttcatctctttacctcagaaaatgcagcaggaaggatattgcttaataagaactttcataactatgacttactagttttaacagaggtgtttataaagttttatttagtagttttaaaaagtagatcttctagaactgaacttagatgtgttattgacaaaagtagagggtttttgactatataaatccaca

SEQ ID NO: 74989 - DNA, 1913 bp, Homo sapiens
gggatccttggaaggcatagatgcttcaaaaattattttgaaatgtgaaacttaggggactatttgttcttctagatattaagatgtattttaaatctctaataattaaacagaaagtagtaggcttgcaaagcaagtcagtcacatataaaaaaatagctctgacatagattctagtatattttatgtataaaaatatgttttaagtatattaatatataattgtattatatgttaattatgtatgttatataattatatatgttataggctaataaagttatatattatgtaactagtatataattttatgttttaaaattatgttttataaaataatattttatgcatattttatatagcttagtacatgataaagcattgcaaactattggggaaacattattctacacacatggggaaaatagtcataataaagaagccatggaagttcttggtataagaactgagttactatattgccactgtaggaatcattcagttgtaagaaaaagtattcaacctaaattctctatttttctaatttaaaaactgaaattccaaaaaacatacatttttattgtgatcatttagacagtttaattgtatatcttatgcttgcttgatagtgacttgagtaggatatttttacttttaatttgctaagtttttttgttacatcaaggaaaaaggaaaggacaaaatgaactgataattactcaaaaccttggctttactaatgatattaaaccttttagatgaagtagatggaggagatacacaaaagaagcaactcataaatcctcatgtggaacttcgtaagtatgagatattatatcattggtttggggagagggactacagttgagccatctctattatttgagaattctagcttcatactaaataaatgtcccagttcttgaaatgaatattaagtctttatgctgacatgaggtatatttaatcaacagtttataaaatataaatttaatttataaagaaatttaatcaaaagtataatttatttgtaaattatgctcttatttctaatagttaaacatttacttattatgtaatctagagccacagaattttgacagttgcatttagaattgtgtatatgtgtgccagaaacgtattatccagaataatatgtacagtacattttaagatatttattaagaattactataaaagtacaatgatgttaatatggtaggtaacaagtgtaaaattagaactgagtcttttttttatgtgatttttatttttttctctttttttggaaagtatgtaaggatggtcatacgatgttctttaattccccctgaagatcagtttaacaaaattgtgataaatagggatttggatctaacatgcaaaatgccatcatgaagaaacttaagtggttgcatttggccagggtagggagtgagggagcggaggaggaaagatattttctgagtcataaagctttttaaaaaaacttctgttgtttatagaattttcagatgctaatgccaagttttactgtcggctctactatgcgggagagtttcataagatgcgtgaagtgattctggacagcagtgargaagatttcattcgttccctctcccactcatcaccctggcaggcccggggaggcaaatcaggagctgccttctatgcaactgagggtgagcctttctcatcgtttattgattggttcagtagtcttcatctctttacctcagaaaatgcagcaggaaggatattgcttaataagaactttcataactatgacttactagttttaacagaggtgtttataaagttttatttagtagttttaaaaagtagatcttctagaactgaacttagatgtgttattgacaaaagtagagggtttttgactatataaatccaca

SEQ ID NO: 74990 - DNA, 2357 bp, Homo sapiens
tcatgccaaaagttatcatttgctgtagtattacagacacttttcatgaataaataatctttgttggtattcctctcaaaaggcttatacaaagtctctatcacacactactgaataatcattttactgtcgaacttttgaataattctagaaaaaatttttaaaaagcaagaagaatacacactaatgattaattaatgattgagaataatatatcatctaaaatgttcggaaagatacgaaaaatgacaaaagtcgacatactttaataagcaatgtagcaatggaaagacactgaggaaagtgtgttagtgattgtgtttttggttgccaagaatttgagactattttcctgtaaatggtcaccacggtggatattaatattaaaaaacagtttaagggaaaagagataatgtttaagaaacaatcaataaatggttgtataatatttactgaaaaccaattatgtgctaggccagtgttatacactcacaaaacaatagtaaacaggacagaaagttgtgagaactaaaatctaatcagaacaaactcattcatacaaacaaatttgttttcaggtaatccttacaagaactttttgagatgtatataatgatttccatcaaatgatttagcaaactgaggcttaggaggatgcagttctatgcccgaatacaggcagacatcagagatattgcagatttaattctatgcccgaatacaggcagacatcagagatattgcaggtttaatctcagaccactacaataaagtgaatattgcaatcgggcaagtgacacaatgtttttttgctttccagtgcatatacaagttatgtttacactaggctgtactctattaaatggtgtgcaatagcattatgtctaaaataacaatgtacacaccttaattaaaactattttatggctaaacgatgctgacaccaagacatgaaatgatcacacactataggacagagctgatagatttgcttgccacaagccttaaatttgtaaaacatgtgatatctgtgaagcacaatgtaatgaggtataccctatatctgaacatgaaaagaagtcttgttctaatcaatgttttcaaactaaaatatcaatttatctccaatctaccccatatattagccaatatgttcacaagaaagactcatgcaaagcttgcatatttaaatgaatagctacatatcaatccaaattagagttctgtttctcatattttccttattcaacatgcatcccaagtagaaatgtgcttataaagacttctgcccatgacactgtaaaatatcaagtaaaagggtattcccaattattagcactcacaatgatttctcaattagatattaatacctagcttggaatactgctggtcatctgttgagctaaattacatgaagtactttatccctagattacttacgcaactctgtatttataaaatgaggtttctgtgacaataacctattcaattttagttgtgtttgagtaagcaaaaacaaatatcttcagaactaatcacttataaattatttctattcaggactatccaatagtcaagaggcagaaatctagcccccattgtttgatgtccaacatgtaactgtgaaaatatttttgaacattaaartatcaagaaaacaataaagtaatcacaccaagaaagaaaaaattctggaactgagtcaattcaaaacccatatataccctgggtaaatatatgaaaactcttctgtgtcaataaagtgactgcaaaatagcagataataagatatatatgatttataaaagaaaaaactcagaattatggtgaagggttacaaaaactgaagtgtaatagtgtaaataaaaaagatttacatttaataaaatacaaagtttcagttatatttaaattttaaaaaatcatataatcttattctttaaaaggtaaaatttttatgtatgactattggtgttttaacagctatgacggtgtttttgcgcagcagcaattctcaatccaaatttagagctcagatatttgatttctgttagtgctatttgctaaaaggaagctgagatatttgggggttgtggattctgcatcccggtgaaaaataatagaggctaaaaataggcttagaacatctttatcccacaataaagcaaaacatagtttcaaggatgtaatgaattgctctaaaacaagcaaagaaacggtcttttcctcattagatttaattataatatgtgtttgaaaggttataaatattagatgatacattggttagtcctgctacataccaaacatttctgaagtctcgatgacttataataacattcaatcctcatccatat

SEQ ID NO: 74991 - DNA, 2357 bp, Homo sapiens
tcatgccaaaagttatcatttgctgtagtattacagacacttttcatgaataaataatctttgttggtattcctctcaaaaggcttatacaaagtctctatcacacactactgaataatcattttactgtcgaacttttgaataattctagaaaaaatttttaaaaagcaagaagaatacacactaatgattaattaatgattgagaataatatatcatctaaaatgttcggaaagatacgaaaaatgacaaaagtcgacatactttaataagcaatgtagcaatggaaagacactgaggaaagtgtgttagtgattgtgtttttggttgccaagaatttgagactattttcctgtaaatggtcaccacggtggatattaatattaaaaaacagtttaagggaaaagagataatgtttaagaaacaatcaataaatggttgtataatatttactgaaaaccaattatgtgctaggccagtgttatacactcacaaaacaatagtaaacaggacagaaagttgtgagaactaaaatctaatcagaacaaactcattcatacaaacaaatttgttttcaggtaatccttacaagaactttttgagatgtatataatgatttccatcaaatgatttagcaaactgaggcttaggaggatgcagttctatgcccgaatacaggcagacatcagagatattgcagatttaattctatgcccgaatacaggcagacatcagagatattgcaggtttaatctcagaccactacaataaagtgaatattgcaatcgggcaagtgacacaatgtttttttgctttccagtgcatatacaagttatgtttacactaggctgtactctattaaatggtgtgcaatagcattatgtctaaaataacaatgtacacaccttaattaaaactattttatggctaaacgatgctgacaccaagacatgaaatgatcacacactataggacagagctgatagatttgcttgccacaagccttaaatttgtaaaacatgtgatatctgtgaagcacaatgtaatgaggtataccctatatctgaacatgaaaagaagtcttgttctaatcaatgttttcaaactaaaatatcaatttatctccaatctaccccatatattagccaatatgttcacaagaaagactcatgcaaagcttgcatatttaaatgaatagctacatatcaatccaaattagagttctgtttctcatattttccttattcaacatgcatcccaagtagaaatgtgcttataaagacttctgcccatgacactgtaaaatatcaagtaaaagggtattcccaattattagcactcacaatgatttctcaattagatattaatacctagcttggaatactgctggtcatctgttgagctaaattacatgaagtactttatccctagattacttacgcaactctgtatttataaaatgaggtttctgtgacaataacctattcaattttagttgtgtttgagtaagcaaaaacaaatatcttcagaactaatcacttataaattatttctattcaggactatccaatagtcaagaggcagaaatctagcccccattgtttgatgtccaacatgtaactgtgaaaatatttttgaacattaaaatatcaagaaaacaataaagtaatcacaccaagaaagaaaaaattctggaactgagtcaattcaaaacccatatataccctgggtaaatatatgaaaactcttctgtgtcaataaagtgactgcaaaatagcagataataagatatatatgatttataaaagaaaaaamtcagaattatggtgaagggttacaaaaactgaagtgtaatagtgtaaataaaaaagatttacatttaataaaatacaaagtttcagttatatttaaattttaaaaaatcatataatcttattctttaaaaggtaaaatttttatgtatgactattggtgttttaacagctatgacggtgtttttgcgcagcagcaattctcaatccaaatttagagctcagatatttgatttctgttagtgctatttgctaaaaggaagctgagatatttgggggttgtggattctgcatcccggtgaaaaataatagaggctaaaaataggcttagaacatctttatcccacaataaagcaaaacatagtttcaaggatgtaatgaattgctctaaaacaagcaaagaaacggtcttttcctcattagatttaattataatatgtgtttgaaaggttataaatattagatgatacattggttagtcctgctacataccaaacatttctgaagtctcgatgacttataataacattcaatcctcatccatat

SEQ ID NO: 74992 - DNA, 2357 bp, Homo sapiens
tcatgccaaaagttatcatttgctgtagtattacagacacttttcatgaataaataatctttgttggtattcctctcaaaaggcttatacaaagtctctatcacacactactgaataatcattttactgtcgaacttttgaataattctagaaaaaatttttaaaaagcaagaagaatacacactaatgattaattaatgattgagaataatatatcatctaaaatgttcggaaagatacgaaaaatgacaaaagtcgacatactttaataagcaatgtagcaatggaaagacactgaggaaagtgtgttagtgattgtgtttttggttgccaagaatttgagactattttcctgtaaatggtcaccacggtggatattaatattaaaaaacagtttaagggaaaagagataatgtttaagaaacaatcaataaatggttgtataatatttactgaaaaccaattatgtgctaggccagtgttatacactcacaaaacaatagtaaacaggacagaaagttgtgagaactaaaatctaatcagaacaaactcattcatacaaacaaatttgttttcaggtaatccttacaagaactttttgagatgtatataatgatttccatcaaatgatttagcaaactgaggcttaggaggatgcagttctatgcccgaatacaggcagacatcagagatattgcagatttaattctatgcccgaatacaggcagacatcagagatattgcaggtttaatctcagaccactacaataaagtgaatattgcaatcgggcaagtgacacaatgtttttttgctttccagtgcatatacaagttatgtttacactaggctgtactctattaaatggtgtgcaatagcattatgtctaaaataacaatgtacacaccttaattaaaactattttatggctaaacgatgctgacaccaagacatgaaatgatcacacactataggacagagctgatagatttgcttgccacaagccttaaatttgtaaaacatgtgatatctgtgaagcacaatgtaatgaggtataccctatatctgaacatgaaaagaagtcttgttctaatcaatgttttcaaactaaaatatcaatttatctccaatctaccccatatattagccaatatgttcacaagaaagactcatgcaaagcttgcatatttaaatgaatagctacatatcaatccaaattagagttctgtttctcatattttccttattcaacatgcatcccaagtagaaatgtgcttataaagacttctgcccatgacactgtaaaatatcaagtaaaagggtattcccaattattagcactcacaatgatttctcaattagatattaatacctagcttggaatactgctggtcatctgttgagctaaattacatgaagtactttatccctagattacttacgcaactctgtatttataaaatgaggtttctgtgacaataacctattcaattttagttgtgtttgagtaagcaaaaacaaatatcttcagaactaatcacttataaattatttctattcaggactatccaatagtcaagaggcagaaatctagcccccattgtttgatgtccaacatgtaactgtgaaaatatttttgaacattaaaatatcaagaaaacaataaagtaatcacaccaagaaagaaaaaattctggaactgagtcaattcaaaacccatatataccctgggtaaatatatgaaaactcttctgtgtcaataaagtgactgcaaaatagcagataataagatatatatgatttataaaagaaaaaactcagaattatggtgaagggttacaaaaactgaagtgtaatagtgtaaataaaaaagatttacatttaataaaatacaaagtttcagttatatttaaattttaaaaaatcatataatcttattctttaaaaggtaaaatttttatgtatgactattggtgttttaacagctatracggtgtttttgcgcagcagcaattctcaatccaaatttagagctcagatatttgatttctgttagtgctatttgctaaaaggaagctgagatatttgggggttgtggattctgcatcccggtgaaaaataatagaggctaaaaataggcttagaacatctttatcccacaataaagcaaaacatagtttcaaggatgtaatgaattgctctaaaacaagcaaagaaacggtcttttcctcattagatttaattataatatgtgtttgaaaggttataaatattagatgatacattggttagtcctgctacataccaaacatttctgaagtctcgatgacttataataacattcaatcctcatccatat

SEQ ID NO: 74993 - DNA, 2947 bp, Homo sapiens
atccagttgagaggcccctcctgcagtgctttccacactcatcacatccttcagctggccggatttcctgactgtcctcttaacctaatcaatccatttcctagtgtgcctggagaccatctgctgtagaggggagtgagataacagacataagcactactctcaacgtcttaagagctgctcaggggagatagacatgggtagagaagtttcatgttaaaggaggtgctcctgacctggaatacaacagggctttggggtggggggatgaggattgaagccaggagggcctctctacagggacagctctcctgggctgacactgaggtgcagccctcacaggctccaggcatggtcccacctccctgctttgccacactcactctgccccctgcccattaccaaatatccctcccttttggggcccttagttcaaatgcctgagagagcctcattgagcctgagcctggccccaaatcaagttcagtaataagcccaaggggaccaccctgatgcaatcggctgtgaccagaaggaaggccacggggttcacctaggaccagtagggggtgggtggaggtgtgggcacagcaggcagggacacagaaaatttttgcatgtatctaattatttcttcatttaatatactgtcccatgagaaagtgttgctgaaatttctttcattttgccatttatggtttttgaaaaacataagtttagtaatatggccactatttattggaaataaacatttatactaaattrtttttctgaagtagtaggggaaaatgtattaccttagttaccatgaacttttttttttcttaaaagaatttttttccactttgaaacctttgggggttacttattggcataatttctccattctctctcgaatggtttaaaaatatttatcacttctttcagatgacaaagcatgaaatgcttatttaacctttgatgggaaagagaagaatgtctatagtttcaattagaagctccttagaaaaccagtgcctgtaatacttagcccattgtttacattttgttaaaatttataaacaaaaggtgaattcaaatttggaaaccaaaatcagccaagacctcactgcaccagccacctgtatatttcaaaaaatagcttgacacatctttccatgtttgaataacctgcagaagcccctcaatcatgaccaataatccaacacattttcaacaattctggagtttccagtatcccttcactccacttacaaatgttttgaaaatttgccagcttttcagagatgcatcaatagtgtcatacaaataattgacagtactgagatcacttcagagttctttcatatcccgacacatctcaacaccaataaatccccaagatgtacatgacaatgtgtgtataaagctcttggctcatcttccataaacgttgtggcaacacattaaatcttccacttgtgtcagcagctccagtgtagacacagccatacactttattaaaatcagcttccaaaataattgggtgtgagagcctcccagtgatactatctatacccatgtgatatggtttgaatgtgtgtgccttccaaatctctgttgaaatgtgatccccaatgttggacgtggggcttcatggaggtattgaatcataggggtggatccctcatgaatggctatgttcccccctcttggtaatgggtgagttcttactctgagttctagttgtttaaaagactctaggacctcccctcaccccttactccccctctcaccatgtgacacgcctgctcccactttgacatccaccattagtgaaagctccctgaagcctcaccagaagctgagcagatgctggagccaggctcgcacagcctgcagaactatgagccaaataaacctcttttctttataaattacgcagtctcaggtatttctttatagcaacacaaaaacagactaacacatcatagcacctgtgaagggctgtttaattaagatggccttggacattttctgcagggagcttgcacaggttgagagctgggcaccattataccctcagctgtctcattgtatcttatgagtggtttatggaaacaatgcccatgtatattatttcattaaggtacatggtatgtaccatgtatatgcacatgctatgtgccagacactattactattctaagtgctttacctatatacactcattggatccttccaaaaaactctaaggtaggttttatgacttattctcatttttcagataaagaaagtagcactgaaaggttaagtaactttcctaactttcacaagtttgcacaatttgtagaaaccaacttaaattagttataaagttctcttttttatttcaaactcaaaacacttgccttcatttgcaaattagatcccctatgcccatggcagacacaattttcccagaaataaaatatcttcaacttcaaatacatcctactttcctcattaggttttagttagccaggtaatactttacaaaagacagtgtatgtcaccaaaaagtatacgtttactataaaactacatcaaatataaatgcattttatattttttctcgtgttctgaaaacttccagcaattttttcaagttatgattgttctttcattcctgagctgtgttagcgaacaactagaatgggaacagaattgcatgtcttttataatgctctgttccacccatgaaaaatccaattactcagatatttcaaaaaatgttttcatttgccttgaactttttatactttaaaggtagtctgggggtgagaaggcccattccttcctttccaatttcaaaccatgtgcagaatcttggcttaaaatgtgttactccctctacccacccttatgtcaactctgatttcctcttgatgatgaaatatttgactactcctcactattactattggca

SEQ ID NO: 74994 - DNA, 2947 bp, Homo sapiens
atccagttgagaggcccctcctgcagtgctttccacactcatcacatccttcagctggccggatttcctgactgtcctcttaacctaatcaatccatttcctagtgtgcctggagaccatctgctgtagaggggagtgagataacagacataagcactactctcaacgtcttaagagctgctcaggggagatagacatgggtagagaagtttcatgttaaaggaggtgctcctgacctggaatacaacagggctttggggtggggggatgaggattgaagccaggagggcctctctacagggacagctctcctgggctgacactgaggtgcagccctcacaggctccaggcatggtcccacctccctgctttgccacactcactctgccccctgcccattaccaaatatccctcccttttggggcccttagttcaaatgcctgagagagcctcattgagcctgagcctggccccaaatcaagttcagtaataagcccaaggggaccaccctgatgcaatcggctgtgaccagaaggaaggccacggggttcacctaggaccagtagggggtgggtggaggtgtgggcacagcaggcagggacacagaaaatttttgcatgtatctaattatttcttcatttaatatactgtcccatgagaaagtgttgctgaaatttctttcattttgccatttatggtttttgaaaaacataagtttagtaatatggccactatttattggaaataaacatttatactaaattgtttttctgaagtagtaggggaaaatgtattaccttagttaccatgaacttttttttttcttaaaagaatttttttccactttgaaacctttgggggttacttattggcataatttctccattctctctcgaatggtttaaaaatatttatcacttctttcagatgacaaagcatgaaatgcttatttaacctttgatgggaaagagaagaatgtctatagtttcaattagaagctccttagaaaaccagtgcctgtaatacttagcccattgtttacattttgttaaaatttataaacaaaaggtgaattcaaatttggaaaccaaaatcagccaagacctcactgcaccagccacctgtatatttcaaaaaatagcttgacacatctttccatgtttgaataacctgcagaagcccctcaatcatgaccaataatccaacacattttcaacaattctggagtttccagtatcccttcactccacttacaaatgttttgaaaatttgccagcttttcagagatgcatcaatagtgtcatacaaataattgacagtactgagatcacttcagagttctttcatatcccgacacatctcaacaccaataaatccccaagatgtacatgacaatgtgtgtataaagctcttggctcatcttccataaacgttgtggcaacacattaaatcttccacttgtgtcagcagctccagtgtagacacagccatacactttattaaaatcagcttccaaaataattgggtgtgagagcctcccagtgatactatctatacccatgtgatatggtttgaatgtgtgtgccttccaaatctctgttgaaatgtgatccccaatgttggacgtggggcttcatggaggtattgaatcataggggtggatccctcatgaatggctatgttcccccctcttggtaatgggtgagttcttactctgagttctagttgtttaaaagactctaggacctcccctcaccccttactccccctctcaccatgtgacacgcctgctcccactttgacatccaccattagtgaaagctccctgaagcctcaccagaagctgagcagatgctggagccaggctcgcacagcctgcagaactatgagccaaataaacctcttttctttataaattacgcagtctcaggtatttctttatagcaacacaaaaacagactaacacatcatagcacctgtgaagggctgtttaattaagatggccttggacattttctgcagggagcttgcacaggttgagagctgggcaccattataccctcagctgtctcattgtatcttatgagtggtttatggaaacaatgcccatgtatattatttcattaaggtacatggtatgtaccatgtatatgcacatgctatgtgccagacactattactattctaagtgctttacctatatacactcattggatccttccaaaaaactctaaggtaggttttatgacttattctcatttttcagataaagaaagtagcactgaaaggttaagtaactttcctaactttcacaagtttgcacaatttgtagaaaccaacttaaattagttataaagttctcttttttatttcaaactcaaaacacttgccttcatttgcaaattagatcccctatgcccatggcagacacaattttcccagaaataaaatatcttcaacttcaaatacatcctactttcctcattaggttttagttagccaggtaatactttacaaaagacagtgtatgtcaccaaaaagtataygtttactataaaactacatcaaatataaatgcattttatattttttctcgtgttctgaaaacttccagcaattttttcaagttatgattgttctttcattcctgagctgtgttagcgaacaactagaatgggaacagaattgcatgtcttttataatgctctgttccacccatgaaaaatccaattactcagatatttcaaaaaatgttttcatttgccttgaactttttatactttaaaggtagtctgggggtgagaaggcccattccttcctttccaatttcaaaccatgtgcagaatcttggcttaaaatgtgttactccctctacccacccttatgtcaactctgatttcctcttgatgatgaaatatttgactactcctcactattactattggca

SEQ ID NO: 74995 - DNA, 2179 bp, Homo sapiens
cagctacaggtagagagaatttgttaccttcctctcacctctcacctcccctattctcttcactcccccatcctcaccctcccttaatgacccacatattctgaaatgacaaggtacaaaggcccaagggccactgaggtgacagccatgacttacctcagtgacaaagagtgtgcgagggtcgatgatatccaagaagtgcctgaagcggccatagaaggacgtctgaagaagaggatgagagagaagagtgaatggatcagctgctgcacacccttctccagacactggagagccccaccctttatgattggggtcccccggtccccaggactcctcgtgtgggtgataaatgccaatgaggcctcagaaatctaaggacagctttcctggggctgagagttttccaaagtcaactcagagagaccactgagatactcaaggacaggcccatctgctcttccaggtgacttccattttcccctctctctcccagtgccctgagatctattctgagcctattaaaagctcccaagcatccctggacatgtaggctgaaggtgaggcctggtccccagccctctcccagcctccctgccttgctcaggaccttgagtgacaaagcatcctgcctacccgccacagggtccctccccaaggtccagctctgcctccaggggggatccccaagggcagctcaagcctaaaagcactgagctcacaatcctcaggccctccttcacccacagccctgtagctgctgaagtgcaggacaaggggcagctcccccaaccttgccccagagcaggggccgtggaaaaggagggctttatgctaagcgcasgcacaggcattggagcacaatgaaaggaaaccaagcaacccggctgctgggccttctgccctggggactaagccagctgggcaaagctgagctcaaggggaagacagagggtgccaagctcggggatgaaggggaagctgcaatcgctggggttcatgcctcactacactccgggctctgccccaaattcctccctggagccccacaactctccaagcaccatcctttgcacagtggaggaaacagaagcctccacattccctccccttatttagtaggacaccagaccctgcagccaattcctgttcctttcccttcccaataaggaccctgcaataggctccaggtcacctcaaagtccccccacacaccagttctcatcccacctccatttctctcccaccatggcacccctgcatgaagcaacctctaacccctaatgccacccctacccaggtgctgtctctcacaaaccagatcaagctttggtccattcctaacagaaacagctgcctctctaacctcttataatccacacagcccagaccattttcccattaaagacatacataagggaggctcacaatgctgtcctggcaaaatttcacctctgagaatgtagtctaaggaaacaatccaagatgttcaaagatctggtcaggtgtacataccaaggatattcactgctgcattctttacaaaggtggatggttaaataaatgatggtccattcatatgactgaatactatgcagcctttaaaactatgttttcaaacatttatgacatggaataatgcttaaaattttatgaaatgcatataagcagtgtgattccaactcaataaacaaggggataaacagagctagacagatactaagtgaaaagcaaaaagaccaaatgacatccagatcctggtccactaacagagaccagggttccttaggaaaggagcggattcaaaggctggggtagggagggtacaagatgaaactggtacattttgttgcaccaggaagtaatgaagtcttacccccaaaaaatgatggggatatgttaaaaggatcaacgaagggcaggtgggacactgtgttcttccaaatgtgataccccgagaagtccacagcatcactcacataatattccaaagggactaaataaatctaatcacaagaaaacaacacaaacccacactgacagacattccataaattaattggttttgttcatcaaatatgtcaatgtcataaagacaaagaaagagtgggaatgagactgttccacattaaagaaactaaagagacaactagatgcactgtgtaactcgggattggat

SEQ ID NO: 74996 - DNA, 2179 bp, Homo sapiens
cagctacaggtagagagaatttgttaccttcctctcacctctcacctcccctattctcttcactcccccatcctcaccctcccttaatgacccacatattctgaaatgacaaggtacaaaggcccaagggccactgaggtgacagccatgacttacctcagtgacaaagagtgtgcgagggtcgatgatatccaagaagtgcctgaagcggccatagaaggacgtctgaagaagaggatgagagagaagagtgaatggatcagctgctgcacacccttctccagacactggagagccccaccctttatgattggggtcccccggtccccaggactcctcgtgtgggtgataaatgccaatgaggcctcagaaatctaaggacagctttcctggggctgagagttttccaaagtcaactcagagagaccactgagatactcaaggacaggcccatctgctcttccaggtgacttccattttcccctctctctcccagtgccctgagatctattctgagcctattaaaagctcccaagcatccctggacatgtaggctgaaggtgaggcctggtccccagccctctcccagcctccctgccttgctcaggaccttgagtgacaaagcatcctgcctacccgccacagggtccctccccaaggtccagctctgcctccaggggggatccccaagggcagctcaagcctaaaagcactgagctcacaatcctcaggccctccttcacccacagccctgtagctgctgaagtgcaggacaaggggcagctcccccaaccttgccccagagcaggggccgtggaaaaggagggctttatgctaagcgcacscacaggcattggagcacaatgaaaggaaaccaagcaacccggctgctgggccttctgccctggggactaagccagctgggcaaagctgagctcaaggggaagacagagggtgccaagctcggggatgaaggggaagctgcaatcgctggggttcatgcctcactacactccgggctctgccccaaattcctccctggagccccacaactctccaagcaccatcctttgcacagtggaggaaacagaagcctccacattccctccccttatttagtaggacaccagaccctgcagccaattcctgttcctttcccttcccaataaggaccctgcaataggctccaggtcacctcaaagtccccccacacaccagttctcatcccacctccatttctctcccaccatggcacccctgcatgaagcaacctctaacccctaatgccacccctacccaggtgctgtctctcacaaaccagatcaagctttggtccattcctaacagaaacagctgcctctctaacctcttataatccacacagcccagaccattttcccattaaagacatacataagggaggctcacaatgctgtcctggcaaaatttcacctctgagaatgtagtctaaggaaacaatccaagatgttcaaagatctggtcaggtgtacataccaaggatattcactgctgcattctttacaaaggtggatggttaaataaatgatggtccattcatatgactgaatactatgcagcctttaaaactatgttttcaaacatttatgacatggaataatgcttaaaattttatgaaatgcatataagcagtgtgattccaactcaataaacaaggggataaacagagctagacagatactaagtgaaaagcaaaaagaccaaatgacatccagatcctggtccactaacagagaccagggttccttaggaaaggagcggattcaaaggctggggtagggagggtacaagatgaaactggtacattttgttgcaccaggaagtaatgaagtcttacccccaaaaaatgatggggatatgttaaaaggatcaacgaagggcaggtgggacactgtgttcttccaaatgtgataccccgagaagtccacagcatcactcacataatattccaaagggactaaataaatctaatcacaagaaaacaacacaaacccacactgacagacattccataaattaattggttttgttcatcaaatatgtcaatgtcataaagacaaagaaagagtgggaatgagactgttccacattaaagaaactaaagagacaactagatgcactgtgtaactcgggattggat

SEQ ID NO: 74997 - DNA, 618 bp, Homo sapiens
cttctagttcttgaatctgtgtttggcaaaggtgtgcctagcaccccgctgctccccttatcacgttcctgacccccagccctgcctctaccctgggtcctcttggagggagatgctttgcgaccagttaactgaaagcaaatcgttggggctggcggccagggcagcgcccctgggaaagggcggagaaagagcgccatggacttttcttccccaccccttggcctcttccgctgccccaggcattgtgaatgtgggtccacgcctcgtccggcctgccccatctcttggcttaacagagggatctggagagctgttattccccgcgttcccccgcggagtggctctcgagtgyggggaggtgttgcggaggggagtggacttagggaaggggcggcaaaagggcaaagggagaaatggcgtgtgtgtgcgtgtcaaggaatggagagggcagggcgcttgggagcagggcgcgaggccaggctctgttgggccccggctcacggcgccccttctctctgtctgtacctgcgtgtgttgccgtcggggcggggcaggccagcgacgtgccccaggacgggctgcttctgcacggccccttcgcacgcaagcccaagc

SEQ ID NO: 74998 - DNA, 604 bp, Homo sapiens
tgagttttcatttttcttcgtatttaaaacgtttttgtttttcttatttctaaagccatattcttcggatttagaaaatttagaaaatatataaacataagaamgaacattaaactctctcattactcaccacccaggaatggccacttttaacgtattggtgggcattcagccatattttatacacataatacttaataaaaacagggtttagggcttttaagagattttgcataattaagcaaaagtgactgagtcccaccctgcttcttgggaacccactgatgttttgcaagctatgcttgatgaaatcttcgagcaccagggcaaactcgtgacctacatatattcttaatatgctaatttttgttttggtttctgaacaaaactagtcttttaaagaaaaatttaacagatttgaaaccagaaaccctgtcctccctggaggcattaaaaaatgcaaactgaaggcttcccgtgtgtggaggctattactgatttccttccaaaaacaggagaagtgttgccctggctgtaacgcttgaggtcccagagccagaaactgtttgctttctgcgcactcattaaccatggtgtgggatcc

SEQ ID NO: 74999 - DNA, 1666 bp, Homo sapiens
aaagcctatstgtaccagagagtactaatccacattgtttatttgaagctcttattgctttgcttcaaatgcactgaagttcctgagcaggcggagtaaagtatgtatgtttcacaataagcttgcatgcaggtaccacaaaaaacaaacaaacaataaaagaggaaaaacaaactgtatttcattattttgggttaaaaaagtctatgattttctaatgatttataaagacagcagattttacagggggaaatataacaacctggaaatgccccaaatcaacttcaaatgcctcaaatcccagatggaatgagcgagtacacgaacataataacagagttgaagatgtgctaaattatattttttaagtatggattttttagtgactgtttttgaactgagaagaatgaaatttcctcaaatctatgcatgaatgaacaagtgcatctggacagatgcatctataatttatactgatcagtcaccgcaggtctcatggagtaaagccgaaatgaacactaattgttttgacggaagtagtgtgcatggcatctgattgtgaaatgcagtgagtccctgccttgcctgaatacatattgtcaacagcaactctggcatcaggaggggaaaataaaaagacaataattcccagatgagagtgttgaagcctcttgtcaaaaaggtgccaaatagaaagaaagaattaacttcttcgggataaagtaaaaaataagactgaatgaagaggtcttggtttgacagcattgtacttcagtttagagttaaaattaataaagtgtgttaataatagtaaaattctgtagcatttgttgagtgcttgggagctttcctaaacacctctgctttatcttatttaaggctcatgataaggatattggagaggtgagaagcaagtctaagatcacacagccaagtaagtggcagaggaaggatcagacttcagacctcctgattctgggtcttttcacagaaccatatttcaaacatatagaaagccaatcacagccaggagatattgctaactccagttggactgtgtgaattcacatagtgtgtgccatgatgatgcagtataatttagcagagaaaaaatcttaaagagatgtcactgtaagaaaattaagttcagggtctataccccctgtttgatgtgactgtgtattatgaaagagcttatgtagtaattgggagttttagaaatttggtgcgaatcattaattgaatggcaaagagcaaacagacccagccatgactgataaaaacatacaaaaaaccaaaatagcaccactcccctgccgaaaaaaaaatcttcaaaaaaaaaaaattccagccaaaagataatgtctctatttctacaatggtttaaaaacaactccttgaaattagttacggactattttcaggaagaggaatttttaaaaaatctggttttggcatcagcaggtggggagatttgctgcattaacttctcattttcaaagcagtttttatgtataaaaattcttgattatttttatcctgtagatgacggcatctttctaatgaaaagctcaaggcatctgatgtgttttcaaggaattaaactttaaagtaaacaacagatgtatggatttgaaaaccagggaacaatttttgaagcctaagt

SEQ ID NO: 75000 - DNA, 489 bp, Homo sapiens
tggcatatgcctgcaatcccagctactaaggaggctgargcaggagaatcgcttgaacctgggaggccgaggcgggcggatcacgaggtccggagatcgagaccatcctggctaacacggtgaaaccctgtctctactaaaaatacaaaaaaattagctgggcgtggtgacagatgcctttagtcccagctactcgggaggctgaggcaggagaatggcatgaacctgggaggtgcagcttgcactgagctgagattgcgccattgcactccagcctgggcaacagagcgagactccatctcaaaaaaaaaaaaaaaaaaatgcagagcatatgcttagtaaagcaaattgttattatatgttgtcatttatgtgtgaagtttatgtctttgacccactgtcagtgggacttacacttgaagttattttcttgagaatgaaaatgaatgtctgatttatctatattttccctccaaacaattcagccag

SEQ ID NO: 75001 - DNA, 489 bp, Homo sapiens
tggcatatgcctgcaatcccagctactaaggaggctgaggcaggagaatcgcttgaacctgggaggccgaggcgggcggatcacgaggtccggagatcgagaccatcctggctaacacggtgaaaccctgtctctactaaaaatacaaaaaaattagctgggcgtggtgacagatgcctttagtcccagctactcgggaggctgaggcaggagaatggcatgaaccygggaggtgcagcttgcactgagctgagattgcgccattgcactccagcctgggcaacagagcgagactccatctcaaaaaaaaaaaaaaaaaaatgcagagcatatgcttagtaaagcaaattgttattatatgttgtcatttatgtgtgaagtttatgtctttgacccactgtcagtgggacttacacttgaagttattttcttgagaatgaaaatgaatgtctgatttatctatattttccctccaaacaattcagccag

SEQ ID NO: 75002 - DNA, 879 bp, Homo sapiens
tgtgttactgcagtgaccaggcttcatgacaagctgtgacgagatacaggagccttccagcaagtgtgttcacttagagtgtggggcttctccagaaggtttataaggagaaactgcccctctgagcagtccattgaagggaggaaggagaagtaacttagtttcctaagttcttccatttcccgttgatcctagtttgcccacagggctgtgtcatctygtcctttggtaactgctcaggaagccagatctcgtgctcagtggtgtggcattgcatctacttctagaaggatttctcaatactttataacttcctcatgtttctggtcatgtctgtgttcagctatatctctagaacggttggccaattcatagcatgaaatgatttcatgagtggtgacaaagaaagggtgcaatcagcccttggggagtgggttagtggaatcccagtcctgaggccattagtgggtggcagagtttaggagaaaaggtaagaagtttcagtccttgggccctgtagtaaggagaaaaagggtacaggaggttgtcacacttctgagaagtagtcttagagtgccctagtgcctgctttggatccagttctgtaagggcagaggattcattatttccaggtaatttaagtatgttctggggagaagtgttacaagatggactggggactcggctgggatcctgatgggatctaaattattgatttcacctgactgaattgctatttgcgtcacacctcaggaccctggaaacaatacacaatttgcccattcattaatttattaattcactcaacaaacttgtacatctgccataagtctgacaccatcctagttatcagggatgtagatagtcaaaagaagatgt

SEQ ID NO: 75003 - DNA, 1022 bp, Homo sapiens
tctcacgtatacacataaaacaaaaaacaagaagacccagttatagttgtggtatctgctgtttctgccttgaaatttccagcttacagctaagcaacaactactgtgcatccagaacttacatctatgttcctagagtacttgtaccccattctcaagtgcacccttcttaccaggtggaaatagttcactgctgtaataatctaagaaaacattatgtttctctctacttttttttctctcatataatctaggcaattctccctctgtatcattttcctgagaaaactaaaataatttttaatcaagaccagatggaactttgtatggtatattgacagtataccaattgttgtgacgaatcttactgcctgttgtagatatcagtgtttgaagtattccctatgaaataacttttctgtcccaataattgagagggctgtttcatttccaaaaaagggaagaattaatcaattaaaaatacatatagtgaaataacctgttttgtaacataaaacataagatgaagaaatatcggaacattgataygaagtttaacagtaatggattatatatccagaaatatgaacaaataaacctgcaatgaaaatttactaatgttactaattttcacttgtgtaacgtaaacattacaaagaacatagtgtacaaagggagaatgttggtgggtaggatgagtcaagatttcagaggaaaatcaatatttaagacttacagcactgtggaatatatttcattttcctaaagttgaagaaaatttcagtgaatctatgaattgtttaagacaaaggtcactccgttactgacttctgctacatctaattttccagggaagtaatatttagagataaaaagcttttactctgacctccggaaattacttaatgatccagatactcccaaagtcaaagcaaatccttggagacaagtttggactttatgaatgtggacttaattctttaagatcactagagcaacaataaattacaggaatgtaccct

SEQ ID NO: 75004 - DNA, 1022 bp, Homo sapiens
tctcacgtatacacataaaacaaaaaacaagaagacccagttatagttgtggtatctgctgtttctgccttgaaatttccagcttacagctaagcaacaactactgtgcatccagaacttacatctatgttcctagagtacttgtaccccattctcaagtgcacccttcttaccaggtggaaatagttcactgctgtaataatctaagaaaacattatgtttctctctacttttttttctctcatataatctaggcaattctccctctgtatcattttcctgagaaaactaaaataatttttaatcaagaccagatggaactttgtatggtatattgacagtataccaattgttgtgacgaatcttactgcctgttgtagatatcagtgtttgaagtattccctatgaaataacttttctgtcccaataattgagagggctgtttcatttccaaaaaagggaagaattaatcaattaaaaatacatatagtgaaataacctgttttgtaacataaaacataagatgaagaaatatcggaacattgatacgaagtttaacagtaatggattatatatccagaaatatgaacaaataaacctgcaatgaaaatttactaatgttactaattttcacttgtgtaacgtraacattacaaagaacatagtgtacaaagggagaatgttggtgggtaggatgagtcaagatttcagaggaaaatcaatatttaagacttacagcactgtggaatatatttcattttcctaaagttgaagaaaatttcagtgaatctatgaattgtttaagacaaaggtcactccgttactgacttctgctacatctaattttccagggaagtaatatttagagataaaaagcttttactctgacctccggaaattacttaatgatccagatactcccaaagtcaaagcaaatccttggagacaagtttggactttatgaatgtggacttaattctttaagatcactagagcaacaataaattacaggaatgtaccct

SEQ ID NO: 75005 - DNA, 737 bp, Homo sapiens
atggtcccgtgctggtccatgtgctgccctctgcttccgtccctcatccttgccactctcaacagtcttccccgacaacccttaggaagacaagggcttggaggagggggaggactgagtgtccctggcatgttctgattaatcctattcattgtcaagtacagctttttaatgarctgattcattactgagagtaggtctcatgcaaatccctagtttgtatcctgtggatttaatttctaacaatttcctcatttcaacacaactccattgtaccatgggctttgtgattttgttctaatatagagcttgacctcacattttaagactataagatgaatactaaaaaaacgaaatccttaaaataaaaaataaactagaagaacatgtaggtggatattcaactcctctctaaaggaagaagggttgtccacacataaaagttttggaagagactgggtttagtggctcacgcctgtaatcttagcactttgggaggctgaggtaggaggatcacttgagcccaagagttcgagaccagcctgggcaacataatgataccctgtctctacaaaaattaaaattagccaggcatggtaatgcacacctgttgtcacctgtggttgggaggctgagtgggaggatcgcttgagcccagaaggttgaggcttcagggagccatgattgcaccactgcactccagtgtaggtgacagagcaagaccctgtctccaaaaa

SEQ ID NO: 75006 - DNA, 703 bp, Homo sapiens
ttaatgattcgtgtgtgtgtgtgtgtgtgtgtgtgtgtgtgtgtacacattaaggtgaggttgtgcccatttgaaaggaagggccaaagataaagtgacaagctcatggggcctgtgtggtagtcaggcagtagatttttttttttttttttgagatggagtctcgctctgtcacccaggctggagtgcagtggcatgaacctggctcactgcagcctctgcctcccaggctcaagcgattctcccacctcaccygcccaagtagctgggactacaggcatgcacccccacacccagctaattttattttgcattttttgtagagacggggttttacatgttgcctaggctggtctcaaactcctgagctcaagtgatccactaccttggcctcccaaagtgctgggattacaggcatgagccactgtgcttggcccagggagtagattttctgatgataaaattaacgtgacttgttctagaaaatacagggaaagagtaaatgtgcaaagacttaaatagcatttacatgtagcccacagtgctctaaatgcttttggtggttcacagtttaatcatcataaccctatgaactagatactgttgttgcatccccatttacagaggcatagagacatggagtaattcacccatagccacacagcccttgacagaatctggatttgaactcaggcagttcgga

SEQ ID NO: 75007 - DNA, 721 bp, Homo sapiens
aaaactacatgcactcgtatgttcactgcagcactagtcacaatagcaaagacatgaaatcagcccaaatgcccatcaatgatagactggacaaagaaaatctggtacacatacaccacggaatactatgaagccaaaaaaggaatgagatcatgtccttcacagggacatggatgaagctggaagccattatcctcagcaaactaacacaggaacagaaaatcaaacatcacatgttttcacttataagtgggagctgaacaatgaggacacatagacacaaagaggggaacaacacacggtgggacctgtcaggggasggcgggggtggggagagcattagggaaaagagctaatgcatgctggactgaataccgtaggtgatgggtttaaaggtgcagcaaaccaccacggcacacgtttacctatgtaacaaatctgcacatcctgcacctgtaccacggaacttaaaaaaattaatatatgacttaaaagtttttaatagaagtcaagaaagtgaatgaaaccacctttacctactgtgaagcttatgttttcaagaaaaaaattgaaatcaatattactctaaaacaaaagtctgcagagaacattttctgatttgagccctaaggttagatttctattcccgtcacccgtggatttagaagtttctcctccaaagactgaactcttaggcttctgatcttttttcctctcttgt

SEQ ID NO: 75008 - DNA, 581 bp, Homo sapiens
aagacaagagagatgagtgtatgaactcaaacaccattgctacctctgaagacatagggctctatgagcgaagggttgtgaagtgacctctagaagcttagaacaacctcaggccaacagccagcaggaacagggacatcagtcctacaactgcacgggactgaactctgccaacaatctacattaggctaggagcagattctcccccaaagctctgagtaagaaaaacagtcctggtaccttggttttagcctggtgagacctgtacggatttctgacctataaaactttgagataataagtttgcgttgttttaagctgctgatttggtggtatttgttatggcagcaataaaaactgaaacaaaaaggatgtgtgttttccaagtattggatgcagtatattatttatccattagataaagtttgttaattacacttggaagatcaactgcacagttacttattktctgtcttatgactaatggaaaaaagataaaggtggatttttgtttgtttctctgtgtaagtttatcagtttttgttttatatgtcttgaagccacattattaagtaaatagt

SEQ ID NO: 75009 - DNA, 606 bp, Homo sapiens
ggaggtcaccctgagctcttgtatagctctccagtacctccttatcaaagacacctgcctacttctcccatcatggagccgtcacacaaagatacacacactgacacatagacacacacacacacacacacacacacacacacacacacacmccctgccccatgaagtttactgaaagaactggttccacttcaacttccttttccttagtctcggtcaccccaccttccttgccactggcctcctgcctagtgtggcacctgtgtgaatggcccagtgttctgatggtcacatccaaaggtcctgtgagttcccaccaggcagcctcttccctccttgcactatgcgagtttctgcacactctcgggctgctccccatcctgggcatggtgctccgcagggctgcctcttctcttcatctctggttttcatccattcttatttccccaactaccacctactggtggtcattttcaaaccacctgtgtgaatgcaccaccctgtgagctccagacaactgccagtgcggttcctgtagacatttcagctccaactggttctgcatcatcatctgcatctgcggacccttctggataatctttaaag

SEQ ID NO: 75010 - DNA, 606 bp, Homo sapiens
ggaggtcaccctgagctcttgtatagctctccagtacctccttatcaaagacacctgcctacttctcccatcatggagccgtcacacaaagatacacacactgacacatagacacacacacacacacacacacacacacacacacacacaccccctgccccatgaagtttactgaaagaactggttccacttcaacttccttttccttagtctcggtcaccccaccttccttgccactggcctcctgcctagtgtggcacctgtgtgaatggcccagtgttctgatggtcacatccaaaggtcctgtgagttcccaccaggcagcctcttccctccttgcactatgcgagtttctgcacactctcgggctgctccccatcctgggcatggtgctccgcagggctgcctcttctcttcatctctggttttcatccattcytatttccccaactaccacctactggtggtcattttcaaaccacctgtgtgaatgcaccaccctgtgagctccagacaactgccagtgcggttcctgtagacatttcagctccaactggttctgcatcatcatctgcatctgcggacccttctggataatctttaaag

SEQ ID NO: 75011 - DNA, 585 bp, Homo sapiens
tctggtgtctctgcatcagtgcctccatctgcaacctcagggcatcagtttcctggccagctgggttatttttgccttattagttatttgtatcaattgcctgaagtttgggtcagattaaatagcaaagactgtgaagatgactaatttaaactgttacctggttctggactaaggaataaaacatatcttttaatattgaaaagatactctaatcggggcttgttccaagatgagttctcttctgagtatttttagaaatcacacaatgctaacataccattaaaagtgagtggagaaaagcgaaatgactaataactatgcttgtatacagtgctctcccaacacacacacacacacacacacacacacacacacacacggcaaaaaccatcatagtagtccctccttgttggaggttttgctttctgcagtttgttacttgtgatcaaccaagatattaaatgaacaattgcagaaataaacacttggtcagttttgaatcacgtgtccttctgagtagcctggtgaaatctgccatcctgtcctstcccaccatgaatgggaatcttccctttttccagt

SEQ ID NO: 75012 - DNA, 888 bp, Homo sapiens
gctttaggtggtaaaggaaaaagataaattaatcaacaaatcaaatggctcattttacgatggcatttcttttatgaatgatgatttagtgcttaatatcaggaaatatttaaatgtaagattttaatcctgattctccttctaatcttaccgtaaatcgtttcaattgaaaaaatatgaccaatctttcatgcctcctagacctagtctgtgcaagtttatttcttccaaatattattccttattccaaatattaaagtcagttatttttatttaaccatgagttacccttggatccaaaaaatttatatatatatatatatatatatatatatatatatatatatatattctttttttttttttttttttgagacggagtctcgctctgtggcccaggtgggagtgcagtggcgcaatctcggctcactgcaagctccgcctcccaggttcacgccattctcctgcctcagcctcccgagtagctgggactacaggcgcccgccaccacgcccagctaatttttttgtatttttagtagagacggggtttcaccgtgttagccaggatggtctcgatctcctgacctcgtgatccgcccgcctcggcctcccaaagtgctgggattacaagcgtgagccaccgcscccggcctatatatatatattcttgacaaccttgagattgttgattgcaagataggcaaaatttaaggcaccatgaagaggataattagcagtacaaactggaaattggagtgggaataaaagaaaactttaaaagaagaccagggagcctacagattttctctgtaaaaccttgggaaagacaaagatatagctgtcaaaaaagaaaaaagacccaggttgaatcccagaagtctaatgc

SEQ ID NO: 75013 - DNA, 1232 bp, Homo sapiens
ccatcaacttggcttttccaagctccttttctttctcttggaaaaagaaatatcctgtaattcctgcatctagtagctgaggattttctttggacagctgtaccaactggagcctctcctctcggctgtctctacctctgaagaaagctctctctgttttattgatccaggaaggccctacaagtttgaagccataaaaaaattaggattatgaatttgacattttaatatggcaagcataatcctctttaatctaccattgtcatttaagatgctaaagctcttttatcaactcatcttctaaagtagatgttatttcaacgaaaatatgggattgagtctcaatttgccagaagcactttcaagtttagagtttaaaaaaaacagtctttttatttgctgtattatgtaaaagaatgctctaatttcatccatttgtctgctagtgaaagctcacgcaagtattcgtgtattctgttgtataatactaggaaatacctgaaataatgtcggaccgtgttcaaagcaaaaaagagattcagtgactgggtccactcaccaaggcattagcttcttccattttctgtgtttcacaataaaacgtgagctagccctttgttcttacaaagggtgaccagaaaaaactatataactgaggaacatccacaaatctttaatccctaggttggtcagaattttcagtacaagactttttctaatatgctactgaatgcaaacatatatgtataacccactctgtctctaagctttttcttcattaattagccttgcatttccctgaatacctgtatttccctgaatagagaggagatcatttgtaacaccccgcatggcttcaagcatggagtgggtgatgtcatacgttggaaggacaacatctcttgaatccagagagccacaccatgaaatgataggtatggggctaggggttccattgacttttcgatgctccaagggccaatctccaagattaacataaaattctaaatctgggagaaggacctaaataaacatataaacaaacatcagtgctgggaagatctcagtctttggtactaagtacaacagttmtttggttttcttacatatttttgacagggctaaccattcaaaaacagagaagagagaagaatgcctgtcattgacaggatggctgtgaatttgtcacctgtgaggatcctgcatgacaaattcacttaaccaggagtcag

SEQ ID NO: 75014 - DNA, 546 bp, Homo sapiens
agaaccaagctcaaaacaaacagatcatttacctcgggttgtaatgagcgcaaaaatgaatccatggcctgaagggatataaattcgcctgtgtggtttccatacctgtaaattccttcaggagttctaagtatgtatgatggcatattatatatgccaatatctgtcatataactcttgttgtcccaattttctacattaacaaaaataaactcaactcttccagtaaactttatacttagtgcagagaagaaagctgggggctggtcaaggtttgcaaataggtatatttttaaccaatactgatcacttttattccattcttctttcaagtgttcagcattataaatggttttgatccgagaagcygcatgagcagttatccatttaaaaatgtgctctacttcaatcttgcgtccactgtattctttaagcatgactttcccttttgaagtacttgtttgtggaacagacataatgagtgtggatcggacccagcctcttctcctgcaatatctacaagagaggaaactgtaaataaacagc

SEQ ID NO: 75015 - DNA, 613 bp, Homo sapiens
atccggtgtcttggtacatgcgtttcccaccagccactcccaaaaaagaccagggaagtggatttgatatttaaaattgagaaggacttagggcactgtggtagcaatataaagactaatgcccacctgttataaaaggaacggtgagggctgagcacggtggctcacgtctgtaatcccagcactttgggaggcggaggcaggtggatcacctgaggtcaggagttcgagacaagcctgactaatatggtgaaaccccatctctactaaaatacaaaaattagctgggtgtggtggcacatacytgtagtcacagctactctggaggctgagacaggagaatcgcttgaacctcagaggtggaggttgcattgagccgatattgcaccactgcactccagcctgggtgacagagcgaggctctgtctcaaaaataaaataaagtaaaataaataaataaataaaggaatggggaggaaaggaatgagttgaaccaaactcacgtatgataaaccctaaaatcctatgtgttttccacagggcattttctgtggggcaacttggttcccctgagagggaaagaaatgtaaataacaggagtaaaagtcaggga

SEQ ID NO: 75016 - DNA, 847 bp, Homo sapiens
ttctaagaaaatatgctttcgacttcatgattttccagcagcactgaaggccctgcacacatggggctgctagctggggcatgggacacatagggtgtcgcggcatccagccccacacagtggtcactccgggtcccgtgggcagcctgacccaacctragtggttgtaatgtttctgacggccttcacagcaatgttgtattattccatcacatgtatggaacgtgtccagaatgctggggcaagagaaataatattccctgcctaggtatccactctgcttttctcagaagcaaacaaacacatctgaggagagaaaaagcacaaccccatgtttgatccttccccgtgtccagccacttcctacaccatcctcaaatctgacctgcactcgaggactcctgcgtgctttacaagcatcttgttttagttcttttgtttttctgcaccaaccacgtctttaccagtttaccgaatgcccgccacatgtgaggctgtagactgaattcatttcttggtgaatgctattgtgtgcctggccatgagttttgtcctccaaacagccttctgtgcagaaggtctcattttagagacgaggagtcagaagctccaagaggctgattcacttgcccagggacacacagcttctgggggaagagctcagatagaaaggagacctgtatggctctaacgtgcaccatggtttagttcttcgtctctcatcccagcaagactgcactagaaacttctcaaccaaagaatcctatctcattttcattcatttccctgagtacattttggggacacacagtggagtcggggctgagcaattgcttgttgagaaaag

SEQ ID NO: 75017 - DNA, 1182 bp, Homo sapiens
gtaccaataccatgttgtttcggtgactgtagccctgtgctatagtttgaagtcaggtagcatgatgtctttagctttgttctttttgtttagtattgctttggctatttgggccaagttttctccagttctttgaagaatgtcaatggtagtttaatgggaatagcattgaatctataaattgctttaggcagtatggccattttaatgatattgattcttcctctcygtgaacaaatccatgggttgtttaaaagcttattgtttaatttcaacataggtagtctttaggtaactttattttgtttaattttagcttagttcagctatgtcagaggatacactctctatgattttattctttcagtacttgtggtgaattgctttatggcttaacatatagttaatcttggtaatgttacacatgcgcttgaaaatagtgtatattttgtcatttgagggaacagtcaagtttgttaatgatggaattcatatgttctacattttgctatttttttgtctatttgtcttattctttattgagagagatagattttaaaatctccattagagcatgtatctatttattttatggattataaaggtttaaggatctgttattaagagcacagtttcttcaacttattttctttcatcttcacacttttaggttgtctttatatttctgtaagtagcataaagatggattttattttttataaagtctgccaatacctgtcttttaactgatgcatttcatctatttatgttattataattaattctattttgagtttatatatattattctacattctatttttcatttgtttctcttctgttctttttctctttttgcaaatatttttagattaattgattattttttagtattacattttcccatctatttctggtacatttctaccaaaaatcctgcttatattttgacagatattgaatttgatttatagagaagaagagattgagaagtcaataagagcaaacgtagtatcttcaaatatattggcccctaaaccacaaacacaaaatgtctctgtgtttacttaatctttaatttctgtcaacaatattttatagtttaagtgaacaagtttaacacttttttgttaaatttatttctatgcattttatactattgtaatgggataattttcttta

SEQ ID NO: 75018 - DNA, 1196 bp, Homo sapiens
ctccaaaaatataaacaggcagagctttggggtggcaatccagttaaaaagaaaagttaggggtctgactttttgatcgtatagctatcacattgttcttgttaattttatgatgttttcattagatgatatgtttatctacagtgagtgaaggatcccagtagaaaccatggggtaggtgagattgctcaagaaaaagctacagcttcacttccactatcccacatacatagcttgagcaccaccaagaaaactggagagtttcttggaaaactttaggaccttggaatcaaggtaaaacaaagctagggcaacagataatgtatcattgcaatatttattggaatgatatattgcaaaaaaaattattcctattaatcacaagtggaaatacctgtatagtttagcttggtcacctcaggacaattttaccattccagctgtatttttgtattacactatgaagtctttgaagtctgtattctgtaagacactttgaattgccagtgacagaaagccagttcaaactggcttaagttcaaaggaaatatactgccaaatattccagggaagctgaggaacgcacacttcagcaatgaaattttctagttgaatccattctgcatgaagtccacttggcaggcaagatggctgtttgcagttccagacttccatcctcctagtttaacaaccacagtagaaaatgcttctttattttctctttgaaattactaaaaaaagactttgtctgaccttgcttggctcatatgcgcacccttggctcctgccatggttacatgcccattctgtatcctgaatggtgatttcctcaaggagaagaagctgccagacacaaagaagaggtctacttcaaagactgagtcaaatctgagttacctttgtattcctcctctacaggtattcaacctcccagatttttaatcagtggatgccagagaagcaaagtaacattgtcactgatgaatttatttaatatgaaaagaggccaaggtatgttactagaaagaaagaagtaaagcraaagcagagaagattggcaggtaggagagcagatgtgaagagaaggggaaaacatacacaatgtgaaaaataaggtgaaatttgtctttgctttgttttatgtgcttgtagagagagtcagtaaaaaaccatggtgactttattcatgagagaaa

SEQ ID NO: 75019 - DNA, 842 bp, Homo sapiens
ataactagaaatcaagtatgtacctcattcttagatcttctgaaaatataaatggcaaagatctgtgggcctaatgaggtagagtagtgtagttgtatatacatacacaataagggaagagtaatgcaaggctattttgttcttccactcagtgcctcccttttaccaagtgcaaagacacaggcgtacactggaagcatatacagacaagcaggccagataggcagtaatagcattctcttaagggacaataaatactacgagagtagaaggcatttattcaataagtgccaaatatgaatctgaatgttgtaatggaaaaagagccttggttactaactagaaagacccaggtttcactcctgtcttaaaatgagttagttactgtcataagaaaaataatttagctccatctgtgttttctgatttttaaagctaaggagttgagctagattattttgaggtttcatctaggtttaatgttctctgactttataattttctgtcatagtcttctgacatagggaaatgaaaaaagatcagatcacagattataatacaaaaatcataatttttatacacagattctattacaataatgctgcctcatgttttgaaaggccttatattctttaaaatatgtacatctaacagaattatttaacttgataattgtgttttaaataataaagatataattatatatcccttttcaatatatgaatttttatacaaaagatttctaaattaaatgttagtgttgtctttaattaaagcagtctttccayaaatctcaaagtaatatttgcaagactaaaaaaagatagcatcagaatatttca

SEQ ID NO: 75020 - DNA, 581 bp, Homo sapiens
gaaagggaggttatatttgccctagcttcagagtatctggggatcagatataatccatgcttgtaatgacgggaggttgtttagcagattaaagatcacagacgttggaggcaggcagacataaatttgaattctggctctaccacttgctaactatatgacttcagacatttcagttaacattttaagcctcagtttccttttctgaacacatggtatattaatgacaacttactcctaggactgctccaatgactgaatgaaaaaacatatccacccagaccctgtacatactaagacttactgcacaggaggtataagtgtggtattgatggctggaggtaagaagagtcacggtgggaagtaaagtatcatttcctgaggcctactgtgaggtaggtayaatgctaagaattgtaggtgcatggctttctcttatcttcacaataactctagaatgtagggattattattctcactgtgtagtttgttgaatgaagggatgagtgaattaatgggaaattaaagcttataatgtttaagtctctttcccaagtttacatacccaagtgacagaacca

SEQ ID NO: 75021 - DNA, 602 bp, Homo sapiens
caactaattagacctgctttttcttaaggaagggacagtaaaaatgtctaatattgtggactttctycatttgtataagtccttttttttaatccctgctcagctcagtatttggtttagaaacttatcatgcctgagaaataatttgaacaactttgtattgtggccattagacaccccaagtactggggaagcttgctgaaggaggaagggcctcgcttgccatcccacagtgagcagccgccctcacctccatgttttgtctgaaattagaagatgtcacttcctccctgagcagtgctcgtggaaaactgcctccagtgtaaacaacataaaattattaagcttattcctcagccgtgctaattaaccccaaacaaatttcacattaaggaaacagaattcaatcaatgtaaatgttattgctgtgtattactgtaagcaataatatagtggctaaaataattaattattttggatttttttaaaagaaagtattcctttttatggtgttgcaaaatgttttgtggatatctcccccctttctttggcctttcctggtgtagaatataaaagacccatgtggtaaagcatgggtaata

SEQ ID NO: 75022 - DNA, 602 bp, Homo sapiens
caactaattagacctgctttttcttaaggaagggacagtaaaaatgtctaatattgtggactttcttcatttgtataagtccttttttttaatccctgctcagctcagtatttggtttagaaacttatcatgcctgagaaataatttgaacaactttgtattgtggccattagacaccccaagtactggggaagcttgctgaaggaggaagggcctcgcttgccatcccacagtgagcagccgccctcacctccatgttttgtctgaaattagaagatgtcacttcctccctgagcagtgctcgtggaaaactgcctccagtgtaaacaacataaaattattaagcttattcctcagccgtgctaattaaccccaaacaaatttcacattaaggaaacagaattcaatcaatgtaaatgttattgctgtgtattastgtaagcaataatatagtggctaaaataattaattattttggatttttttaaaagaaagtattcctttttatggtgttgcaaaatgttttgtggatatctcccccctttctttggcctttcctggtgtagaatataaaagacccatgtggtaaagcatgggtaata

SEQ ID NO: 75023 - DNA, 654 bp, Homo sapiens
gcatttccctattcttcagacatcctcttctgcaaattgcctatttaattttgagcaagtttgaatctcacaagctatgtctatcacatggattttggttccatgatgttaaaggccaggtctgtctgttcaagtatcttcatgccaaagccaaaaagcagtactctgaacaaagagaattttgagttttccttgcagaagccacaaaacctaacagtggtgactctcaggagaccttgaggtcatctttgttaaaatctccctctcatcttaatcctgaacttttgtacctttggttaatttgattcctggacctcaaatctaggataaatgactctagggtggcacatggagctggatactaggaaggtgtcagagtgctaaaagtgtctcaatgttatgcccagaaagcttagctggcatgggtttagtatatcagggaaaatactagatacaaaattataaatgcaaatagttctctctttttctcttagagttttwtttactttgaaaggataaatctaatatttttcttcttctttagtattttccttagcatgtctaaatctctctgtctgccgcaccctgtctttccctgtatatgtttttgcatctctctgacacctagttaaacactcaaaatctgtattaaac

SEQ ID NO: 75024 - DNA, 654 bp, Homo sapiens
gcatttccctattcttcagacatcctcttctgcaaattgcctatttaattttgagcaagtttgaatctcacaagctatgtctatcacatggattttggttccatgatgttaaaggccaggtctgtctgttcaagtatcttcatgccaaagccaaaaagcagtactctgaacaaagagaattttgagttttccttgcagaagccacaaaacctaacagtggtgactctcaggagaccttgaggtcatctttgttaaaatctccctctcatcttaatcctgaacttttgtacctttggttaatttgattcctggacctcaaatctaggataaatgactctagggtggcacatggagctggatactaggaaggtgtcagagtgctaaaagtgtctcaatgttatgcccagaaagcttagctggcatgggtttagtatatcagggaaaatactagatacaaaattataaatgcaaatagttctctctttttctcttagagttttatttactttgaaaggataaatctaatatttttcttcttctttagtattttccttagcatgtctaaatctctctgtctgcckcaccctgtctttccctgtatatgtttttgcatctctctgacacctagttaaacactcaaaatctgtattaaac

SEQ ID NO: 75025 - DNA, 801 bp, Homo sapiens
aaatctttgtccctgacatttctccctcagagcagtacctgaatcytcctgggagccctctgctgcctctttactctgcacaaagaccaaggctgagctggtcccagggaaaagatgtttccccagtgcccatccagtagttaaaagcatggcccagagaggcagacagatctggatttcaacttgatctcctctgtacttagttgtgtgactttacataagtcacttaacatctctgagcctcagtttcctcattatataaagcatctgccttgtagggttgatggcatctgcatcaaagcgttgatgtgtgcacagggcctggtacatagtgagagctcagtaggtggcagagtctatggcagtaatgtcaggctgtaactaccatcctcctgcaccctctgctccttaatagagaaatatgttcaataatttaaggctctgtctcttgcactatcatttgttacagagcctcaaatcccttagctgttgatgaatttatgtgtctctgcacaagacaagtcagagtccagaccggatcacatcctagtcaccagtggggcaaagccccctgctccaggccattgcactcttgagactggcagctgttaacagccaagggaaacttgagcacagcaacgcagtgaaatacccatgctctttccctcatactaaaatatatctgctccaaactcagcaaaacctaacagtggataaggtcttttagaccaagacaaaaagtagaagttaaacatagaacttagaaaaggggctgctttatttacaagtatcagtctcttt

SEQ ID NO: 75026 - DNA, 740 bp, Homo sapiens
ggatccagtgcacatgccctcttctgtctaagttgtggtggaagctgcagccccraatattagttgtttaaacaattcagaaatttacttccttctcatatagcactacaggacaagcagtccaccatggcacagcagttccacagccttggggacccaggctccttctatcttgttgttcacttttcctgagatattgtcctcatgggcatggctcagaatggctcccattgtgcctgcagtttagccagaaggaaggaaaaaaggatgaaaggcaggacatgcccctctttttccagacctgatcctgcagctgcgcacatcaattctacacacatcccgctggtcataaacagctgagagatggagttttccatgggtggcctagggtctaactcaaagttatatttctgtggaagaagaggagaacgccatttgggtgacaactggtaatctttgccacaggtgtattttttaaatataaatttgggagggataatgataatttagattcaaggatacaaggttgcccaagttcagttctgctttttcagaacaacagacagataggaaagagctttgaatggttttaagcacattgcaggccagaggctacctgaaaggtgaagctgaggtccctaactctttcaagataccttggggaaaaactgggttcaaatctacaaccagccacaaactagtaaggtgaccgagccagttacagtactgctctcagcttc

SEQ ID NO: 75027 - DNA, 753 bp, Homo sapiens
cggttccctgactcaaatgttaatctcgtctggcaacaccctcatagacatacccagaaacaatactttgtatccttcaatccaatcaagttgacacagtattaaccatcacaaggcttaacacatgtcctggcataaaggacatgttgaataaatggcaatgactgttatcattaccaccaccatcaactttatctctaaggctccagcttttggctgtaaggctttatgtttctttgaaytattgtgcaagatggaggaccctttgatgagggaataattattactggatttttccctttgctcttggatttttgcaggttttctcaaaataaggcatagtagagccagcccattgcaggtaaaacaatttgaacagaagacatcgggacatcggggtctgtaatttcaaaggcattattgaaacaacttttttcttaacagaggaaacaaaattaatcttttaaatcaaggaggaaaattatttaattttaatgctgcacatggcaggaaaataaagtgcaaagtttacagcactttatttccttcttaccaggaaggaagaaggaaaaccccatggtattatgttttgtcaaacatgactttccagggactaaaccagactttgattttagacccctgttcattctagtttggtaaacccttgacaaattccagtctgttccacccacaggagagggtcatgttaccatctcagctgcagagccgatgaggtggttgtaccgacctgta

SEQ ID NO: 75028 - DNA, 1067 bp, Homo sapiens
gggagtgtatgcaaacaggcacacacactctccaggtgattctaacgcagccaaagctgagaatgacaacacataccattggttcccaaacttgtttgcacttgagaatcatctttttaaaattccaaacctcatgctagaccccagaacaatcagatcacaagctctagggcagtgggatgggcacagacatcaatattttatagggtccccaggtgattccaatgtgcaaacaagtttggaaagcatggcgcaggctccaagctccaagctccaagctccaggagagcagggtctgtcttataatttttactgtaactctcctacagcacctacccgaaatatttgttaaactgaattgaatttgtagagacctccattctcatgaggtcctttccaactatgcctacttgcattggtgccacctaggaccctatgaatccagagcagggcttggcataaaaggaatatgcttcatacaaactgcattatactgcttcattaataaatactgtcctagggacttccacagacctgacactttgttatttcattatgtgatttaattaaaaatggaatctattawgcctttttcacattagatgttggtagaaatttttatttttttaacttttattttaggttcagggcacatatgcaggtttgttatataaataaattgcatgtcacagaagtttggtgtacagattattttgccacccacataataagcatagaacctgagaggtgatttttggatcctcatcctcttccctccctctatccttaagcacgccccagtgtctgttgttcctttgtgtccatgtgtactcaatgtttggctcccattatatgtgtgaacatgcagtatttggttttctgttcctacgttagtttactcaggataatggcctccagctccatccacgttgctgcaaaggacatgatctccttgttcttcttatggctgcatagtgttccatggtgtacatgtaccatgttttatctggcccattgttaatgggcatttaggttgatcccattttttgctattgtgaatagtactg

SEQ ID NO: 75029 - DNA, 1067 bp, Homo sapiens
gggagtgtatgcaaacaggcacacacactctccaggtgattctaacgcagccaaagctgagaatgacaacacataccattggttcccaaacttgtttgcacttgagaatcatctttttaaaattccaaacctcatgctagaccccagaacaatcagatcacaagctctagggcagtgggatgggcacagacatcaatattttatagggtccccaggtgattccaatgtgcaaacaagtttggaaagcatggcgcaggctccaagctccaagctccaagctccaggagagcagggtctgtcttataatttttactgtaactctcctacagcacctacccgaaatatttgttaaactgaattgaatttgtagagacctccattctcatgaggtcctttccaactatgcctacttgcattggtgccacctaggaccctatgaatccagagcagggcttggcataaaaggaatatgcttcatacaaactgcattatactgcttcattaataaatactgtcctagggacttccacagacctgacactttgttatttcattatgtgatttaattaaaaatggaatctattaagcctttttcacattagatgttggtagaaatttttatttttttaacttttattttaggttcagggcacatatgcaggtttgttatataaataaattgcatgtcacagaagtttggtgtacagattattttgccacccacataataagcatagaacctgagaggtgatttttggatcctcatcctcttccctccctctatccttaagcacgccccagtgtctgttgttcctttgtgtccatgtgtactcaatgtttggctcccattatatgtgtgaacatgcagtatttggttttctgttcctaygttagtttactcaggataatggcctccagctccatccacgttgctgcaaaggacatgatctccttgttcttcttatggctgcatagtgttccatggtgtacatgtaccatgttttatctggcccattgttaatgggcatttaggttgatcccattttttgctattgtgaatagtactg

SEQ ID NO: 75030 - DNA, 1067 bp, Homo sapiens
gggagtgtatgcaaacaggcacacacactctccaggtgattctaacgcagccaaagctgagaatgacaacacataccattggttcccaaacttgtttgcacttgagaatcatctttttaaaattccaaacctcatgctagaccccagaacaatcagatcacaagctctagggcagtgggatgggcacagacatcaatattttatagggtccccaggtgattccaatgtgcaaacaagtttggaaagcatggcgcaggctccaagctccaagctccaagctccaggagagcagggtctgtcttataatttttactgtaactctcctacagcacctacccgaaatatttgttaaactgaattgaatttgtagagacctccattctcatgaggtcctttccaactatgcctacttgcattggtgccacctaggaccctatgaatccagagcagggcttggcataaaaggaatatgcttcatacaaactgcattatactgcttcattaataaatactgtcctagggacttccacagacctgacactttgttatttcattatgtgatttaattaaaaatggaatctattaagcctttttcacattagatgttggtagaaatttttatttttttaacttttattttaggttcagggcacatatgcaggtttgttatataaataaattgcatgtcacagaagtttggtgtacagattattttgccacccacataataagcatagaacctgagaggtgatttttggatcctcatcctcttccctccctctatccttaagcacgccccagtgtctgttgttcctttgtgtccatgtgtactcaatgtttggctcccattatatgtgtgaacatgcagtatttggttttctgttcctacgttagtttactcaggataatggcctccagctccatccacgttgctgcaaaggacatgatctccttgttcttcttatggctgcatagtgttccatggtgyacatgtaccatgttttatctggcccattgttaatgggcatttaggttgatcccattttttgctattgtgaatagtactg

SEQ ID NO: 75031 - DNA, 745 bp, Homo sapiens
cagcttcttgaaacatgtgaaggaaaattatcagaaaaagaagccaaagagaaaggtacctgggtgcaactgaagtgccagcctgctccacccagagaagcacactttgtgagaaccaatgggaaggagtctgagctgctggagcctattccctataagttcatggcacaataggtgttaaaataaaagacctctggactgctaaaaaaaaaaaaattctgccctattctaatggacagtgtcacttgttaacagatttcctgagactgctatttagggctgtcacatgcaccatctttttttttttttttttttttaattaaagttctagggtacatgtgcacaacatgcacgtttgttatatatgtatacatgtgccatgttggtgtgctgcacccattaactcgtcatttacattaggtatatctcctaatgctttacccgaccccctccccccaccccaggacaggccccagtgtgtgatgttccccttcctgtgtccaagtgttctcattgttcagttcccacctatgagtgagaacatgcggtgtttggttttctgtccttgagatagtttgctgagaatgatggtttccagcttcatccatgtmcctacaatggacatgaactcatcctttttaatggctgcataatattccatggtgtgtatgtgccacattttcttaatccggtctatcattgatggacatttgggttggttccaagtctttgctattgtgaatag

SEQ ID NO: 75032 - DNA, 884 bp, Homo sapiens
catttaccttcttacattatctcagactttcctggctgcacagactagattaaactctttattttccccttggtaacacccatcacagttatttcttttcttttttttttttgagacagattcttactctgtcgcccaggctagagtgcagtggcacaatctctgcccactgtaacctccacctcccgggttcaagtgattctcctgcttcagcctcccaagtagctgggattacaggcgcccaccaccrtgcccagataattttcgtgtttttagagatggggtttcgccatgttggtcaacctggtctcgaactcctgacctcaggatttgccagcctccacctctcaaagggctggggttacaggcacgagacactgcacccggccccatcacagttatttcttgcttaacataaaatctaccctactaggtgtcagctccaagaaggcagagtccagatttccccagggtctaacacaatgcctgctatataacaagtgctcagtaatattggtgcaattgaattggtttgattcagttatttaaattttgtttccccacctccactcagttaatctttcttacatgaagattacaacactaaattttcagtcttaggacataaggacaaatcataattttacaaataaaagggattatgggggctttgagagttgtgagtttagatttaaaatatagatgtaatctttatcaacgacctcatgttacttttttttgaaaacccttttattttgaaaagtcataaagtatcatgaagaattacagcatgctcttcatctagatttcccaacgttaacattaacattttgctacagttgctttatatatcctatgtatatatatgtagaggaaaagatgca

SEQ ID NO: 75033 - DNA, 869 bp, Homo sapiens
aaatgaaaggaacagagataaatgactcttaaaagtatggaggaactttttttggggagaaggagggtggtgtttgatactgaggagttagtaaaatattcctatgatattgctactattcttttcactagaggcttcatatattatattttattattacatttaagaatccttattaggtacactgttaattattagttccagtgattgatttcatcctgttcatatgactgaaagcaacactattcagtagaaatacaatgcaagcggctgggcgtggtgggtctggcctgtaatcccagcactttgggaggctgaggcgggcagatcatcaggtcaggagttcgagaccagcctgaccaacatggtaaaaccccctctctactgaaaatacaaaaaaattagctgggcatggtggcatgtgcctgtaatccagctacttaggaggctgaggcaggagaatcacttgaacctgggaggcagaggttgcagtgagccgagattgtaccactgttctccagcttgggcgacagagcgagactccgtctcaaaaaaaaaaaaaaaaaaaagaaatataagaaatrtaatgcaagctataaatttgtgccacataggtaagttaaaatttttctagtggccccagaaaataatgaaaagaaacaagtgaaattaattttaatattacatttaactcaacatatctaaagtatcatttcaacatacagtcgatgtaaaacatttttgagatatatcacattttcgtaaaacatgtttgaaatcaggtatatattttataatttacattacatctgaattcggactagcaccaaaaatcacatgtggccagtggctactatataagataccat

SEQ ID NO: 75034 - DNA, 869 bp, Homo sapiens
aaatgaaaggaacagagataaatgactcttaaaagtatggaggaactttttttggggagaaggagggtggtgtttgatactgaggagttagtaaaatattcctatgatattgctactattcttttcactagaggcttcatatattatattttattattacatttaagaatccttattaggtacactgttaattattagttccagtgattgatttcatcctgttcatatgactgaaagcaacactattcagtagaaatacaatgcaagcggctgggcgtggtgggtctggcctgtaatcccagcactttgggaggctgaggcgggcagatcatcaggtcaggagttcgagaccagcctgaccaacatggtaaaaccccctctctactgaaaatacaaaaaaattagctgggcatggtggcatgtgcctgtaatccagctacttaggaggctgaggcaggagaatcacttgaacctgggaggcagaggttgcagtgagccgagattgtaccactgttctccagcttgggcgacagagcgagactccgtctcaaaaaaaaaaaaaaaaaaaagaaatataagaaatataatgcaagctataaatttgtgccacataggtaagttaaaatttttctagtggccccagaaaataatgaaargaaacaagtgaaattaattttaatattacatttaactcaacatatctaaagtatcatttcaacatacagtcgatgtaaaacatttttgagatatatcacattttcgtaaaacatgtttgaaatcaggtatatattttataatttacattacatctgaattcggactagcaccaaaaatcacatgtggccagtggctactatataagataccat

SEQ ID NO: 75035 - DNA, 869 bp, Homo sapiens
aaatgaaaggaacagagataaatgactcttaaaagtatggaggaactttttttggggagaaggagggtggtgtttgatactgaggagttagtaaaatattcctatgatattgctactattcttttcactagaggcttcatatattatattttattattacatttaagaatccttattaggtacactgttaattattagttccagtgattgatttcatcctgttcatatgactgaaagcaacactattcagtagaaatacaatgcaagcggctgggcgtggtgggtctggcctgtaatcccagcactttgggaggctgaggcgggcagatcatcaggtcaggagttcgagaccagcctgaccaacatggtaaaaccccctctctactgaaaatacaaaaaaattagctgggcatggtggcatgtgcctgtaatccagctacttaggaggctgaggcaggagaatcacttgaacctgggaggcagaggttgcagtgagccgagattgtaccactgttctccagcttgggcgacagagcgagactccgtctcaaaaaaaaaaaaaaaaaaaagaaatataagaaatataatgcaagctataaatttgtgccacataggtaagttaaaatttttctagtggccccagaaaataatgaaaagaaacaagtgaaattaattttaatattacatttaactcaacatatctaaagtmtcatttcaacatacagtcgatgtaaaacatttttgagatatatcacattttcgtaaaacatgtttgaaatcaggtatatattttataatttacattacatctgaattcggactagcaccaaaaatcacatgtggccagtggctactatataagataccat

SEQ ID NO: 75036 - DNA, 815 bp, Homo sapiens
cttgagcccaggaatttgaggctgcagtgtatgtaccatgatcgcaccactgcatgccaacttgggagacagagcaaaaccctgtctcaaaaacaaaaaacatctattttttttgcttgtactttgatgaacatcctcaatgatatttttaaaaacacatttcaggaagctctatgcagaactgtgccaaggcatcgtggacatagccatttccagtgtcttcccacccccagatgtggagcaacctcagacccagccagctgccttcatcaagctgtgacagagggcactccctgctgccttggaaaaagcacggggtcctgctccagggaatggtgaaatgactggattgctctttatccagcccacagcaggggaaagaaaggcaactcgcaaagatgagatggaagaaggcacgtgagcagaggaggcagctcccaaagagagggctgctcagggggcttcccagrtgtagctctcagcagtgctgttgagacttttgaaaacaactttggtacacaaaggcagctttgtgagcagagctccttcccctctccccgggaacggcagggcactgggacctctggtcggtgcctcccacccactgcagccctagtgccttagctccatgcccggctgcagccccactgctctggactatggattggacgtcagagcatattggaggttgcctgtgtgttccccacccatcccttcggtaacactctgccacactaagctctgtacaagcatgcaccaacagtccttagttttgtgctgtgcactggcctctcggcaaaggtggtttccctcat

SEQ ID NO: 75037 - DNA, 769 bp, Homo sapiens
ggacaggtttccttccaggaaggattcgagttcctgtgcctgtgggtattaggagagtatatatcctgcctgaatggggaagtcttctaaaatgggaaagaagtggtttcatctccacacagtgtcttgtaaatctcaacaaatgtgtactgttagaagtggcttccgcttactggattaactaatactttataggcttttcaggaggccacatcactagcagtagggagaacaagatgtcatttgtgttcagtgtaagctgagtaaacaggcccttcctagagtgtcctggaaatcacagcaacccattgaaaactgccctccccaccagaacgtgctacgttctttcttcatgcctatgtgtgctccattcctcatttctacttggctcaagaaaacatttctgcagtcaggtgagacttttacaaaagaggagaaaatcaatgcctccttgaacatgatgagatgtgagaacttacaatgaaaaaggcaataatgatagaaattatttcttaggtacagcaatagttgataggatgtgagggtgttaccttggggtgaagtggagaaggtcccaggtgaattggctctcatggaaatttggaattacraaataaacgtcctgggggttacccagaatacagatttaaaagtttgcctgtagagcaaaataaaacagtcagttgtagtcattaatccttgaggcccaacgcagccgatgggttggtgtttgggaaattctgagatgggagtgagatctgatcggatc

SEQ ID NO: 75038 - DNA, 424 bp, Homo sapiens
cttggtcaagtccattcccctctggagctccttgacatccagcaaaacattctcaagggagactaaagcagagaaagaacatcccagtgaaamtcaatggggaagtcacaaccacagcgaatctggctgctgggccaagttctcaggagattcttaggcttactcaagggccctaaacctagcttccagcttttggcacagagatcttttaatgcaaagaagcattataagcactacattacattctttgcatgcactagttcatttgcatcattagctcattttgtcaatgagcaaaagcagcataaagaggttctgtggcctgcccttggtcacactgctagtaggtggcagaggagttcaggtaacaaatgtggactctaaatcccacacttgcacaaacctattccatttctcttacaag

SEQ ID NO: 75039 - DNA, 791 bp, Homo sapiens
tttttgagttaaggtactgacagttctaatgaaacataaatacaagagagtaacatgtatcttataggtatcccaagcttaccatgacacagtggttcctaccacccagtctggagagcaccagatctggactcaagtccaggacccagaagtgataagctgtgtggccccaatcaagctatttagtgtctctgagccttgatatgccaggagcccctgcctcatctgattattataagaagcaatgcatgcaaagcacttagtactgcaccagacagatagtaggcacttcactggtgggggataccaaacaaggctgttctgagagtgaaatgagttaagatctatattaaaaagtgcttggaagttatgacaagtttattcattgcctctttctgtgtttggggtcccagtgatgccattatcctcagagtgcccaagtcagatacctggaccattcccaacttatttctctctcgctttaccctatctttcctgtctcccgccccaaaccacttcaagtcctgttgactttgcctccctactgtctagccttgcttcccctcatagtctttggaccttatcatgggcccccaagctccttgttcctcttattcacagctgttttcacaatttgkgtttttctatttatttctggcactatatgtttcttccccactagtagaccagatgttttcagagtcagggactctgttttgctcaccattgttcatccccggtgcctagcacagtgcctgttatatggtaggtactaaataaagattcttggg

SEQ ID NO: 75040 - DNA, 1424 bp, Homo sapiens
tttgaggtctaatcatactaagcagccagctgcagaaatcacaaaaccaactaaaataactccatccttaatattctgttcctctaccaccactcctggtaccaaaatctgtattagtcagggttctctagagggatagaaccaataggatatagatatataaaggggagcttattaagtagtattaactgacatggtcacaaagtcccaagataggttgtctgtaagctgaggagcaaggaagctagtccgagtcccaaaactgaagaacttggagtctaatgttcaagggcaggaagcatccaggatgggagaaacatgtaggctgggaggctaaccagtctagccttttcacgtttttctgcctgctttatatgcactggcagctgattagatggtgcccacccagattaagggtggrtctgcctttcccagcctgctgactcaaatgttaatctcctttggcaacacccacacagacacacccagaatcaatattttgcaccccttcaatccaatcaagttgaaactcagtattaaccatcacgacatatatattcaattatattcaacagatgatgactagagattacagaagcagataatctagatagagataaggatatatagataagcatacgagagactcttcatgaagcaaagctcactttagagtagggaagatgtttttaaaaaaagttttaaaaagaataagaaaatattgaactgaaaagaaatctatttaaaatgcaaacggaagacattttaacagaatccataggcatcatctcttagaagggaagtgcacacacatatgcatacacacacatgcacgcacacacacatgcacgcacaatcttgaccttgaccagttatcagatagactttaagaaaatgacaattctgtggcattgttctcttaatctattgggctacttccagttatgagttctggcatttcagagaatcctgcttccatttactttgaagaaggaggaatttgcaatcatacattctcataattcacagaaaattttaatgagtaataaatgaaagtgtcatcaacaatcaaaatatgtgagatagacggaagaaactttgctgaatgaagtcttaattctagactggaaacatggtaaaatcaagtgatttctcaatctaaagccctttctagataactgttggcttctctggaccatgcacaagtagtgaaaataattgtttaaattacatcgagcttcgaagctaaatatttcacctataccattaaagtgtaagatagagcctaaagcctaaccacacggcagaaattatttttcccagataagctgtggtgagaaatgaacaggcatctaagaggcagaaatcgtgcattttctttctccttggacatcgcaaccttctcatcaatattaatcatgaag

SEQ ID NO: 75041 - DNA, 1585 bp, Homo sapiens
attttggtgcccctttcaaagtctagaacagtggattacgtgtggtagttattcaatatgtttctgtttctgattgctaataattttacacaccttatttctaaatctgtcaataaatactgcttgaccatattactctttcaaaattaaaacaaactcctcacacacttgtacacacaagaattacaatagttcctgtttattgaatactatgtgccaggctgtagatgacttacatgcatcattttattttaacccttgtgataactcagcaaagtaaatattatctttatagtacagataaagaaactctggttgttgcaagagcctggatgaacgaaaatctgtatgcccactgttcattcaatgatgatctatgccaattgcctagtgtaaatgcctctgcctgggggcagtgggatttggaagggatttcatggtgtatgagaggacaagggattttaggacccatgagtccccctgaattgcagaattttctttttctcttttgcagtattaagctttaagcaaaagttactttaaataaagtgatgacaataagagggtcatttgggtatttttactcatcatgtgactcaatatggatyactcaatatggatttagcacagctgtattttaataatctaagccagattaaatggatccatgtttgaaatgtgtattttatttaacaatgtgttacttgcagtactttagatacaagtgggcttctaagttcctgttgaggaagctgtgtggatgttcaatgagctacagttttcacaagatttgtctcttccaaatcttataaaaaaataagcttcagtagctcatgtgtttctcaaataaatgaacactaatcaagtcacacagttcagttcatttagtttttaaaatagctccatgctattttactttaaaaatcttaagagatttcctgaagagatcattaccaccaagttggtactgacttgtggaggcaataaaacaaataaagtcattaaaaataatttgaacaaaaggagtaacttgatatcatgccgtctaccttcggttaaaatgacattttaaagttctctttcatcttactcaacagatctctaaaagaaaaagatgtgattaataaattatcctccataaatcttatgataactattatagtctttggagaattatgaatccacatctggaaaaagtattttatatgctactgcctgtaaagcagcatgccatgcattttacaagtgcacattagtaagtaaaaatacggtatgttttttgtgttcatcattttcccctccaaaagaagtgtaagcctagtttatttcataataaagagtgctaataaagtttatgtgaagcttgttttctgcccttactttggtgctgatgcagttttggtaggttatttggaatgggctctctatgagaactcaaggaagccttcactataagctgacttggttggtgcccttagaacccctgtgtgggcagaggccagctggtccagaaacatcacaggagtaagcagaacacataagaaccacacacttcacttttctcatgtgcttttgaatttgatcc

SEQ ID NO: 75042 - DNA, 785 bp, Homo sapiens
ttatttctagtcacactgaattcttagcttttgccaatgcacttgatcaargtgtaggttctgagtatgtagtctacatccaactatatctatgcatggctttgattatatcaagtatagtttgcaaaaaaataacaacgttggaggtttcatacttcttgatttcagattatactacaaacctattgtaaccaaaacagtatggtattggcataacaacagacacatagactaatggaaaagaatagagcgcccagaaataaacccatgcatatatggccaactgatctttgacaaaaacatcaagaatacacaatggaaaaaatctcttaaataagtggtgctgggaaaactgaatatccacatgcaaaagaatgaaattgtacccttattttacacagtacacaaaaatcaattcggaatagattaaagacttaaacataagacctgaaactataaaacctctagcagaaaacatagcgaaaaacttccttgacgttagtcttggaagcacatttttgaatatgctgtggaaaacacaggcaataaaagcaaaagaaagcaagtgggattacatcaaactaaaacgtttctgcacagtaaagaaaacagtcaacaaaatgaaaaggcaacctttggcatgggagaaaatatttgtaaaccatatatctgataaagaattaatatttaaaataaataatttatataattagtaaaaaacagataaccctttaaaaagtgagcaaaagaccagaataggcatttttccaaagaagacatacaaa

SEQ ID NO: 75043 - DNA, 591 bp, Homo sapiens
tgttaccacgctctttcggttactgtagccctgtagtttagtttgaaatcaggtaatgtgatacctccagctttgttctttttgtataggattaccttggctatttgggctctttttgggttccttatgaatttcaaaacaacttttttctggttctgtgaagaatgtcattggtagtttggtaagaataccattgaatctgttaattgctttgggcaatatggctgttttaacaatattgattctctctattcatgagcatggaatgtttttccatttatttgtgtcatctctggtttctttgatcagtgttttgtaattcttattgtagatatcttttacctccccgattagctgtatttctcaatattttcttctttttrtggaggcctgggcttctttactttgtgtcatgatcctttgttaatccacctaagagaagagaatgcagacaccaacctactttggatgacacaggtgtgcaaactaactctttcccccttctttcctgacatatctatgatgatcttgggcatgttacctaggaagagtcaggagggcaaactgtaaagtccaccttacaatagttca

SEQ ID NO: 75044 - DNA, 595 bp, Homo sapiens
ctgattaggcctgtgttttcccatcccaacctggctgtctggcactcacctgctaagagatcaggattgatttagaaaaagccatcactcataggtgggaattgaacaatgagaacacgtggacacaggaagggggaacatcacacactggggcctgttgtggggtcgggggaggggcgaagggatagcattaggagatatacttaatgttaaatgatgagttaatgggtgcagcacaccaacatggcacatgtatacatatgtaacaaacctacatgttgtgcacatgtaccctaaaacttaaagtataataaaaaagaaaaagaaaaaggaaaagccaccttcagcacaaatgaagcaaatctgtggggttgtctgcatggccacaggccctggctaggaatttaggctctttccatttgtacaagagcagtttcyttttaagttcataattgtttattcataaaccttgagagagagtgaaagaaagagagaacagactcagactctgcctgtagtcttctctttatcctgagatttctttggggtaagattagcatgaaggccattttttgctatggaggccaagtagact

SEQ ID NO: 75045 - DNA, 887 bp, Homo sapiens
aaacaggtcttttgctgaactctggagtacaccacagaagattttcaaggactggaagcctcagtttagccgctaatagtagcaggaggagagggtaaacaaaggagacctggtacgaatcctggcctcacaattttactgtcttttagactatgggcaagtcacttatcctctctcaacctcagcctcatttataacatgggaattaaaaagcctaacttgcaaaactggggaatcttagggaaggtggagctaaacatctaagacyatacctagaacacaggataggctcattaaaatggcagctattatacatgcaattttacatctcttgacacaaagtatttaaaattgccttaggtaacatgtgcaaaagaaaaattttaaaatgttcagagctacttgaaatcagtatcacattataattaaagaccaagaaaaaatgggccgggggtggggagggtccaatacaaggataaaaacagcataaacagattattaacaaatccattcctaatagtttttagcaacgattaattatatcacttattttggtagaaactagcaaagaaaaaattggcacaaacacttcatagttataataagctcagaaacaagtgaaatataatttaactgtgaaggcagtcaaagagcaataagtactagatcaggatgtattaatgcagctaagtaaaaccgtaacgttgcaggctagtacaattagattttagcacatatcaattaggagagttggtcaactatgagagtaaattcaaaaaaaatcacagatgcaacactggcagtagttatcaatgcactgcccaagagagaatgtcttaatatcaaaattctggtatttacagtcacactggcaaaaattatttcca

SEQ ID NO: 75046 - DNA, 887 bp, Homo sapiens
aaacaggtcttttgctgaactctggagtacaccacagaagattttcaaggactggaagcctcagtttagccgctaatagtagcaggaggagagggtaaacaaaggagacctggtacgaatcctggcctcacaattttactgtcttttagactatgggcaagtcacttatcctctctcaacctcagcctcatttataacatgggaattaaaaagcctaacttgcaaaactggggaatcttagggaaggtggagctaaacatctaagaccatacctagaacacaggataggctcattaaaatggcagctattatacatgcaattttacatctcttgacacaaagtatttaaaattgccttaggtaacatgtgcaaaagaaaaattttaaaatgttcagagctacttgaaatcrgtatcacattataattaaagaccaagaaaaaatgggccgggggtggggagggtccaatacaaggataaaaacagcataaacagattattaacaaatccattcctaatagtttttagcaacgattaattatatcacttattttggtagaaactagcaaagaaaaaattggcacaaacacttcatagttataataagctcagaaacaagtgaaatataatttaactgtgaaggcagtcaaagagcaataagtactagatcaggatgtattaatgcagctaagtaaaaccgtaacgttgcaggctagtacaattagattttagcacatatcaattaggagagttggtcaactatgagagtaaattcaaaaaaaatcacagatgcaacactggcagtagttatcaatgcactgcccaagagagaatgtcttaatatcaaaattctggtatttacagtcacactggcaaaaattatttcca

SEQ ID NO: 75047 - DNA, 759 bp, Homo sapiens
tcccattgagcagataggccctgaatgcctcctttgcataaggccctacaccatgtacccacatatactgaagaggactcaaaggccaacaacagtccctgagcctaagctatctgatgaggaggagctaatcaggaaattcatgactatggcattaaacaacatgcaaaaaggataagtgcagggctgaaggggaaaactgggctgatatgtgcataatctacacagcagggacttctggaaggggtatggacgcgagatgggaaggaaagcaccagtctagtaattytctattttattttattttattattattatactttaagttttagggtacatgtgcacaatgtgccggttagttacatatgtatacatgtgccatgctggtgcgctgcacccattaactcgtcatttagcattaggtatatctcctaaagctatccctcccccctccccccaccccacaacagtccccagagtgtgatgttccccttcctgtgtccatgtgttctcattgttcaattcccacctatgagtgagcatatgcggtgtttggttttttgttcttgcgatagtttaccgagaatgatgatttccaatttcatccatgtccctacaaaggacatgaactcatccttttttatggatgcatagtgttccatggtgtatatgtgccacattttcttaatccagtctatcattgttggacatttgggttggttccaagtctttgctattgtgaatagtgccgcaataaac

SEQ ID NO: 75048 - DNA, 677 bp, Homo sapiens
tcacttgtaagtgggagataaatgatgagaacacatgaacacaaagaagggaacaacagacactgaggcctacttgagggtggagggtgggaggagggagaggagcagaaaagataacttttgggtactgggcttaatacctgggtgatgaaataatctgtacaacaaacccctgtgacatgagttcacctctgtaacaaaccttcacatgtaccctggaacctaaaataaaactttaaaagtaaataaataaaatttaaaaataaaataaaatagcaaggtactgcactttttaaaaagaaaaatgggccaggcatggtggcacacgcctgtaatcccaccactttgggaggctgaggtgggaggatcatgaggtcaggagatagagaccatcctggccaacatggtgaaacctgtctccactaaaatacaaaaaattagccaggcatggtggcaggcgcctgtagtcccagctactaggttggctgaggcagggaaatcgcttgaacctgggaggcagaggctgcagtgagccaagatcgcgtcactacactccagcctggtgacagagcaagactcygtctcaaaaataaataaataaataagtaaaaaataaaaatgtatggtcacataaagatttgtatctttaattattcatcattaattatgaattaatg

SEQ ID NO: 75049 - DNA, 2657 bp, Homo sapiens
  misc_feature (1)...(2657): n = A,T,C or G
annnnnnnnnnnnnnnnnnnnnnnnnnnnnnnnnnnnnnnnnnnnnnnnnnnnnnnnnnnnnnnnnnnnnnnnnnnnnnnnnnnnnnnnnnnnnnnnnnnngaattctgctaaataaaatattatccatctgctgatgtttctatctccctgagatgatcatgaattccttgacagcaagaattgtttctaacttacccttatatccccaatgttgggcacagtacatagaagatagtagatcctaataatgcatcaatattataaaggagaaaatgatttttaaatcccaagccaccacttggagttttggatcttaacctttttggtcattagggaatgctgcactttacagtagaagagaggaaggctgctgagtttaaagtgggcttcaggaatctatcagtgatactgtctttcctagattttttcccattagagatctctctaatgagaatcttgaacttarctgcagttatgaaagaattttgattaaggggaaatgaaagaggtaaaggctgttttttcatagtcattggtttgcttcaaatttccatccatcgtctttctctagcttttcaatttctggctttattgtgggtacttgtagttcctagaatacaattcactaatcacattaatttcttatattacaaattatttaaacaaaaagcaaattttacaaatgtccctttaatttacaggtctcttaaagattaggaaagtaagactatggctatatatattatctgatgtataatttatacatgtatgaataatcaatttcatcccaaataaagaaattccttttttaaatttgcttgagattggggaatgaggaggagtacatgaatgggagttagagtagaaattaatttagtaataaacattaatagcaaaagctttattgaacacaagcttgttcatgttattcttgctctatgacaaaaaattaataagggcttgaatcactgccatttattgaacacatatgccacatgactctatagacccactccctcgtatgatgtgagcttgagatcttagtgaaagtgtaaaaatgtttcacatacactaggatatttttttctcatgttacagctaacaaagatcataaagagtggttaagtcccaaaaagtaaaccagatcccaaaactccaggagagattcattctacattgttgcttttcttatcacaaaactatcttcaatttcaatcttcatatgaccccataatcaccagcaataaaactggcttatcagaatattattcttttctgacttagtgtttacataactaatttttataaatacctcccaaaatatctctccttatattgtacttgactttatattatttatttttatggtctaaacttaatgcataattcatccttcataaatgaatccagcatggttcaaccatggttggtggactccttgaatttacttgtaaaccagtaactacttgaatttacttgtaaaccagtaattggatattttactcttcattggacttcattaaaattagctgaacagtaaattcaccattcctggtcagatcacccaaattggggagaagtgcacatcttaataaaatagttacggttacctttcaaaggattgggctctggaattacttgagccctagtaggcactgctttctgagcactttattgtcatggaggagctctgccaagaaaatttaaaacaaattcttcttcccaaagtgccaagcatttctccattatgaaatttctacggaattccatgagaagtctcctctgtaaaatgagcctccatacttctgcacagctgcaatacctggcaacttccctagccctaggatgtgaatacagcaaacaacaactccactggctgtcaaaaccgcgagcaagttctggaaatggaagcacgctgctgctctcaccacagaaaacgaggcacacactgattttattacctgggtagtctcaactagcaagatgctcctaaaaggacaggcagactaatggtttatttctggcatgccaagtgccttggtagaagaaattaattttgtttttcttttgctatcatccttgactctctcagcaaggacaattaagcaatgctgattgaagaagtcatcattgtgtgcttaaatatgttaggatccagtcagcaaagatgggcacaagcattctctaagagcttttcttccttttacttcctaggagagcaatatgccatcttgtgaactaaaagtgccccctgaccgacaccaaaaattaaagacaaatgttctgcatatcaactgcaatgcaaatcattctgctatcctctggagtttgtaaagaagataattcttacttcatttgctatagggaggtgcatctttctggcatcttccacagtactgtgctgtcctggactctgtccagagtcaacagctgagcagcatgatgtagcctatgattcaaaggcccagggcagaagggaaataattccccaatgccactttgtactatcttgctttttacataaataaatcaacatcttctgaaagatatttgattgtgtagttagtaaatttaagaagtttgcttcatgtgaagatgcaacaagttatatttagtcttttaaaaattggtcactgttgagagaagaaccacacc

SEQ ID NO: 75050 - DNA, 640 bp, Homo sapiens
taaaaaagaaggaatttgatcaaaggtaaacagtctaacgtaatgaaccaaagaaaaagctttcaggactttcaaatgttaactgtktttccccttcctatctaggaaaatgctataaagctcagattagttaggaatgacttacaccttttgttttgaaaactaagagccggtttccagatatttatattcccgtatttcttgaatgcttagaatgactacaattctgcatcgataccctctattgttaatttttaacctgcctggaatctttttcctaaaaaaaaaaagatattttcagatctgaaaaaaaaaaatcaaaggaaccataaacgtcatcaagtctaatcatatccaaatgtggtccatcaatcaacctcagcagaaataattggggaagatttaaaaattcagggaatgttgacctcatctctgagataagattaataaatattttatgattgtctggaaagtaacagcgtacagtttaacctatattctaattttgattcatgattttaaataattaaactttaataattgatatggtttggatatttgtcccctccaaatctcatgtggaaatgtgatcatcagtgttggaggtggggcctggtgggacatgtttggttatgatagt

SEQ ID NO: 75051 - DNA, 640 bp, Homo sapiens
taaaaaagaaggaatttgatcaaaggtaaacagtctaacgtaatgaaccaaagaaaaagctttcaggactttcaaatgttaactgtttttccccttcctatctaggaaaatgctataaagctcagattagttaggaatgacttacaccttttgttttgaaaactaagagccggtttccagatatttatattcccgtatttcttgaatgcttagaatgactrcaattctgcatcgataccctctattgttaatttttaacctgcctggaatctttttcctaaaaaaaaaaagatattttcagatctgaaaaaaaaaaatcaaaggaaccataaacgtcatcaagtctaatcatatccaaatgtggtccatcaatcaacctcagcagaaataattggggaagatttaaaaattcagggaatgttgacctcatctctgagataagattaataaatattttatgattgtctggaaagtaacagcgtacagtttaacctatattctaattttgattcatgattttaaataattaaactttaataattgatatggtttggatatttgtcccctccaaatctcatgtggaaatgtgatcatcagtgttggaggtggggcctggtgggacatgtttggttatgatagt

SEQ ID NO: 75052 - DNA, 640 bp, Homo sapiens
taaaaaagaaggaatttgatcaaaggtaaacagtctaacgtaatgaaccaaagaaaaagctttcaggactttcaaatgttaactgtttttccccttcctatctaggaaaatgctataaagctcagattagttaggaatgacttacaccttttgttttgaaaactaagagccggtttccagatatttatattcccgtatttcttgaatgcttagaatgactacaattctgcatcgataccctctattgttaatttttaacctgcctggaatctttttcctaaaaaaaaaaagatattttcagatctgaaaaaaaaaaatcaaaggaaccataaacgtcatcaagtctaatcatatccaaatgtggtccatcaatcaacctcagcagaaataattggggaagatttaaaaattcagggaatgttgacctcatctctgagataagattaataaatattttatgattgtctggaaagtaacagcgtacagtttaacctatattctaattttgattcatgattttaaataattaaactttaataattgatatggtttggatatttgtcccctccaaatctcatgtkgaaatgtgatcatcagtgttggaggtggggcctggtgggacatgtttggttatgatagt

SEQ ID NO: 75053 - DNA, 1196 bp, Homo sapiens
tgcatagttcatgggttaaattgagaattgtgtatagttgtctccggaattagcatatccccttctttgagtctcatgtctcagggattcacctatgccttctaacccactgggtcctcttttctgctttttgtggttcaagaagatttgtttcattggagtttcagttatgagtaaaaagaagagtaagaggaaactcatgctcatgtgagttgcttctataattttggtctcccatgcaaaagttttatacttttatttagttactggtatcctaagattactgtttttgttgttttttaaaataatttgtgtagagttttctgttattgtcaatggaattgatgggctactccaccaagccagaaatggaactgtacaatgtcacttttgatataaataattagtgcatatagtatttgcttctgattgtgttattttgaatgttatatctctctgtgaacattatataataaaagactcataatcatcacctgattccactgaaaaaaaaaataacctcaaatcatctattcaaattgttgcctctaatgactatcttgttttaattttctatttcactatcaaaggtgccatttcacaaaaaagtgatgaatcactcaaaatatctagctttcattgaaagttagtgtattagtccattttcacaagctataaataactacctgagacttaactgactcacagttccacaggcttaacaggaagcatgagtaggaggcctcaggaaacttacgatcatggcagaaggcaaagggaaagcaaataccttcctcacatggtggcaggagagagagagarcacaagggagaagtgtcacacttttcaaacatcagatctcgtgagagaacactcactattatgagaacagcaaaggggaaatccgcccccatgatccaatcatctcctaccaggtcccttccctgacacgtggggattacaatttgatatgagattttggtgggaacacaggagccaaaccatatcagttaataataataaatttatcttatacatttcagtaatattacattcttaagaaaggcttactactctaaatgtgacctagcttcttgcttttactgagaaatgggctttaccagatgagaatttattcctagatatctaggttcatggaggtattcagtggaaaccactgaaaaacataagaaaca

SEQ ID NO: 75054 - DNA, 1454 bp, Homo sapiens
atttgcttcctcctgactagatagatgtgtgatcttgggaaatgcctttctaactctgatccgcagtttcctcaactgtaaaatgaaagtaatccctctctcaacaaaactgctgtcagcattaaataatggagtgcttagcataaaatcaggtaatgccaaactatttcataaatggtgataatcattatcaaaatgaatgatgtgctctcagtacaaattgatccctagttatagcagtatcgtaaatcaggctttttttaaatattatttcacaaatactatctcattttatacatacagtaacttcaagaatttgcatgaaggaaatcttttttttttttttttttttttttttaggagacggagtctagctgtattgccaggctggagtgcagtggctccatctaggctcactgcaacttctgcctcctgggttcatgtgattctcctgcctcagcctccttagcagctgggactacaggcgcccaccaccacgcctggctaatttttttttttttttttttgtattttagtagagacggggtttcaccatgttgcccaggctggtctcgaactcttgagctcargcaatccgcccgcctctgcctcccaaagtgctacgactacaggcatgagccaccgcgcctggccaataaatcattctttagtttgtagatgagaaatctaaggttatgagagacttatatttcctcaaatcattccacacagtcactgcagcaaaagatcccaaaatcagatgttctaactctccattcttggatacttgttatgacatcatattgcattccagttttagaattactaagttacgtattttggttcattgaaggactttaatgctacaattctcctgaattaaaacagaaagaaaaaccatgaatcttttagctattttccctcaaaacttcatttcatattttgatttaaatgattcttgtcttgttaataaatttcagaaagattgatctagaaaattattaaacctgattttgttcttcaatgaataaaatggccttcaagagagctatagtatgatttgcaaactgtactttatgttttgacaaaagaaactttaatattcctgtatttttccactgcaggtgaatttgatattcaaaagatgagaagactaatggttctgattagagtgaagcagaaagtgaggaggatgtgagaactttcccacacagacatttagccagataatttaagcttgggtgtctgttactttattttatttaaaacaaaattggctctatttctggaaattcctgacttaaccatgtatttcaatctttacctgaacgaatacaatccttatatacctaaaatcaaagtagtcaggtaggaaactcacaaagcatgcatattcaacaacattgtgcttttaaatctctcacattttctgatctttgagtatgtctccatat

SEQ ID NO: 75055 - DNA, 694 bp, Homo sapiens
ttatatactattatggatcatttaataaaaaagagaactgagacccatcaaagttgagtgattaatccaagattccaaacagcttttagtggcaagttcagaactcaaaccacaggtttttaacttgcagtttactgtctttccaccacaccatgcttcctttaaacatgatcctcgcctctccaaacattttttctcttataatagtttattcatctattcttcttcttctattttttttttttttttttttttttttttgkgacggagtcttactctgtcgcccaggctggagtgcagtggcatgatctcagctcactgcaacctccgactcccgggttcaagctattctcctgcctcagcctcctgagtagctgggactacaggcatgcaccaccacgcccagctaatttttgtatttttagtagagataatgtttcaccatgttggccaggctggtctcaaactcctgacctcaggtgatctgcctgcctcagcctcccaaagtgctgggattataggcgtgagccaccacgcctggcccatccattcttcatatattgtgtttttcagattctgtattattttagtgagtccttagcatttagttgatatttctcttcaaatacctaatttaaatgatcagctacttggtctgcaaaatgtctgttaggtgaaaccatcaaatttattt

SEQ ID NO: 75056 - DNA, 756 bp, Homo sapiens
tggctactacatggcttagcatgtaagaggcatcctaaaatactttcagaatgaatggataaattcaaaattaaactgtactctaaatgcagtctaatcaatgaatggagtagaagcaccccttactccaatttagcctaaggttattcaaaaccacaaatcttttagaactgaactattgataaataggtgagggtttctcaaatcccttccacacaaagctgactttctaagtctcaatgcagaatacatattctattaatatttatctaattatttttcaaacatatctctgccatccactatattaactatttctctcagattcgaaccatttgcmaatggaatagacacaacctctattcagccatgggtgagaacattaaatgcaacaatgctgaggacaaaggagggacagtgcaattccatgagagacatttttttttaatttaatttaatttaggccagtcgcggtagctcacgtctataatcccagcactctgggaggccgaggcaggtggatcacgaggtcaggagatcgagaccatcctggctaacatggtgaaaccccgtctctactaaaaatacaaaaatttagccaggcatggtggcgcgcgcctgtagtcccagctacttaggaggctgaggcaagagaatcggttgaacctgggaggcggaggttgcagtgtgctgagatcgcaccactgcactccagcctgggcgacagagcaagactccatctcaaaaataaatata

SEQ ID NO: 75057 - DNA, 650 bp, Homo sapiens
ggaatgctgccccactgcctcctgtgcacatgtgcgtgggtttcctggctgggaagcggtgcagcctaggggcttggtgtgggtcatgctcccagggaaggattttcgcagcagaagagagaaagtggtggcatgagtcaaagctctgcttcaaagtcactaatccaagcgccacgcgtccaaacaagtcacggagtcaggctggaggctgcacgtcggagcagtgaggtcctgcccttggaagccaagtctggggctgtgaaaccactcgtgaagtaaagcacagagggtcaagcactctcagcatcctgcgttcttccataagcacacttacaaaggtaagggaagacagactctcgagacatgaagaggagcggcccctctggtgaagacacagaggacctgaatgacaggggcagcgtccaggcaagggaagtggtgcaaggccctgaggccagtcaggtggctgaaggaagccaaggagcactgcctggagcaggagaaccagagggagggtggcaggggcaggtcagagaagcagcagcgccggagagaagtcacgggaagacagtgagccrggagggctgagccacgagggcagctccaggagctgaggccatccaggagcaggcaggaggcagacagcccat

SEQ ID NO: 75058 - DNA, 669 bp, Homo sapiens
aatatttctgcatagatttgggggctgacacatttaatctcaggatataataatattaataacagctaccattttgagcacttatataacaagaaccttgcttaacaccttacatttattatcttctttatattgccatcaaccttatgataaatattatttccattttgccactgaggaaatggaggatctagatactactctctccagagcttccttaatcattacccatgtctatatcaccacaattactatatactgagggttttgctggagatggcttgtatccacttgcaagagctgattgttaaatttgtaggaagttggtgagtttgtggctttcatgttgatagcttaaaattggccatggtggagtatttacaactggaaatcagcaaatgctacaaatcagggctgtttttgagaaagagtgtgtgaaactttttcaacaattaccaacatactactgccaagaaagaatattttcagtatcatggaactacttgaccctttcctcccctccacatttttttgtctcgagaacatttaatgtgacaaagcagtaaaacagaacraataccctgaggaatggtgccagcctctaggctaggtgtggacttccctacatagtctcagtttcagtgcctggctggcttgattctgcccttt

SEQ ID NO: 75059 - DNA, 857 bp, Homo sapiens
tcgcctggatggatgttyacctggatagatggtcacccagctagatagtcacctggatggatggtcacctggacggatggtcacctggatggacagtcacctggacggatggtcacctggatagatggtagcctggctagacagtcacctggatggatggtcacctgacagacagtcacctggatggatggtcatctggatggatggtcacctggatggatggtcacctggatggatggtcacatggatagatggtcacccggctatacagtcacctggatggatgttcacctggatagatggtcacccggctagatagtcacctggatggatggccacctggatggacagtcacctggacggatggtcacctggatagatagtcacccggctagacagtcacctggatgtatgttcacctggatagatggtcacccggctagatagtcacctggatggatggtcacctggatagatggtcacccggctagacagtcacctggatatatgttcacctggatagatggtcacctggctagatagtcacctggatggacagtcacctggacagatggtcgcctggctagacagtcacctggatggatgttcacctggatagatggtcacccagctagatagtcacctggatggatggtcacctggatggatggtcacctggatggacagtcacctggacggatggtcacctggattgatggtcacatgactagacagtcacctggatggatggtcacctggatagatggtcgcctggctagacagtcacctggatggatggttatctggatagatggtcacccggctatacagtcacctggatggatggtcacctggat

SEQ ID NO: 75060 - DNA, 857 bp, Homo sapiens
tcgcctggatggatgtttacctggatagatggtcacccagctagatagtcacctggatggatggtcacctggayggatggtcacctggatggacagtcacctggacggatggtcacctggatagatggtagcctggctagacagtcacctggatggatggtcacctgacagacagtcacctggatggatggtcatctggatggatggtcacctggatggatggtcacctggatggatggtcacatggatagatggtcacccggctatacagtcacctggatggatgttcacctggatagatggtcacccggctagatagtcacctggatggatggccacctggatggacagtcacctggacggatggtcacctggatagatagtcacccggctagacagtcacctggatgtatgttcacctggatagatggtcacccggctagatagtcacctggatggatggtcacctggatagatggtcacccggctagacagtcacctggatatatgttcacctggatagatggtcacctggctagatagtcacctggatggacagtcacctggacagatggtcgcctggctagacagtcacctggatggatgttcacctggatagatggtcacccagctagatagtcacctggatggatggtcacctggatggatggtcacctggatggacagtcacctggacggatggtcacctggattgatggtcacatgactagacagtcacctggatggatggtcacctggatagatggtcgcctggctagacagtcacctggatggatggttatctggatagatggtcacccggctatacagtcacctggatggatggtcacctggat

SEQ ID NO: 75061 - DNA, 1299 bp, Homo sapiens
ggcaggaggattttgcttgagcccaggagtttgagatcagcctgggcaaacagggagacccccatctctacaaaaacttttaaaaataattagccaggtgtggtggtacgtgtttgtagtcccagctacttaggaggccgaggcaagaggatggcttgaacctaagaattcgaggctgcagtgagccatgaacacaccactgcactccagcctggccgggcaacagagtaaggtcctggctcagagaaaggaaaaaaaaagatatagctgagttcaaaagaaagaaaaggcagtacctgcgtggcctgaaacctgaagcaggctggcaggagtgtggtcttggcccagagagcagagccctggttccagccctgtttctgggacaggatgcttcgggctgcttctgcctctgaaaggaaaacaagtctcccatgaggggaaaatacaaagtctcccaaacttttcagtgagtctgaacttctaccactcatatgccatgggaacctcaagaagaaaaattatcctaaaagccgcctcagcctgggccactcccggggcctccagtagcaacaaactcacctggctctccaggggcccttcccagctcagggcccagtagaccagggagcggttgccacggagggggctttgacaaaagaaatacatgcataaacaagtcaggaaggtgctgcagatgtttttaaaatgcatgcaatgatgaggaaacaaataaaaacatcaaatgttccaacgtgtgtggcttccagcctgccaggtgcggatccatatgaatgctcacaaaccctttcttactgcatcctcttttattccttaaaaattatagcataatattttcccagggctgtcactttttagatcatttttctttagcagataaaagtcaatactgcttttcagaaagaaaaaaaatattgaaaaaaataccagggtgggtgcaggggtggggctgagccgaggagccggacgcagcgagagccaggcggagtcagggaccccggcatcccgggcgggcggagtcagggccccccggcgtcccgggggggcggagtcagggccccccggcgtcccgggtgggcggagtcagggcacccyggcgtcccgggtgggcggagtcagggcaccctggcgtcccgggtgggcggagtcagcaccctggcatcccgggcggaggagtcagggcaccctggtgtcccgggcgggctctgccgctcactgcttttgcagcagtgcagtcatagaaaccctctggccctcagctttatccttctgagaaatggg

SEQ ID NO: 75062 - DNA, 1599 bp, Homo sapiens
gggaccctccgccagtcaccccagaatggcccctgggcaccccgaagtgtatgtatgtgagatttggctggggcagctcacagcagaaaggccccccaccttccaggagcagggacagtcaagttcgtccagtcccccttttcctcgtgcgggtgttgtttccatgagatgagaccctgtcagccttgaattctgactgcctcggggagagggaggcagacccacggcttgcgagagagagttattccgaagatgtttttcagcccaaacctggttgcttgtaacttctgtcctctgttctgatcccggaggctcatatacaacgcagccctggggttctagggttctcatggcctctggagagaagcgctgagcagggctgcatcccccgttagcagcagtcaccctcagcatccccactgttggcccatccactaacatcccacccacttattcaaacccaggccacccaaagcttcccctattccctgaataaataaggcgggagccaagggatcaagacggagtgaggagacttgtccccactgccctattcagcccctgccaggaggaggtggggctggcagtgtcacatccaggccctaagcatgggaacctgacacctgggctgyacactttgcatccagcttctcctcacatgtcgtttcttaccaccgatgagcctcgtccacatcagtgaagccttggccaagtggctgcccagtgccagggactcactggtgccctcacagggcaggatccacgggccgctactttcatctgggcatgtcccagcagcacaggaaactgatatccagggctgcacaggtggcgcagaaatgcgagatccgaggggagagatccctgggcttcagctgcctgggagtccttctggaagaacttgattctgagctgggcctgcagtgagggggagggcttaatgaggctaattagcatcactctctggtacagagtgtctttttttggtgacagctttattgagatgtaattcacacaccacacaattcatccatttaaagtgcagaattcagtggcattaacatattcttagtattgtacaactgccaccgcaatcagttttaggacatttttattacctcccagaagaaaccccaccccctttagctatgaccttccaatctcccatcagtcccccaccccaacctagacaacactaagttacttcctgtcccaggagattttcctgtttgggacttttcagtccgaatgcaatcatacactcagaagctatgtggttctttgcctctggcttcctttattagcattatgccttcaaggtccatgcatgttgctgtgcgaatcagtgcctcattcttttttatatggctgaataatatcccagagtatgtagaccatgtatcacttattcattcacaagtcgatggacactgtgttgttttcactttttggctacataccatgaataatgctattatgcacacgcttgcgtagatttttgtgtggacacgtgttttcgcttctcttgggtatataccgaggagtggggttgctggaacatgtggtaactgtgtgcttaccctttagaagacctgtccg

SEQ ID NO: 75063 - DNA, 1283 bp, Homo sapiens
tgcattttgatgtttatggggtagacccattccagggtcctgggggtctggtcacacaccttcagctgcatgggtttccaacacaagacccagaatcaagcctccccgtcccggccctggcactctgggcttgtgcttaggtgtggaatgctcaggtgtggaacttcccctgcaggtcattgtyggctgcctctcaccactggctcaggaatctcagattgtgtttgggacaagcagaccctgagatgcagcatgcaagcaaggaattcatctaaaaagtgtcctctggagaaaatggcaactttgaggggaagcagggcaggggaggggtggaagctagagagggtgatttcaggtggagacccagcctcagcctggtcctgtgcgagctctggagggagaattgtaccttggagggtgccctgtctccaggttagaaagcgaggcctccacacccctgcacctgtcatcagtggctgactgtagacatgagctcccggatacacacttccagggttctctggagttcccaggcacaaagcctttgaaagcaaagtgcacagaagccaggggccagggcctcagagagtagagtatggggccactgggtgatcagccaacagcatctgccacctggattcactctgggctagacaccaacgccaggccacaggtcctgcctctttcctttttctcttcgttgatcttatacacattattaacccaacactcccaaagaccctcaccagtgattaaaagtagcttctgtttgctagtgaggatcccctgaaattgtgaactgaaggctaacttgtcatagcaaaatgctcccaaaggcaaggaataaaactatttttgtcttctgtccacaacagtggccgaatgtaagcctgatccatagtacagcacccggcaaatcgacactcatcctaaccccagtcatcactgcgcatgagtactcacctaactgcttcctgaagggaccatgtctctgatgtcaggaggaagctcggctgggagtgggcaggggtcctgtccaacaactaactgtgagccggcaggagtgggagcctggcccagccctccagtgcccacagagccccttggacctagaactttaatgagctctcctcagacctgaaactccatctctccagggtcagggccagtcctgtgtgaaccacagtgtgggaatcttggaggtcttctgtagggggtgatatttgaactctgccgtgagatgtggcagtgaccaggatgtgggaagaggggtcttccaggcc

SEQ ID NO: 75064 - DNA, 1283 bp, Homo sapiens
tgcattttgatgtttatggggtagacccattccagggtcctgggggtctggtcacacaccttcagctgcatgggtttccaacacaagacccagaatcaagcctccccgtcccggccctggcactctgggcttgtgcttaggtgtggaatgctcaggtgtggaacttcccctgcaggtcattgttggctgcctctcaccactggctcaggaatctcagattgtgtttgggacaagcagaccctgagatgcagcatgcaagcaaggaattcatctaaaaagtgtcctctggagaaaatggcaactttgaggggaagcagggcaggggaggggtggaagctagagagggtgatttcaggtggagacccagcctcagcctggtcctgtgcgagctctggagggagaattgtaccttggagggtgccctgtctccaggttagaaagcraggcctccacacccctgcacctgtcatcagtggctgactgtagacatgagctcccggatacacacttccagggttctctggagttcccaggcacaaagcctttgaaagcaaagtgcacagaagccaggggccagggcctcagagagtagagtatggggccactgggtgatcagccaacagcatctgccacctggattcactctgggctagacaccaacgccaggccacaggtcctgcctctttcctttttctcttcgttgatcttatacacattattaacccaacactcccaaagaccctcaccagtgattaaaagtagcttctgtttgctagtgaggatcccctgaaattgtgaactgaaggctaacttgtcatagcaaaatgctcccaaaggcaaggaataaaactatttttgtcttctgtccacaacagtggccgaatgtaagcctgatccatagtacagcacccggcaaatcgacactcatcctaaccccagtcatcactgcgcatgagtactcacctaactgcttcctgaagggaccatgtctctgatgtcaggaggaagctcggctgggagtgggcaggggtcctgtccaacaactaactgtgagccggcaggagtgggagcctggcccagccctccagtgcccacagagccccttggacctagaactttaatgagctctcctcagacctgaaactccatctctccagggtcagggccagtcctgtgtgaaccacagtgtgggaatcttggaggtcttctgtagggggtgatatttgaactctgccgtgagatgtggcagtgaccaggatgtgggaagaggggtcttccaggcc

SEQ ID NO: 75065 - DNA, 1283 bp, Homo sapiens
tgcattttgatgtttatggggtagacccattccagggtcctgggggtctggtcacacaccttcagctgcatgggtttccaacacaagacccagaatcaagcctccccgtcccggccctggcactctgggcttgtgcttaggtgtggaatgctcaggtgtggaacttcccctgcaggtcattgttggctgcctctcaccactggctcaggaatctcagattgtgtttgggacaagcagaccctgagatgcagcatgcaagcaaggaattcatctaaaaagtgtcctctggagaaaatggcaactttgaggggaagcagggcaggggaggggtggaagctagagagggtgatttcaggtggagacccagcctcagcctggtcctgtgcgagctctggagggagaattgtaccttggagggtgccctgtctccaggttagaaagcgaggcctccacacccctgcacctgtcatcagtggctgactgtagacatgagctcccggatacacacttccagggttctctggagttcccaggcacaaagcctttgaaagcaaagtgcacagaagccaggggccagggcctcagagagtagagtatggggccactgggtgatcagccaacagcatctgccacctggattcactctgggctagacaccaacgccaggccacaggtcctgcctctttcctttttctcttcgttgatcttatacacattattaacccaacactcccaaagaccctcaccagtgattaaaagtagcttctgtttgctagtgaggatcccctgaaattgtgaactgaaggctaacttgtcatagcaaaatgctcccaaaggcaaggaatmaaactatttttgtcttctgtccacaacagtggccgaatgtaagcctgatccatagtacagcacccggcaaatcgacactcatcctaaccccagtcatcactgcgcatgagtactcacctaactgcttcctgaagggaccatgtctctgatgtcaggaggaagctcggctgggagtgggcaggggtcctgtccaacaactaactgtgagccggcaggagtgggagcctggcccagccctccagtgcccacagagccccttggacctagaactttaatgagctctcctcagacctgaaactccatctctccagggtcagggccagtcctgtgtgaaccacagtgtgggaatcttggaggtcttctgtagggggtgatatttgaactctgccgtgagatgtggcagtgaccaggatgtgggaagaggggtcttccaggcc

SEQ ID NO: 75066 - DNA, 690 bp, Homo sapiens
agcccagagggccagtctagaagcaataaccgatgtgtagcttggcatgaagagatgcgctggggcagtcagtctttctttgtctctctgaggtaagagatcttgaagaatgaggcagttacaggtaaagccacaaagcagagataggccctagaagaacgtcaggcaagtggaagtgacgtggaagcagagatgaggagcaggtgatggctacaaggaamgaagagctatcctagagtccggggaaagaatgagaagaggatggagcagattcagagggaagcagactcccggagagaggggatgagccactgagaaggagatagagagcaatcagacagggcaggctaggttctgctgtggaaacaaccccaaatatcaggggctaagcccaacaagagtttcttcttgaccacgcatgacctgtccatcacaggtcagcagggaaggctccgtgcaccatagtcacatgggaacgtaggctgatagaggctgatgcgtgcttccacagttgcagaggcaggtgaaggaagtttagccaattgtacactggcccttaaggcttctgtctagagtgacacatgccccttctgcttacaattcattgactaaagcaaatctcatggctgtgcctaattttaaagatggaagagtcgtgcaatgctactgtctgtgtggaaagaggagaaa

SEQ ID NO: 75067 - DNA, 739 bp, Homo sapiens
cactctctgttgctctccctgaagccacgtggtaacagagatccggagggctgcactaagccttgctcagcactgacccctgactgggaatgcccagagctttggccacctggggacctatagctgtgcccaacacctttcccmctaaatgcatttccccagccacatcaggcttcgtacaagctgttccctctgcctcagatgctgttccctccttcatctgcctggtgacctggtggtcctgctggtcccagcttaaacaccacttacactaagatgccctttcaaactcccgtgggcagggagtgaatctgtctctcttctacctggccttccactgcccctagcacagggctcctgccctcatctacttacaagagggtctccctgaccctcctatgagctgcctggggaccaggaccatatgtttgtcatctttatacccctgcccagtatgctcagcacatggttggagcttcatcagtctctccagaatgaatgaatgaatgaccatcaccgcccttaatgcatagcctcagataacccacaggccaagtcaccctcccaaaacctgccaaagggctctcctgggctgtcaccctgctcaggggaatcttgtcctggtatgacatctatcagaggccacccaaggaattcagcaccagagcacctaaggccaggaaggggatttagagataaatggtcctcttcatttaagtgaggagcaaaccggggccca

SEQ ID NO: 75068 - DNA, 539 bp, Homo sapiens
atgcttaacgaatgactgtgttactaccaagaattattgtttcactctccctccttccctctcctctgctgccccaaactactcagcatcctggcactgcaggctcgcacttagccctggatacccagattcatcctcctcccctgggatggcatagaagagactttaaaaccaaatgagccaagactccaagctctgaccacacctcccaccccaccagtcttctctatgcaccccctctatctggagcccccagccaggtcctggaccmaggtagctacatggcagagcatttaatgtgtgcctggcagccatgggcaccattctccacacagaaggcaggggacaggtgcacaaggcgctgagaccccagcagggctaactgtccttgtctcaggagccctacctggccagtcttgggccaggccttggggactgggagtaggggctgagccccgtctgtacagtctctggccccatgggcaccaggtgccagctcctcgcacccagtactcccattgctagggctgctggaacct

SEQ ID NO: 75069 - DNA, 539 bp, Homo sapiens
atgcttaacgaatgactgtgttactaccaagaattattgtttcactctccctccttccctctcctctgctgccccaaactactcagcatcctggcactgcaggctcgcacttagccctggatacccagattcatcctcctcccctgggatggcatagaagagactttaaaaccaaatgagccaagactccaagctctgaccacacctcccaccccaccagtcttctctatgcaccccctctatctggagcccccagccaggtcctggacccaggtagctacatggcagagcatttaatgtgtgcctggcagccatgggcaccattctccacacagaaggcaggggacaggtgcacaaggsgctgagaccccagcagggctaactgtccttgtctcaggagccctacctggccagtcttgggccaggccttggggactgggagtaggggctgagccccgtctgtacagtctctggccccatgggcaccaggtgccagctcctcgcacccagtactcccattgctagggctgctggaacct

SEQ ID NO: 75070 - DNA, 1032 bp, Homo sapiens
actcttgtacatttttataagtgagaataattttagctgattatgtgtgtatatatatatatatatgcatctgcaaacacatatgtgtgtgtatatataaataattcatgttttgtaacaaagttctacattttctacagttacatgctggtgctatcacttggcaattgccgaccctccaaaaggcatgaaaatgaaaatattttacagtataaattctttcaggctactagagagtactttttgctaagctagacttgaaattttatagctagctccttggcaacctacagtggttacgtcctttttgaagagcttgatttataaacagggcattcttggtgtatgcacttaacattggatttagaattctgaccctatggtttcatacctatacaatgctgtggatagcaatgatgatatgtaggaaataaatatttcaacattagactcatgttttcaaagtggattcttctagatgctttttaagatagccacatttggccagaaccccatgtaatcatcacccagtcccagtaagtgacaacccatgcccagtcttgcccgctgaaaatcccattcagtacttcttttatattattttgaagcaaacccaagataatcatataattttttccataaatatttcagtgtctatctctaaaagataaccacaataccattaacacatctaaaaagacttagcaataatttcttaatataattaagatagaattagtattcagatgtcatttattgttattcagaattaccagtgattaagattgtgatagattttttctaaacacacctatttttcttcccaaatctgttatcctattgtcctttgatacttttwttttttaaactccttttcgtcttgcccagccaggaccgtactgttggacatttcaaccacactcttatcactacctttaattctttcaccccttgaccctcttttatgcttactcatcctatcattaaccctacataaagctaaaattggttttctctgtgcctgggctgtca

SEQ ID NO: 75071 - DNA, 755 bp, Homo sapiens
caattcaagataagatttgggtggagacacagccaaagcatatcatgccattataagtggccagagaactaattcactctcttttctccacgtgagtaacaatgagaagtcagcagtccacaacccagaagagggccctcatcagaacccaactgtgctggcgctttgatctcagactttcatcctctagaactgtgagaagtgcacttttgttgaaaccaccctgtctatggtactttgttacagcagcccaaatggactaagacatatcctacttctgccattgacttggaatatgacatagggtgtttttcctattccaacttaataggaacttatttccttagtggtggtctctggggtctgagtcaattgccacagagccagagaagaattgaatgcagaagtatttgagatctaagcttaaagcccagtctcctcctctggatgttcacatagtcatgcccatctgcttctcctgccactcacagcccactccaccctatttgctcagcactccagccaaacgaaacagctggctattctcaggcagraggcacgacgattgtaccttacttatgccatcgcctctgcttgggacacccttttgcacagtcagactcctacacagagcttcaagacttgccctgggaagactcttctgacccctcagataaaataagtatctctttctctcgtgttcccacgacctatttatcttaggtcaggttttctagaagcaaaggctaagacag

SEQ ID NO: 75072 - DNA, 669 bp, Homo sapiens
ggatcctgaaggcatttacccaggcccagctgggagaaaacatcacaatagagaatcagctccacctgtcaactctggtttcaaagacagcctttccaaaccttgttctcagtggcagagccattatgttttacattatttaagagatgggtcaagaatgaaattgtaagcataaaagtaatgaatgttacaaaacaaaaaattaaaaaatasatttgacaatagaaaatgctaaattcctatgtgtcgaaaaaaatccccaaacaaaattataaggccaatgacaacctaaaggggaaaacatttctaatgtataggataacatgtcaatgacttcaacacagggtcatcatacaaatcaacttaaaatatatgtcctttgtctgaggaagagaacatttgcagaaggataaacggtcaagaagtatttctaaaatgtttatccttactggcaaccagaaacacaaattaaataaaggtactgctttttacctaattgatctttatttttttaagataatacttagtgcccttgagagtaccataatgtaggccctttccctcggtgctgtgggagagtaaattccaggaaagcaatttagcaatacatatcaaaagccctactaatgttatctcctttgatcctgtaattgacttctgggaatctgt

SEQ ID NO: 75073 - DNA, 417 bp, Homo sapiens
  misc_feature (1)...(417): n = A,T,C or G
tcatgcctgtaatcccagcactttgggaggccgaggcgggcggatcacgaggtctgcagattgagaccatcctggctaacatggtgaaaccccgtctctactaaaaatacaaaaagattagccaggcgtggtggtgggcgcctgtagtcccagctacttgggaggctgaggcaggagaatcacttgaacctgggaagcggaggttgcagtgagccgagatcacgccattgtactccagcctggggaacaagagtgagactccatcccaaaaaamaaaagaatataaatgcattgtcaaattggcaagaaaataaggatctngagaagaacaagatgcaagtgagagcaggaatctatgttttaataggtgtgtgagccctgaaccagcttgccccagtgggagggtgtcggctggat

SEQ ID NO: 75074 - DNA, 426 bp, Homo sapiens
aaaattagccaggcgtggtggcatatgcctgtagtctcagttacttgggaggctgaggcaggaggattgcttgaaccagggaggtggaggttgcagtgagccaagatcacgccattgcactctagcctgggtgacagagcgagactccatctcaaaaataaacaaaaaaagaagagggacattgacaatggtaaagccacacagaccacaaaagccaacatgaaacacgtgtggcagggcagcccgaggccatttagtttaaggcttctacacatgctgcttggtatccaagatgagttagcaccaagaagaaaaaggggtgtgtgtcgcacatgtccataatactgttgagtttttttttttttttttaatagagatgaggtctcactatgttgcccaggctgstctcaaactcctgggctcaag

SEQ ID NO: 75075 - DNA, 914 bp, Homo sapiens
  misc_feature (1)...(914): n = A,T,C or G
taccatacagagtcatttcctgccctaaaaccccctgtgctccacctcttcatctctcccctaaccactgacagccaagatgttttttttttttttttttttaatgctgactgttacagttcacaagaagtayggaggacacacatctgggtgggaccgggacagaaagacttacatggtcctcaggcatggacaggctggcattccccagcctctctgcccattagggctgatatagacatggaggacagctttgacatcaagcctttccccagatgcaatcagaggtaggagaagtctctaggggtcaggatcaagcctccccctaactgtgccctcgaccacttcatttattggggcagatctctaccccagggccctcaaagcttatccagaaccttcccacggaaggaagctctgacttgggctaattggacaagtaaaatgaggttgaacgaggcatcctccatggcccttccagctccaaggactgggaacctccaatgcgttaggcatcggggtgagttggctgctctctccccatagtggcgattctcccttcccaagaggtaagagaccctcgggaattgaggagtgaagtgactcagaagcgcaaggcgaaatgcttacacagctacagagccacctcctcactagtggcctcctgggcaccagtatcagttccttcctcccttcaagagtcagcttagcccagaggtagcttggtggcaaagcaggggtgcaggggccttcatcctgtgcccttctgccatgccacaactctctccactctcagccatcagtgccagtccagagtcccacggtggttcctagggccgtactgcccagccttgccgcaggngtgaataaatgcttgtttggtcaaatctgaatcctggtgcctggcattccca

SEQ ID NO: 75076 - DNA, 914 bp, Homo sapiens
  misc_feature (1)...(914): n = A,T,C or G
taccatacagagtcatttcctgccctaaaaccccctgtgctccacctcttcatctctcccctaaccactgacagccaagatgttttttttttttttttttttaatgctgactgttacagttcacaagaagtacggaggacacacatctgggtgggaccgggacagaaagayttacatggtcctcaggcatggacaggctggcattccccagcctctctgcccattagggctgatatagacatggaggacagctttgacatcaagcctttccccagatgcaatcagaggtaggagaagtctctaggggtcaggatcaagcctccccctaactgtgccctcgaccacttcatttattggggcagatctctaccccagggccctcaaagcttatccagaaccttcccacggaaggaagctctgacttgggctaattggacaagtaaaatgaggttgaacgaggcatcctccatggcccttccagctccaaggactgggaacctccaatgcgttaggcatcggggtgagttggctgctctctccccatagtggcgattctcccttcccaagaggtaagagaccctcgggaattgaggagtgaagtgactcagaagcgcaaggcgaaatgcttacacagctacagagccacctcctcactagtggcctcctgggcaccagtatcagttccttcctcccttcaagagtcagcttagcccagaggtagcttggtggcaaagcaggggtgcaggggccttcatcctgtgcccttctgccatgccacaactctctccactctcagccatcagtgccagtccagagtcccacggtggttcctagggccgtactgcccagccttgccgcaggngtgaataaatgcttgtttggtcaaatctgaatcctggtgcctggcattccca

SEQ ID NO: 75077 - DNA, 739 bp, Homo sapiens
atccagatgctgataggtggtgttaatggagggtcacgtttggacaatagtatccatcacttcctcctggctcttctgtcagatggagtcatttcttactacgctatcactcagattttggatagattcaattattaccttcaccttggcaacaggatatacaaatctatgcccaaatgactaagtaataataatagtatttttttttttactgcacttctcctcttgttcattttaaagaaaaaatccctaagggttcaatagcttttttcctattttattctgaaaacatctgcccagttactcaaccccacaggataatggctgcttaattagcacaaatgtttgtctgaatgcctgaatgattattgctgatttttataatcttaccaatggcccaaattaagtagtctgtgtatgttttctaaagttttggaagactctaacttacaaagggtctgtgtgctgtctttatggggttttttttcccttttgagaastgtttgcaactgagtgaaaacaagaatggtattaaaaaggaaggggaggaagaggagaagagcttattatattacctttgttcataaagttaagaattaatttaaatcaagttaaagattttaaaaaattaagacactgagaagttctgcctgaaggaagtgagaatcagagagatgcaggggtggtgttgaatgtgctttgaattccgtctctgctttcttcctggacagagaaacca

SEQ ID NO: 75078 - DNA, 1319 bp, Homo sapiens
tattacgtattacatggttcataggttcccccaggcttgccttataaatcagttttctgggatatgttaattcaattactagtcttccacctgctttcctgctccaaaagttttactactttaatattgttgtccactcttcatgttacaggcttatgtctttaaaaaaatcgtttttctagcatttagtgagttggggaagtgagtgaacgatatgtgtatgctcatatgacaatatttgcttaagagattagaatgatttctcattttcttactgttaggtttttgctgtattataattgtaaatattttattgttcaagtataaagttgaaagcatattcaaacacttttctcaatgagaaaacaaaaccatttgaatgcagatataaactttttagttttttttttctgttttcttttgtctactttctggcttagagaaaagaacatggagaattgttgcacctctgaaattattggtctagaacttttaatgaagaataatattttattcttctagtcctcgcaagtacctctttgattgtgtgatgtatttgaacagatcagtccattctcttccatcttctgtctttygaccatggtgtatgaatttgcaaaatagatgggatacaggttgctatcctggattgtggaaccaagtgaaatgagaactggaaataccgcaatcaaaagttggaagtaacatcgacttccctacttaaataatgttctgcagattcaacaacactctgcctcttgcttcatgagctgatgtgtaatggggctcaccaaagacaacccagtgtttggaatggcacaggcttttggtggctttcccagcattagccctcttgatgtcaagtgcatttgtgggacggtttaggggttctagaatttcaagaggggaagaactgttacagaatgttcaatctagctgccgtgaaacactgaggtactatccaccacttggatgccaaggtgttgtatgggtggagattgaagacttccattggaaatacatttgtgggtacagtcaaatggaagttgtctatgaggaccacgtattcttctttccaggctcctatattctctcctgacaccctaagaaatgaaagcctgctccttcagtgctgattgagccttctaagtaaaacaagtgaatgtgagttgatactgctctgtggataggaggcatttaaattagggcttccagatccctgtattttcattttcttatctatcaaatggggctgatactacctatattgaatagttgttcagagttagtgagaatacatttaaaatgcctaccacaca

SEQ ID NO: 75079 - DNA, 707 bp, Homo sapiens
tttcaggctttgcattctgatatgggggaggggcagtgtccagcaatggataaggatgtgtggttgagtttagaactgtttcaccaagatttttgttgttgttgttttacatatcggactccttaaagagtcttttgttttagaaagaatccttctgagggtttcaaaagtaaattcacctctgcaagaaaagaatgattttgtctgttaaagtctgctgactacctcattgggaatccacatattcgagccagttcccaccctgaaaactaatctgatactcagtyatcctaactgaagatagtaggctgattttgtagtaagagcgtccaacatcaaacagttatttgatgttcctgacattaagcaagctctatttttctctttaaaaatttcaaactcccagaagtgaattcaaaatattgtagagccttgatggagggtgaaaggcattaatttctctcttctgaaatcgatcagcagacaggcataatattttgttttctgagaacaggatatttgcttttggttgctggtatagcagaattcttcccttcagttctttgtgtaatccattatagcaatggtgtcactttataagatttgatgctcttaattttgtactaaagcaaacacttgggatgcaagcacatttttcatcaaaatctacatcagcagtttatggaagttaatgaataaacggatcc

SEQ ID NO: 75080 - DNA, 1141 bp, Homo sapiens
tatatttgcaacatataatctttagcttttaaagagcaaaaatattttacatgtcaacaaaagtaagtaagtctggatgaaataacaaatcttttcagacattttgttgaactgaagttaaatgacctcattgttgtgcaccttcctttggagcacatgatgaatagatagatttacaaagtaaaaatttgaattgaaaacacatcattacttgagctaaagacttttctgattaatttagtttactgatttggagcctattaaacaaagagaaaagttggctgttttcaaagtactgaattgaggtttatcattattttgatgaggccaccctactatggtagggcaatgtaatcagaatgttgaattaagtcaagctctagtctaaaaagaataaactgtactcatcagtaaatgttcttaataggaatcttgaaaatatttcattattcctaatttaattaagagggcttgaacggttaactatggcccacattcgtactcaagaatacartataagaaaagccataagaaatggtgcagagagtcatttttcatacccgatttcatacctggcttttttttttcaaatgaaaattaggcttattaactttacaagcgctcattttgtatacagttctgaaactttacaatgtcatgggctacatattacagatagaaacctgtttaaaccaacatgttaattaaacattaatttataaatatttatactgggtttatgctaatatgaagttcaattatattggccctataaatataaataatggatgcgtagacctctcaatctatgtacctcaggagtggtatgtaacattcatgaaaatgtctatagacaaacattgtttcccattgttctcacctatgtgcaatattattgtactggggaataatagaagccacatgccaggtgttttcagcattagagataatgcagtcaaacactcagcacaatgccaggcacatcataagcagtgcaaagatggaaggggtcattagcattattaccagaaggtccctctccctaatagtgctatgtcattatcacccagaagaagttcactcctggcacacatcttcaaagtaattcctcataccaaccacacatgttatcagtataaca

SEQ ID NO: 75081 - DNA, 846 bp, Homo sapiens
ggatcctcctgcttcagactccaaagtagctgggactacaggtgggtgccaccatacccagttaattttttwaaattttatttagagacagtgtctccctatgttgcccaggctagtcttgaactcgtaggctcaagtgatcctcttgcctcagctcacagctgtgagccacctctcccagcctaatttattttgaataccaaatattaatagaaacactgaaatggctttttaaaatttaacttctttttgaaaaggtaatagaaccatgcaaaaagtagaaaggggtgaaaatactcttccagttctatctcccagccccgcttactcaagttcaccaatgtcccctttaaaaaatcaatagacttttttttggtaaggagttttaggtttatagaaaaattgaatggaaagcatagagatatatatttcctcatcagcttcccctattattaacattttccattagtgtttgtttgttacaactgatgagccaatattgatacattattattaatgaagattcatagtttgcattagggttgacttcttggtgttgtacattctatggatttttacaaaggtatagtgacatatatccatcattacagtatcaaagaaaatagctctactgatttaaaaatcatctgtgggccggacatggtggctcacacctgtaatccctgcactttgggaggctgaggggggaggatcacttgaggtcaggagttcgagaccagcctggtcaacatggtgaaactctggctctactaaaaatacaaaaattagccaggtgtagtggtgtgcacctgtagtcccagctactcgagaggttgaggcagaaaa

SEQ ID NO: 75082 - DNA, 658 bp, Homo sapiens
gcagacagatctgtgcctaatagtctttctgaatacagaggagctagtgaaaaacttgtctggatggtgaaagtgaagggaagtttcatctcaatgtagacaacakattgctgaaggatgtctcaggacacccagtgggaccaaaggtcacaaaaaggtggctcactctcattttcagccagagtacatatgtcttgtttggtccacacattacgtttacaaattaattgcccacatttaaaaattagaagattccatttgaaagctggctctctggcatctcttaaagtactggaatttctggtcacagttggtcaaccttcctacatggtgacaaacggctgaagccaagaagccactgccctctttagatggagtcaggtgcccagtgtgccatggtttccccctgccccatttggcacattaatgttacctatctgtttcctgcgagcatctccagtcattctcgggactacggtgtgaactgcactatgtagttctttgtgtccatggcacctagtgcctgcttggtacacaaggggtatgcaatatgcctgctgagtgaagaattcaatgaatgaattaatctattacttaaagggaatatctaaagaaggatggaagttccttttctacaggggtcacttaagactgttta

SEQ ID NO: 75083 - DNA, 2089 bp, Homo sapiens
aaaccatctgctatgtatcatataagatcctaagggtgcagaagacactaggaacttaaaagaaaactttctccttcagttatcattcagcctctcagaggccctctgaggggaggattcatctacctccccccaaccccagtcatggcatctggatgtcaacgaaagtcttctctgtttgatcatattataacctaaccaattgttgaaagcaactccaagaatatgtttgagtacctagagaaattaaagatgctatacaaatgaaaattgttattactattattttatagttttataactttccaatctgtctttaggtaagttaccttaacacttagaagtacacccagcttccagggctgttctctagagccagggtctgcagactttatggggccaactagtaactatcctaagcattatggccttaaggtctctatgcagctacccagctctgctgttgctgctcaaaggcagccctagataatcaaaaaggctgtgggccagatttggctcatgagggtcattgtttgtcaacccctgtctagaggcattagttagctgttcagagaagaccactctgtcttactctttagtgtggccttttagaataaactcttcctctgagccctctgtgtgataccttccatctgagtgactcatatactaattgacaaagtgtagcaatgccctcaaattacctctctcttctccagctgctctgagtacttcttattttattttatttcttagtaaaatgaacatcacatgggtcatgagacatcttgagatttataacagattctgtgagagttttactcctcaagagctgaaagcgtggggccaggaaagtcaacacccaaggaaatagtatattttttctctgcttgtaattcatgttgtgttttaaactgatggaaagaatcacttctgaatgagcgctgccaagtagtactgctgtttaaaagccacctacttaacaaaatggcactttttctgcaaaccaaagaagacatttagatcaaccattttggtatgccattgctataaaatgagtaaacagcaccacttattttctgatctaatccttaataaaagtgatcccacaataattgcataaatgttaacttaaaaataaaaccaaagtgctctttaaaatcaactatgcatgcctgccaaacagaaaaaccttgcctctgttccaaatgagcttgcagcccagcaaacatggtgacatacttgaataaagcctccctcttgttttctaagaggaagaaaatgaattttagggattatggtgctcttgaaatatcaggtcacaaaattgaagatggcagcttggaaatttttgttaatgaaattttcctattgatggtgaaatcctgcattctaagcattagagaaaactttgagtgaactataggtgtgytagaatgtactcattttaatgcagttgtagcctcaggattacatcatgaggcatatctagatttggaggacatgggataagtcctgtggagatttccagaaagaatgccagttctgagagagatgtcaccgcatgtggtgcacaagcgacatagatgtataccttccgtttccagttcctcttctcctctccttgctttgggccacccagttatcctaaccacaaagtactcaacaagcatttcgtgtagttgagaactagaaactcaggtcagaaattctaaatattcactttgctaccaaaaagtgccagcataaggacctgagtcctgcttgactaaactccctgaaaagtactgctggaattcacgagaatgatgattttgagaggctgggagcaagctgttgtttgcatatcctcaataccaagcaagcacacatcaaggtaaaatgaacgaaatgatctctcttccaaccgggctgtgaagaatactttgttcagtacagttattgaagaaaaccactaagtagctaaaatgtaaaatcaaagttggcatttaagcaggatacagttacgtaggctgcatgaccataacagagcattctcattttcccagaaagaattagggatttgcgaggggaataaagatgatacaat

SEQ ID NO: 75084 - DNA, 2089 bp, Homo sapiens
aaaccatctgctatgtatcatataagatcctaagggtgcagaagacactaggaacttaaaagaaaactttctccttcagttatcattcagcctctcagaggccctctgaggggaggattcatctacctccccccaaccccagtcatggcatctggatgtcaacgaaagtcttctctgtttgatcatattataacctaaccaattgttgaaagcaactccaagaatatgtttgagtacctagagaaattaaagatgctatacaaatgaaaattgttattactattattttatagttttataactttccaatctgtctttaggtaagttaccttaacacttagaagtacacccagcttccagggctgttctctagagccagggtctgcagactttatggggccaactagtaactatcctaagcattatggccttaaggtctctatgcagctacccagctctgctgttgctgctcaaaggcagccctagataatcaaaaaggctgtgggccagatttggctcatgagggtcattgtttgtcaacccctgtctagaggcattagttagctgttcagagaagaccactctgtcttactctttagtgtggccttttagaataaactcttcctctgagccctctgtgtgataccttccatctgagtgactcatatactaattgacaaagtgtagcaatgccctcaaattacctctctcttctccagctgctctgagtacttcttattttattttatttcttagtaaaatgaacatcacatgggtcatgagacatcttgagatttataacagattctgtgagagttttactcctcaagagctgaaagcgtggggccaggaaagtcaacacccaaggaaatagtatattttttctctgcttgtaattcatgttgtgttttaaactgatggaaagaatcacttctgaatgagcgctgccaagtagtactgctgtttaaaagccacctacttaacaaaatggcactttttctgcaaaccaaagaagacatttagatcaaccattttggtatgccattgctataaaatgagtaaacagcaccacttattttctgatctaatccttaataaaagtgatcccacaataattgcataaatgttaacttaaaaataaaaccaaagtgctctttaaaatcaactatgcatgcctgccaaacagaaaaaccttgcctctgttccaaatgagcttgcagcccagcaaacatggtgacatacttgaataaagcctccctcttgttttctaagaggaagaaaatgaattttagggattatggtgctcttgaaatatcaggtcacaaaattgaagatggcagcttggaaatttttgttaatgaaattttcctattgatggtgaaatcctgcattctaagcattagagaaaactttgagtgaactataggtgtgttagaatgtactcattttaatgcagttgtagcctcaggattacatcatgaggcatatctagatttggaggacatgggataagtcctgtggagatttccagaaagaatgccagttctgagagagatgtcaccgcatgtggtgcacaagcgacatagatgtataccttccgtttccagttcctcttctcctctccttgctttgggccacccagttatcctaaccacaaagtactcaacaagcatttcgtgtagttgagaactagaaactcaggtcagaaattctaaatattcactttgctaccaaaaagtgccagcataaggacctgagtcctgcttgactaaactccctgaaaagtactgctggaattcaygagaatgatgattttgagaggctgggagcaagctgttgtttgcatatcctcaataccaagcaagcacacatcaaggtaaaatgaacgaaatgatctctcttccaaccgggctgtgaagaatactttgttcagtacagttattgaagaaaaccactaagtagctaaaatgtaaaatcaaagttggcatttaagcaggatacagttacgtaggctgcatgaccataacagagcattctcattttcccagaaagaattagggatttgcgaggggaataaagatgatacaat

SEQ ID NO: 75085 - DNA, 982 bp, Homo sapiens
tgagacatctgagtatgttacagagggaactcatgcaaagattaggtgacctctaaggtttcttccagcttgagattccactgtgttttccatccatcgtccttacccccctccctccttccttcccttccttcctttccccattcctatctataaatakttgctaaatccatacttggtacaagaagccatactggaaaataaagagaaatttatgagacactacccttaagaagcatatcatctggtacctgagacaaatacgttcacaaacaatggcagtgcattgtctggcaagaattgcataaaggtctaagtcaagtgctggaggaatttaaagagggtaaggatgaacacacttctgtctgggcaagcagagaaagcttcatggcatggataacattttatcctgggccttgagggataagaatttcagtaagcagaagaaagaatataatgagctaaaacaaatgagggaaaagagtaacaatatccctggagaatgtctagagacagaagcgaaacgtactctactcaggagaattggaagaaaagcctagaaaggtaaatggccaaggtagggggataatatgtttttaattcaccacacactaacaccttcaggcagagctggcctaggtgtaaaagttctcttgccaactatacttacacagaagaaggatgctgttcaaacagggctgcccctgcttcttttcctgaccctctccacaaatgatatactcagccctgttctgtataaggctcagctcatgatttactaactaattcactaatttagcacacactttctgagtacctactatgttctgtgtatttgtcctgtggacactgaaggtcttgattacaacctcctaagagcatgcgcctcatgtttgattttcatggaataaccgctagagttgccacaaggcaattaagcaaggacaatgctttgtgaataataatgatgggatggtacagg

SEQ ID NO: 75086 - DNA, 534 bp, Homo sapiens
tgtgactgtatttggagatggggcttctaaggaagtaattaagatgaaatgaggtcattatggtggggccstgatctgatcagactagtatccttataagaagagatgccagtgagctctctctcctctccatgagcacacactgagccaaggcgatgtgagtatacagcaataaggcagctgtctgcaagccaggagaccagctcttgccagaaattgaccatgctagcaccctgatcttggacttccagctcccagaactgggagaaaataaatctctgctgtttaagccctccagtctatggtattttgttatggcagcccaagaagactaatataatgcctggaagctattggcccagagtgtttttgaaaactctgaatcgatcattgtgctggatatcttccatctactcctgcagatccactctctgccatccttcctcctccatctatcctaatttgggaatttcatgttttctatttttaaaaacctgataatatatttgtcagtattttaaaaattgagagagt

SEQ ID NO: 75087 - DNA, 2060 bp, Homo sapiens
cgtagctggtcattcctaggcaaaaagccagggcttcctttgctgaatcctaacgaggcagttatgccaggtaggaaagggaagtgctgccccagctagctagaygccgcaacagaggaggcaaggaattcctccaaagagagaggcacacttgggtgtgatggcctttggtttgaagctggagttccttcttactccccaagttcatgggccaccagcctgagaaagcagtgaaaatgctttcctttgtctgttttcttgtttttgtttttatcaaagatttgaacaggtacacttgcaatttctgatgaaagcattttaaccaacatagatacacctctatctgtttttgcaagggtaggtaaatagaggtgaatggcaggacagataagtgagaacccccagctgtcaaaaggagaggaccattatgagaaaaggtgttcttgtgagacagtgattataaaagaggactaaaatgtctaaaagctcatcttccaaaattgattaaataaagtgcctcatcgccataaaatggcagccattagaatgatatgattagaaacatttattgcatgaaaggattttcacaatatattgcaaagcttaaaaaaaagagagcaagaaaacaaatgaaataatagcagaatgaatgcattgtgtgtatggatgggaggaaggcgggagtgagggttggcaataataggaagatcaatactaaaaaattatacaccaaaatagttaataaggcaaaaagttaatataagtctggaatttgatttcaatgattttataatctttttgatgatgtatttttaattttttcacacaaaatgaacataaagggatatgtttttcttaaagtaaatattgtttctcagaaagcttacttcccagaaagacactagactgaaactatattatggatgcgttcttaacacttaacaaagagaggggtaatttcaattctatttaaaatattcttcaatgcaggaagaaatggaaagtataccaattcattttatgaaactatcatatctctggatatcaaagcctaacaaagggagttggaaaaaaatcaagcaggagccaatttcggttgtgaatatgatgcaaatttttgaaaatgataatagaattgtttttagtattttggtaagtaataatgctatggccaagtagcgtttcatctcaaagtgcgaacatattttaatactagcaagcttattaacaaaattgttaagcacatcagaaagataagctaaggctctagagatgcttatatttgtgacacacaaagcaagagaaaatggctttcatttcaatctggcactttgctgcgatggtacattcaacagagaaagagggccctgtcacaggtgacccccaacaaggatagccttgccagttacaggtggcaggctgggaggttgccacaacctagcgaggagaagactgatggctcagaatgtcgtactcactctctattgaagaagtttggtcctctaaaacgactaaacaaacaaagcaacaacaacaactacaaccacctaagttttaccccactctccccttcggaccctgaaagacttgtgcagggatttaaaccatctctgacaaaatcccctatcaaacagacaatgaagaaaactttaaaaaataggtcaatcattttattcttcagtaattatataaataggtaattcattttattcttcagtaataaaatgaattacctatttatataattcaataataaattacctattcaaagaaacagaagcaaacttaaaaaataagtagttcattatatcactgaaaattgtgagggcatttgatttagatcaagatgtgaggtcaggaaacgcttcctaggggtgaaaacaagttatttaaaaaatgtgatggaagcagtaaattgcagatgtaagaggcagaaataaaatcggcaaattggaagacaacttggaattctcccagcattaagagaaaaataaaagaatcaatatgatgagaagaaacaacagacatgaatgagcgatcctgatagttcagtttatgca

SEQ ID NO: 75088 - DNA, 2060 bp, Homo sapiens
cgtagctggtcattcctaggcaaaaagccagggcttcctttgctgaatcctaacgaggcagttatgccaggtaggaaagggaagtgctgccccagctagctagatgccrcaacagaggaggcaaggaattcctccaaagagagaggcacacttgggtgtgatggcctttggtttgaagctggagttccttcttactccccaagttcatgggccaccagcctgagaaagcagtgaaaatgctttcctttgtctgttttcttgtttttgtttttatcaaagatttgaacaggtacacttgcaatttctgatgaaagcattttaaccaacatagatacacctctatctgtttttgcaagggtaggtaaatagaggtgaatggcaggacagataagtgagaacccccagctgtcaaaaggagaggaccattatgagaaaaggtgttcttgtgagacagtgattataaaagaggactaaaatgtctaaaagctcatcttccaaaattgattaaataaagtgcctcatcgccataaaatggcagccattagaatgatatgattagaaacatttattgcatgaaaggattttcacaatatattgcaaagcttaaaaaaaagagagcaagaaaacaaatgaaataatagcagaatgaatgcattgtgtgtatggatgggaggaaggcgggagtgagggttggcaataataggaagatcaatactaaaaaattatacaccaaaatagttaataaggcaaaaagttaatataagtctggaatttgatttcaatgattttataatctttttgatgatgtatttttaattttttcacacaaaatgaacataaagggatatgtttttcttaaagtaaatattgtttctcagaaagcttacttcccagaaagacactagactgaaactatattatggatgcgttcttaacacttaacaaagagaggggtaatttcaattctatttaaaatattcttcaatgcaggaagaaatggaaagtataccaattcattttatgaaactatcatatctctggatatcaaagcctaacaaagggagttggaaaaaaatcaagcaggagccaatttcggttgtgaatatgatgcaaatttttgaaaatgataatagaattgtttttagtattttggtaagtaataatgctatggccaagtagcgtttcatctcaaagtgcgaacatattttaatactagcaagcttattaacaaaattgttaagcacatcagaaagataagctaaggctctagagatgcttatatttgtgacacacaaagcaagagaaaatggctttcatttcaatctggcactttgctgcgatggtacattcaacagagaaagagggccctgtcacaggtgacccccaacaaggatagccttgccagttacaggtggcaggctgggaggttgccacaacctagcgaggagaagactgatggctcagaatgtcgtactcactctctattgaagaagtttggtcctctaaaacgactaaacaaacaaagcaacaacaacaactacaaccacctaagttttaccccactctccccttcggaccctgaaagacttgtgcagggatttaaaccatctctgacaaaatcccctatcaaacagacaatgaagaaaactttaaaaaataggtcaatcattttattcttcagtaattatataaataggtaattcattttattcttcagtaataaaatgaattacctatttatataattcaataataaattacctattcaaagaaacagaagcaaacttaaaaaataagtagttcattatatcactgaaaattgtgagggcatttgatttagatcaagatgtgaggtcaggaaacgcttcctaggggtgaaaacaagttatttaaaaaatgtgatggaagcagtaaattgcagatgtaagaggcagaaataaaatcggcaaattggaagacaacttggaattctcccagcattaagagaaaaataaaagaatcaatatgatgagaagaaacaacagacatgaatgagcgatcctgatagttcagtttatgca

SEQ ID NO: 75089 - DNA, 1326 bp, Homo sapiens
ggacttggcgtccacatcttctcaaaccccaggcttcacactgagttacgtcaacatgtgactcagaagaagcagaaagggaaaaacagggcacaaagaaggcaacataggggagaaaagagcaaataaaaacacaggccaaagtaagccagcctagttgtgaagagaactgtgaatacttttttattttttttaaccaaaggtaaaaaggaaagctgagtttacattttctaatgactggagctgtcgtctcaagagaatacagagaaaataagaaaatgcataatttttttttggacagaatctcactttgtcacccagactggagtgcaatggcaygatttcagctcactgcagcctcttactcccaggctccagcgattctcatgcctcagcctcctacatagctaggactacaggtgtgagccaccacacctggctaatttttgtatttttagtagagacagggtttcatcatgttggccaggctggtcttgaactcctgacctcaaatgacccacctgattctaaaggaggattaatattgccctttaacctaaaacattgctaaaagaaaaaaaaaaaaaagtgccagttattcctatcccagtctctcagctccaacagggactcgtgttagtcttcctgaacagtttataaatctatctctcacattgttattagaaaatgatgctatgagcagatcagagacttttttggagtaaatgattggatattggtctcccacataacttgaatctcactgagaagcagtattggggaaattcagccagatatcgggcaaaattcacccccgatatttcacgtacgttctttgctattttccctaagcatcagccggtttgagaaataaagggacagagtacaaaagagagaaattttaaagctgggcgtccaggggagatatgacatgtcggtaggttccgtgatgccccacaagatgcaaaaccagcaagtttttattagtgatttcaaaagggtagggagtgtacgaatagggtgtgggtcacagagatcacgtgcttcacaaggtaatagaatatcacaaggcaaatggaggcagggcgagatcacaggaccacaggaccgggacgaaattaaaattgctaatgaagtttcgggcacacattgtcattgataacatcttatcaggagacagggtttgagagcagacaaccgttctgaccaaaatttattaggcgggaatttcctcgtcctaataagcctgggagcactatgggaaactggggcttatttcatccctacagctcgaccataaaagacggctgcacccatgggggccat

SEQ ID NO: 75090 - DNA, 1326 bp, Homo sapiens
ggacttggcgtccacatcttctcaaaccccaggcttcacactgagttacgtcaacatgtgactcagaagaagcagaaagggaaaaacagggcacaaagaaggcaacataggggagaaaagagcaaataaaaacacaggccaaagtaagccagcctagttgtgaagagaactgtgaatacttttttattttttttaaccaaaggtaaaaaggaaagctgagtttacattttctaatgactggagctgtcgtctcaagagaatacagagaaaataagaaaatgcataatttttttttggacagaatctcactttgtcacccagactggagtgcaatggcatgatttcagctcactgcagcctcttactcccaggctccagcgattctcatgcctcagcctcctacatagctaggactacaggtgtgagccaccacacctggctaatttttgtatttttagtagagacagggtttcatcatgttggccaggctggtcttgaactcctgacctcwaatgacccacctgattctaaaggaggattaatattgccctttaacctaaaacattgctaaaagaaaaaaaaaaaaaagtgccagttattcctatcccagtctctcagctccaacagggactcgtgttagtcttcctgaacagtttataaatctatctctcacattgttattagaaaatgatgctatgagcagatcagagacttttttggagtaaatgattggatattggtctcccacataacttgaatctcactgagaagcagtattggggaaattcagccagatatcgggcaaaattcacccccgatatttcacgtacgttctttgctattttccctaagcatcagccggtttgagaaataaagggacagagtacaaaagagagaaattttaaagctgggcgtccaggggagatatgacatgtcggtaggttccgtgatgccccacaagatgcaaaaccagcaagtttttattagtgatttcaaaagggtagggagtgtacgaatagggtgtgggtcacagagatcacgtgcttcacaaggtaatagaatatcacaaggcaaatggaggcagggcgagatcacaggaccacaggaccgggacgaaattaaaattgctaatgaagtttcgggcacacattgtcattgataacatcttatcaggagacagggtttgagagcagacaaccgttctgaccaaaatttattaggcgggaatttcctcgtcctaataagcctgggagcactatgggaaactggggcttatttcatccctacagctcgaccataaaagacggctgcacccatgggggccat

SEQ ID NO: 75091 - DNA, 602 bp, Homo sapiens
ccccagagagctctcctaatttaaaaggtctgaaactatgggatttataggaagagaaccaagaaaggagaaaaggtgagaaacaaaagtgstgatacttattctagaaagagtattgattgggaggttgaggcaggcagatcacctgaggttgggagttcgagaccagcctggccaacacggtaaaaccctgtctctactaaaaatctaaaaaatagctgggcttggtggcgcatgtctgtagtcccagctacttggggaggctgaggcacgagaatcgcttgagcccaggagacggaggttgcagtgagttgagatggcgccactgcactccaagcctgggtgacagagtgagactctgtctcaaaaaaaaaaaacaaaacaaacaaaaaaagagagtattgattgttgaagtcttcaggaatcacagaaattgggcagtaaaagagttgagagggatgagagacattcaaataaaaacagtgatgactagagatctgtggggacagattaaaatgagaaagtatattaaactttataaaaggcaaggagatgacagaatattttgccattaggaacagggtaaacactaatgtggcaaa

SEQ ID NO: 75092 - DNA, 602 bp, Homo sapiens
ccccagagagctctcctaatttaaaaggtctgaaactatgggatttataggaagagaaccaagaaaggagaaaaggtgagaaacaaaagtgctgatacttattctagaaagagtattgattgggaggttgaggcaggcagatcacctgaggttgggagttcgagaccagcctggccaacacggtaaaaccctgtctctactaaaaatctaaaaaatagctgggcttggtggcgcatgtctgtagtcccagctacttggggaggctgaggcacgagaatcgctygagcccaggagacggaggttgcagtgagttgagatggcgccactgcactccaagcctgggtgacagagtgagactctgtctcaaaaaaaaaaaacaaaacaaacaaaaaaagagagtattgattgttgaagtcttcaggaatcacagaaattgggcagtaaaagagttgagagggatgagagacattcaaataaaaacagtgatgactagagatctgtggggacagattaaaatgagaaagtatattaaactttataaaaggcaaggagatgacagaatattttgccattaggaacagggtaaacactaatgtggcaaa

SEQ ID NO: 75093 - DNA, 602 bp, Homo sapiens
ccccagagagctctcctaatttaaaaggtctgaaactatgggatttataggaagagaaccaagaaaggagaaaaggtgagaaacaaaagtgctgatacttattctagaaagagtattgattgggaggttgaggcaggcagatcacctgaggttgggagttcgagaccagcctggccaacacggtaaaaccctgtctctactaaaaatctaaaaaatagctgggcttggtggcgcatgtctgtagtcccagctacttggggaggctgaggcacgagaatcgcttgagcccaggagacggaggttgcagtgagttgagatggcgccactgcactccaagcctgggtgacagagtgagactctgtctcaaaaaaaaaaaacaaaacaaacaaaaaaagagagtrttgattgttgaagtcttcaggaatcacagaaattgggcagtaaaagagttgagagggatgagagacattcaaataaaaacagtgatgactagagatctgtggggacagattaaaatgagaaagtatattaaactttataaaaggcaaggagatgacagaatattttgccattaggaacagggtaaacactaatgtggcaaa

SEQ ID NO: 75094 - DNA, 572 bp, Homo sapiens
aaccccatctctactaaaaatacaaaaattatctgggcttggtggcatgtgcctgtcccagctacttgggaggctgaggcaggagaatcgcttgaacccatgaggcagaggttgcagtgagctgaaatctcgccactgcactgcagcctgggtgacagagtaagactctgtttcaaaaaaaattaaaaaaggccaggcacggtggctcatgcctgtaatcccagcactttgggaggccgaggtgggtggatcacaaggtcaggagttcgagaccagcctggtcaacatggtgaaaccctgtctctactaaaaatacaaaaaattagctgggcgtggtggcaggcgcctgtgatcccagctactcaggaggccraggcaggagaatcgcttgaacccgggaaacggaggttgcagtgagctgagtctgtgccactgtactccagccagggcgacagagcgagactctgtctcaaaaaaaaaaaaaaaaaaacggaaaagaaaaatatatacatattatacacacatacacacactatccccccacccccgtgtgtgtgtgtcttaaacactca

SEQ ID NO: 75095 - DNA, 1313 bp, Homo sapiens
tgcgtagaaggggaattaatggttcatatagtctgcacatttctgatttagtagacactttgggccttatctctgatggatgcaaacttaccatctgcccggagtacccagcttacattcatcaaaattgaatagtcccctgttgcaacactagttgtaacaggttctactcggaggtccctcaagtctccggggattagatcatgttgtagcatccactctggagatggccctgggaaaaagcaagacttccatgacactgtctttcccagcccagtctgatgccatgccatctcctctcagtgactcacaccaaaccttcccccattcacaattcctcacttcttttttttttaattaaaaaaatgttttttgtagagatggggtctcactctgttgcctaagatgatctcaaactcctggcctcaaatgatcctcccacctcagcctcccaaagtgcttggattataggtataagccaccacgcctgacccaattcctcagttcttcctgctaaggccaaatgtttcttagcgctggctgatttatagcccagataattttgatctaacagaagtactctcaacctcctggctttcacctacagagcacgtgggaccactccaggtrcctgtgtatgtacacatgtatatatttagtgtatttgacatgtttattagagtcaggcctgccttcctcaggctttggccctggattccagccagctggcccacacagcccccactttcccacctcctaacctttgctggtgccatctctcctccagctcactcttcctacccacattttttgggcagaagcctacccattcttcaaatgccaccatctcaaacacccgctctcctatgaaacatttgcttctcggtcccaactctaagtgaccttccttccacggccttgatctccctctgcagagtggcaggcatcactttccaccttgtatggcaagtcccatcttgactggccaagaggctagcctgtctgaaacacggcctcattcccacagagccccagagttctgcttcgagcagacagagacttcatctgcatcagccaataaagcaatgggtcaccctgtgtctggtcttcgatgacctattgcctatattaggcttcctaaaagtccaactgtgctttcaatgtaaagccccaaatacccattctctaatgcacctaccagtttcagagccacattgaacggtctgtgggagagaaaaaaccaagcgtcacgttgaagccggcaaaccacaagctttcctttgccaaattaggcagaacaccattttcccctt

SEQ ID NO: 75096 - DNA, 860 bp, Homo sapiens
tgcggcggggaaggaagctggagccttccacacttggggccaagctgtaagccaaaagmttaagttataaaagcagattcttacaacttgaagtagagaaagtctcaataaggaagacacaaacccaggagtgggaggctgcagtgagctatgatcacatcactgcattccagcctgggtgatagagtgagaccccgtgtgtaaaaataataaaaaataaaatatggtaaaatatcgatttaaaaaaaaaaaaaaagaaaaagaaaaaaaaaagaaagacacagcacttccccagcaagaaggaaggcctatggatgacacttttttttaaagtcacatttcccaaaaatgcaagggtatcatcgccgcagtaaaaggagtcaggctctgaggtcggagcgcccggtgtgacttgagacagcttcagcagcagttctgggccccaggactctcagctcctcctcaaggttaataattcctgcctcagaggactaaaaggaacaaaagtgtagcatccctaggacagagtctggcccaagcaggtgctcagtatatagcaggtgccattccagcaatggtgatgataatgacagccctaccattactgaagcaaacctgccaccctctcctaatgggcattcgcattcacttactaacaatagctaacactcgttgggtacttactatgtgctgggcactgtgcatcaaattatttcacttaacctgtggggcacttaaatgtagccacatctaatacccccactttacagataacaaaacaggttcagagaggttaggtaatgtattagtcagcataggctaactactgtaacaaacaacccccaaaacctcatggctca

SEQ ID NO: 75097 - DNA, 842 bp, Homo sapiens
ggcattgtcattgccgggacaatctcaacagaaacaccaagcaaaggagaagaaaggatttcctcttcctttgtgccttccagtcttcctctcatatccttattggcaaaacctatctcaaagccaactggaaataaataatacatacacatacatttcatatatgtacatatacatatgtatacacacatataatgtactttacagagttaaagtctagcattacatagaagaatatatttagatccgagagataatagcttaataactatcctagtccatgctttargcttctcagcatccatatacactctgctacatatatttattatatagaagaatatatatagatataagaggtaatattaataactattctagtccacactttaggcttctcagcatccatgtacaccctgctacatatatttaaacttatagataacaagtgaagacagtttcactctccgcctaagaatagaagacatcaagttccaacatcatagtcatctttgagaagtcactgtatccaactctgagaaatgactattcctctaaatcacacaaatcccacctgaacactctgtaacctaaagaatgaagtttagctgacaatcctatataaaacaatagagaaaaataagaacgaataaaaatattaattattaataaaaataagaaaaaacatatactacactgcatacatacaacaaaaaagaaaatatgactaaaacatctctcagttctctagtttgtcacaaaaccatttgatacatgtaatttctttcttctaccaccccatcacatgtttcttttgcccagtgttcagctggttaggatcc

SEQ ID NO: 75098 - DNA, 1786 bp, Homo sapiens
tgtgataggtcaaataatcccaattaatcatgctcagctcaggttacatggtgatttgacgtcccattgttcaacactcaatctttaagaagcctcaatagcaagcaaagaagtagttctccaaaggaaaatagttatatgaaaagagcctattgctttcctccatgggatgtgctgtaattctatggaggcttgccaggagttccatacagcattcttacatgtgtcagacctttaaatatcatgagatctacttgatcagaagacccaagtaaaagagtagcttacaccacagcctagagttgttgcagagccttttatttttaccccctcaggctccactaaaaactggcaactgcattggttcctcagaaaatgggttagaatatcatatcctaatatagtatatgttgcctcaaaaatccaaagaggttcaccaagcattatgccttgtttttgggggtagatgtttaagatgcttttaactgtttttcactgtgaagatgatattgtgacatactgcagatcgttggacaccctctggaaactttaccaagaagatgccctttgaattctggggactttatcttccaccctcatgtgctttactaagatacataaagcaatttcaaggtcctggctcatcaaaaaaattatcatgatggcatcagtgtagtggaccagtatgatgctcagtgtgatatccagatgatgaagatctgtctaacagagaacataactgtgcagatgtgctatcatccttatgagaaaagaaatggcttctcgatgtccttacaaacttatatttaaaaagtatttgccagataaataactgtatatcagatatcaaagattgtgttgacatgattaaatttatgataatctattgtcatcctccaagatccatctatcttctgcacaggcaaaacagataagttaaatgagaatgtgatagaattcatcacctttcatacttcagatcttttaagtggcattcatcttagcggttccagagggatatcatattgcttttgaattattaccctcctctagaggggaaactccaagagttctacttagcccttcctgtaatcatgatcctgaattcacaggtctgaaagtcaatgtagagattctatcagttgccaagtgcctatctcaattatgcattcagaagttgaatctgcatccccactgaactgactgttagacaaaggttaacattccatttaccatctgacttctgtaagcatccactttgattgatgggtataatggcattttgggtccccagaaattaggatcactttagagccagtgactggatatcagtaataaattccctttcctaagtgcttagctatcataacacatggctacaaatccattttggaaaaaaacttggagaaagtactagcaatacatacttgtggcaatgttgcagttatttttcaagggaaactggaacccccttwaatcaaggagatacatgtctgtgtactgatgtaggtctagaaaacaagttagagactgcaactctctattgtgatgactcaaatcagggttctggtcaccagatctagaagattttctataaataaagtaataagttagtaggctgcccatttatttcattactaaggacaatttgtcacttccccaaatttctgggtgtcaacactttgatttccactttatcctttgtgcctattgtggtgactgcctccaccttttctctctcgtggtgaaagacttatctctcagttggcctctgccattctaggat

SEQ ID NO: 75099 - DNA, 804 bp, Homo sapiens
agctcccatttattctctgacctcatctcgtaccgtgttttctgctccctggatattcctccatcgttctctcaaggcctttgtacttgttctattttattggcatactcttctccccacgtgatttataccttcacttccacattgaccaagaaccattcagaaaaacagacaccacaccaggaatttcaacagaagaaatttaatataagaacttaattacacattaatctgtggcacagaagtcagggtagtggttacccttggaagagagcctaagaggatgctggaaatgttttatttcttggcttgggtttgcagcatggctgccttcactttgtgaaaagtcatcgtgttgttcacagtctatcctcattattcactgactctggaataatgaatttacctaattgctaagatttattggtaacccccaaatcagtactcactgagctttgtggccatttgcagacatacacattgaggggaaaaatttgagtcaccaaracgcatgctttcctagctgtggtcagacaaagcaactctctcatattgtgtcagctctacttgtttcagctctcatattgtaaacaagagtcttttttgtggtctacttaatactacatggtgtgtgggattttttttcttttttgcattttcatgctttctggtggtgatttcactgtttaaaattacccacaagaatagtgctgaagtgttacctagtgtgtgtaggtgtaagactgtgatgtggctaatgaagaaaattcatgtgttagcttcattcaggtgtgagttaccgtg

SEQ ID NO: 75100 - DNA, 1390 bp, Homo sapiens
ttaaaaggttgagaatgacatacagtaattacatgtctcatacatgagtaggtttatcctaagtgggacagaggcaactgggaattagaaaactagggagaaaggacagaggcaactgcgaattagaaaactagggaaaaaagaaaatttagtccctagatgggaacagaggtaagtgagaagggccctaaaaggcagtgcagtaagcacctgccaaggctgctttccaatcacacatctacctgaaaaggtatcatgttgcagaatgctgctctcttctctccttcctaaccctttcaatttcaggacatttagtcctctgacttcaagagaaaaaaaaatattggtggggaaaaatagcttgaggaatattgatctggcaaagatttgagtcctagcatccaagatggtcctcttctccaggagttgctgcctgctggctctccctccagattgagtcaccttgtcccagaattactttttcatgaacctgatatcctcagtatccaacccagagtataataattataccaaaatccagtggaagtctgctaaagcctgtgagtcatcccatgagactcggataaacaccagattttccttctccagtggccccattcacaaacagagcactgtctcatgtcattattgcacagaataatgcaatgaatctccaacctctttagatcatgtaaattagtcctcatgttccttagctaggcaaagggatcctccatatactaccagccagatgtttgagagmaagcttacatctgccacactggtagtaatctatcctgcatcagagctgctgtaaacatacgtgaccacaaaagccagagagggttctacatttgggaaattcgccacagaacgggtctgttcctgattgctttatacagattcttcaggcagttttcatgtcagtcatccattagaccaataaaagatgagttagcaatgtaaaaactgacctcctataatcccaacactttgggaggcgatgccaggagaattgcctgagcccaggagttggagaccagcctgagcaacatggcgagacctcatctctacaaaaattaaaaaagaaaaattgtccgggtgcagtagctcacacctgtaatcccagcactttgggaggctgaggcaggcggatcacaaggtcaggagtttgagaccagcttggccaatatggtgaaaccctgtctctactaaaaatacaaaaattagccagacatgttggtgcacgcctatagtcccagctacttgggaggctgaggcagaagaatcacttgaacccaggaggcagaggttgcagtgagccgagatcgtgccactgcactccagcccaggtgacagagcaagaccctgtcccacaaaaaaaaaaaaa

SEQ ID NO: 75101 - DNA, 777 bp, Homo sapiens
tggtttctgtaaggtgaagaaccactgaattttaagagacttcatgggtacaagtggaaagaaaataagtgctaatatcaaacaaaactgggcctcacttgatcacttttgagagctggataaactttgcaaaatgattaacttggttgagcctcagtttcttcatctttagaaatgggaggataccaactctaggaagactaagtgagaacacaagcaaaagctcctagcttgatctgaaaagtgtttaatgagggtttattctttcttttctccttgacttcatatcttcactttaagttgcaatatcaaaggtctgacagggaacttagatcttccagttgatccaatggaagagattcttaagagattcttacgtgtttggccaagctcacatcttcgactttctatgatacagatggatcttttagagctaaagggatactgtagagtctatggaaacatctgtgcttagagaattattttctggcaactctctttctgcagctcggtaagtgtctcttgagcaattctataatttcaagmaccatacatgtgccagcaatgttgccaatgcaaccaagaaagcctagagtggtggtctacattcctagaaatcatctttactggtggtttctcacatttgagcagacttttgtagcagcaggaaatggaatccttccatgtgaccccattcaaacctgaccaaatccctccatcagatctgctaatacctgtcttcctgtacaggaaaatctgggcttggggaataagggt

SEQ ID NO: 75102 - DNA, 777 bp, Homo sapiens
tggtttctgtaaggtgaagaaccactgaattttaagagacttcatgggtacaagtggaaagaaaataagtgctaatatcaaacaaaactgggcctcacttgatcacttttgagagctggataaactttgcaaaatgattaacttggttgagcctcagtttcttcatctttagaaatgggaggataccaactctaggaagactaagtgagaacacaagcaaaagctcctagcttgatctgaaaagtgtttaatgagggtttattctttcttttctccttgacttcatatcttcactttaagttgcaatatcaaaggtctgacagggaacttagatcttccagttgatccaatggaagagattcttaagagattcttacgtgtttggccaagctcacatcttcgactttctatgatacagatggatcttttagagctaaagggatactgtagagtctatggaaacatctgtgcttagagaattattttctggcaactctctttctgcagctcggtaagtgtctcttgagcaattctataatttcaagaaccatacatgtgccagcaatgttgccaatgcaaccaagaaagcctagagtggtggtctacattcctagaaatcatctttactggtggtttctcacatttgagcagacttttgtagcagcaggaaatggaatccttccatgtgaccccattcaaacctgaccaaatccctccatcagatctgctaatacctgtcttcctgtayaggaaaatctgggcttggggaataagggt

SEQ ID NO: 75103 - DNA, 618 bp, Homo sapiens
cctcttattctattcttctctacaggtagggataggggaggacaagagaggaaccatataaagtgactattaatctctctatgtattttatgccaaataatcaaatattgagagtggctagcaatgtggaagagggggcaacataagcatttttcatatttttaaaacatggcaccgtatgaaagtggctaaaaacctggcaaggcttttctgaataatagcaattttactattttttttctacaaagatttttttgtactcttagcatataaacagtcagtatasatggcatttattaagctttatcaattacatgtcacattgtgtgatgcttttttcttcttaatattatttttaaatcttatgagaaacaaaaatatcaggatgaagaatagaccgagaacttgggatgagtgtgagggaatccagagacagggagaaatagtgtaaaaagaagaatcaaagatataatttctgttaccgtggctcattacatgctagtcaatatctttctttgtttaatttaccaagttaaaagaacaagtcaataataccatacataggaggatataataaaagtcagaataaaagaggaagactgagtaagtggaaggatt

SEQ ID NO: 75104 - DNA, 1136 bp, Homo sapiens
aactgtcctaagcaaactaggtaagtagaagtatagccgccctacttaccttcatcctgtagatacacacagttggttctggaaccattgctgcaaatccttctccagcttggtggagaagtcactatggagctggcacattgctgctgagtcatcccctccttcacctcataactcatcatctaattgtgtttctatgttttcagaaagttgaggctcaggaaaagtaagcaactttctctccacctctcagcaacctatgcactatacttcccttatcttttataagtatccatcctgtagtttctagatcctcagtgaattatgacatcactaacactcccagggatgtagtttgaagagtataatttttttcccctagcactcagtacttatactaatttctagatctcgagacctgattgattgtcttgagcactttcatattcagagtgatcctcaacagtgaagttttaatatttctttcttgataataggagataaactaaatatgtgtttcagtatactcatggagataaagtcttttaacaagcccaagttcaggaactgtggttatcaacattgtttctagatgatggcttcttttgctccttcttgaatggagttttaatgttgttagtgtttagagagaaaggtctaacgtttaggactcttggccctgccaaacttccttcccttaagagcaatgccaggaataaactcttaagaacagaggggcaaactaacagtaaaggcacaaggggcaatgcttaagctgagtcttaagggactaattttcctcatctttagaatcctgcatagacagaggttccacagcatttaggagaatattgaaaactgggagcttctgcaagatgagtgaggaatttgtggggactggcactgaaggagcccaagtaacatgctaagaagctagactttattctgtgtccactagggaataactgaggaatgttragcaagagagagatgtatatatagtatgcaacttttaaaaagaagtcaggagactgtgaagagctggattgtagggtgtaacatgatgccagaagtgtagctaggagactcttggaaaagcttggataagaggacagatctgagctaaacatctgact

SEQ ID NO: 75105 - DNA, 1784 bp, Homo sapiens
ccttcaagccctaattccagatctacttcctctgtgagttctctcctaaatatgccacccaccggggtcccaccttcctagaacttcctcgcacttactttctcgatgcagagttgcctacattcccattttgcttgattacttgtttatttttcactcttgcacttttatgtagcctttcttgtgattatggtttatgttcactgttgtaaaacagttggtttatgttttactcttcaggttttgctaattaccttatctcattctgttaatcagaacacttagtacggatttgggcacagagtaggtggtcagtgaacatagttcactggaaagacagtctctgtatttccactaggaggctagaaagaaaaaacaaaatctagatgttccttttgtaaaatttgttgattcctcagaattaattgctactttaatatcacacgacacaaatggatcaaattcatttaatcctaatctagtaattaattcctccagcaaataatgtgccaagtatgacattactgaaatgcagagttttgatgatagagtgcacatcccagtttttacttctcgtaatcataaacagttgcttaactgttttaagccacagtttttctccctctccatctctctctttctgtttgtgtatttactagaaatttaaattatccgataaagatataaatcatagcgttttaaaaatagcattttacaaacaacaaagaaacattttttgaatcaattttctacactaggctttatggaggtacaaacatgagaatttaaaaaattagtgaattcaaggaaattcttgtgaattaagaattttttttattatactttaagttttagggtacatgtgcacaacgtggacacaggaagaattttttatctttgccttcttacagcatattcttgtgtttgcttgtaagtgtttttgttataacccatgcacattaatgctgcctccaatgccattttttcacttccaggaaagcaacttaattcattgatagctattgttgctaacccttgtgttctaaaaatgcataggtctgataggagtttaactttgcacaattgtttggaaaaactgtctgtcagtatctagtaaagcaaacctatggcttaataattacacttttaggtatacgctaagcagaaatgcacacatatattcaccaaaaaacatgtttgtggcagctttattcgtaatactttaaactgaaaattacccaaatgccaatcaacagtagaatggataaataaattgtggcagtttcatataagagaaacctacacatcactgagaataaagaaactacatatccatcagcagcatggatgaagttcacaaagataatgttggacagaagaaggcagacacaaaagacagtgtactgtaggattacttacataaaataatttgagataaaggcaacatttcccaggccctagraagttcctcttggtgagtaagggcatagtgatagaagagaggcacaagaaggtttctgggttgctggtaatattctgtttcttgatttgggtgctggtttcaactgtgcaaattcactgagcactttcctgtatgtatattatatttgaatacagttttgtttttttttttaaatcttccagtctgtctggacactgtatgttctggaatcactcagcactcactggcaggccactggcaattcctttgctcctcttccatcatgctggcatctcagccactgatctgactcttgccatgcctaccttttcttaagactcca

SEQ ID NO: 75106 - DNA, 895 bp, Homo sapiens
attaagtgaattaagccaggaacagaaaattaagcactgcaagttctcactcatatatggaagccaaaaaatgttgatttcatagaatcaaaaagtagaacaaaggatactagaggctgggaagggtagagggaaaggaaagatagggagagatttgttaaaggataccaaattacagctaggtaggaggaataagttctagtgttccataccactgtaggatgacaatattaacaataatatatagttccaaatagctggaaggagaatattgaatttgtccagcacaaagaaatgacaaaactttgagatgttggatgtaccatttaccctgatctgatcactatacactatatgtatcaaaaaccactatataccccataaatatgtacaatcattacctgtccattcaaaataaaattaaaaaattaagtcttaatttcaatggcacattacataagtgctctaagagayctttttctatgtattaatattttcttgaggctatcacatcataactttggtaaaagaagcttttggacaaaataaaatcacttttaagaaatgctctaatatggatacagttggaagtcattatcctaagtgaattaacacaggaacagaaaaccagatactgcatgttctaacttttaaatgcgagctaaacgatgggtactcatggacataaaaatggcaaccacagacaccgggactgcaagaaggggcatggagagagggaggcaaggattgaaaaactatgctcagtgcctgggtgacaggatgaatcacgccccaaacctcagcatcacacaatataccagctaacaaacctgcatatgcacccctgaatctaaaataaaattagaaactaaaagaaaaataaatgcatagaaag

SEQ ID NO: 75107 - DNA, 544 bp, Homo sapiens
tgcatatgattaatttgcccattaacttcttccacaattagttttcaatcttcagaaaactctccttctttttctgggttgtttctaaataccttctccctcattgctttacttctagaagaatgtaaaccactatgataagtcttcccaggcataaaaagcattacattttttataaaattacactgctatcaatttttcttatagttccagtttttacctcatgtatttagatgctctgacatgttttgcataaaagtttatgactttatggggtatttaaaaatattatttatatgtaatattaaacctttaacttaatactgtgactatacttacaatatttgtcaaataaatcttttcctatttgctttatattattttttaggtatatctcaggtatagattaaatatttttaaagatattacataatctttcgcttttatggaggartataagctttctatatttattaacatgtgatatacttagttttacttttgcctggttttcctaattttgtttatatttatttgtttatat

SEQ ID NO: 75108 - DNA, 520 bp, Homo sapiens
aaaacagggagaggaagaaaacaaaactaaaaactgttgttagaattctcagagagctaagatattgcatccatgaaacaagaacaggatgctttttaaaaatagtagtaggagcaactatgaaaaagaaggcactttcaaaaattaagaacatgatagccaaaataaaaaaaatcaaatgaaagcattaggaaacacaggccaaggacaaaagccagcaaaatagaaaacactgctatatttcattgtatctcttttagtactatttgatttgttaactatgttcatgtattactttgataaatayaattttaattagtttaaaatatatacttaaaaattaaaatcccagctctgccactaattagctgtgtgtcatcagataaattatttacttctctgagcctttctttcaagtataaaatggagataacagtacctatgtcatgtcttagaaatggtgacatctacaacctcatttgctttataacctatttattttgcatgttttgtggccctt

SEQ ID NO: 75109 - DNA, 877 bp, Homo sapiens
cataagacatcgttcttggcacagtgggactctaaaatgacgtttacctaagtaaagttaggatgacatctttatcytcatacctttgacaggtacccttgttttcatcaaaatttgtgttagctacacttaggctaaaatatttgtctttagtaaagtgaaaaatccttctgtaaagtgaccaacaattcacttagtttgtttttaaagtcaggacttttcattttttaggttttcttagtgtgaaatatgaactcatgagcatctggcctgggaactggaccagttttaaatctcgtgttgagagccggaagatgctggagaaggaatgtggtggaatgactgcctgagaatgaaccattctccagtgagaggtaaattaattatttcagggaactaggatatcaactagcaaattacgtcttaccaggcaccagatgattatctgtttccccaagttaatttatttcattgggtgaacccgccactccttaaagactagagtatattggttctacctgggaccaggtccaatattaataataattttcaaatgagctcttcagacccttaattcagctgttaagaagaagacaaataacgaaaggaatgctgcaccataattctgcccaggtttttttgcctgtgcattacccaatgatcaatcacaggcaggtgttctggggccagagaaaaagtggtaggaagctatggaaaagcagtcacctgggtccagcgatgcacccagaatctcccaaagaaacacagcatttaagagcaagttacagtaaaagttaacattgagatatgaagaaatctggtctgaatttgaggatgtggattattttatgaggatgtgtgttttattacagtcatg

SEQ ID NO: 75110 - DNA, 877 bp, Homo sapiens
cataagacatcgttcttggcacagtgggactctaaaatgacgtttacctaagtaaagttaggatgacatctttatcctcatacctttgacaggtacccttgttttcatcaaaatttgtgttagctacacttaggctaaaatatttgtctttagtaaagtgaaaaatccttctgtaaagtgaccaacaattcacttagtttgtttttaaagtcaggacttttcattttttaggttttcttagtgtgaaatatgaactcatgagcatctggcctgggaactggaccagttttaaatctcgtgttgagagccggaagatgctggagaaggaatgtggtggaatgactgcctgagaatgaaccattctccartgagaggtaaattaattatttcagggaactaggatatcaactagcaaattacgtcttaccaggcaccagatgattatctgtttccccaagttaatttatttcattgggtgaacccgccactccttaaagactagagtatattggttctacctgggaccaggtccaatattaataataattttcaaatgagctcttcagacccttaattcagctgttaagaagaagacaaataacgaaaggaatgctgcaccataattctgcccaggtttttttgcctgtgcattacccaatgatcaatcacaggcaggtgttctggggccagagaaaaagtggtaggaagctatggaaaagcagtcacctgggtccagcgatgcacccagaatctcccaaagaaacacagcatttaagagcaagttacagtaaaagttaacattgagatatgaagaaatctggtctgaatttgaggatgtggattattttatgaggatgtgtgttttattacagtcatg

SEQ ID NO: 75111 - DNA, 877 bp, Homo sapiens
cataagacatcgttcttggcacagtgggactctaaaatgacgtttacctaagtaaagttaggatgacatctttatcctcatacctttgacaggtacccttgttttcatcaaaatttgtgttagctacacttaggctaaaatatttgtctttagtaaagtgaaaaatccttctgtaaagtgaccaacaattcacttagtttgtttttaaagtcaggacttttcattttttaggttttcttagtgtgaaatatgaactcatgagcatctggcctgggaactggaccagttttaaatctcgtgttgagagccggaagatgctggagaaggaatgtggtggaatgactgcctgagaatgaaccattctccagtgagaggtaaattaattatttcagggaactaggatatcaactrgcaaattacgtcttaccaggcaccagatgattatctgtttccccaagttaatttatttcattgggtgaacccgccactccttaaagactagagtatattggttctacctgggaccaggtccaatattaataataattttcaaatgagctcttcagacccttaattcagctgttaagaagaagacaaataacgaaaggaatgctgcaccataattctgcccaggtttttttgcctgtgcattacccaatgatcaatcacaggcaggtgttctggggccagagaaaaagtggtaggaagctatggaaaagcagtcacctgggtccagcgatgcacccagaatctcccaaagaaacacagcatttaagagcaagttacagtaaaagttaacattgagatatgaagaaatctggtctgaatttgaggatgtggattattttatgaggatgtgtgttttattacagtcatg

SEQ ID NO: 75112 - DNA, 877 bp, Homo sapiens
cataagacatcgttcttggcacagtgggactctaaaatgacgtttacctaagtaaagttaggatgacatctttatcctcatacctttgacaggtacccttgttttcatcaaaatttgtgttagctacacttaggctaaaatatttgtctttagtaaagtgaaaaatccttctgtaaagtgaccaacaattcacttagtttgtttttaaagtcaggacttttcattttttaggttttcttagtgtgaaatatgaactcatgagcatctggcctgggaactggaccagttttaaatctcgtgttgagagccggaagatgctggagaaggaatgtggtggaatgactgcctgagaatgaaccattctccagtgagaggtaaattaattatttcagggaactaggatatcaactagcaaattacgtcttaccaggcaccagatgattatctgtttccccaagttaatttatttcattgggtgaacccgccactccttaaagactagagtatattggttctacctgggaccaggtccaatattaataataattttcaaatgagctcttcagacccttaattcagctgttaagaagaagacaaataacgaaaggaatgctgcaccataattctgcccaggtttttttgcctgtgcattacccaatgatcaatcacaggcaggtgttctggggccagagaaaaagtggtaggaagctatggaaaagcagtcacctgggtccagcgaygcacccagaatctcccaaagaaacacagcatttaagagcaagttacagtaaaagttaacattgagatatgaagaaatctggtctgaatttgaggatgtggattattttatgaggatgtgtgttttattacagtcatg

SEQ ID NO: 75113 - DNA, 821 bp, Homo sapiens
ggaacataacaagcagcattatctacttttaattgattgtgaaacctctttttttttgagacggaatctcgcctgtcacccaggctggagtgcaatggcgcgatgttggcttactgcaacctccacctcctgggttcaagcgactctcttgcctcagcctcccaagtagctgggattacagacatgcaccaccacgcttagctaattttttgtatctttagtraaggcaaagtttcaccatgttggccaggctggtctcgaactcctgaccttgtgatctgcccgcctcggcctcccaaagtgatgggattataggcatgagccactgtgcctggctgattgtaaaaccatttttaaagaggtcatgtctctcacataatacacttccacttataaaggtatgcttctactttctcacataaaatatgaaaaaaaaaccctgagatcaatcacatatggaaaaaattgactttaacagcacacctcattttaattgtttgtgctaagtatatccatcatataagtgtctttggggcacacatcctttagttgtgaaaatatgattatatatacatagggtgtatggagagaggaagagaagagaatccaaattccataagtacaaatacctttatacatgtaagtattcatgatgtgcattattgatggtaggtcatcttaacatactaaagcttttcattttggataggcagctcaatgaggagaaacttattaaaaagaaaagtcaaggtggaaatttccctataggcatttggcactttgcacaggcaccaaaaatgtgtgcaaatgtaaatgtacct

SEQ ID NO: 75114 - DNA, 821 bp, Homo sapiens
ggaacataacaagcagcattatctacttttaattgattgtgaaacctctttttttttgagacggaatctcgcctgtcacccaggctggagtgcaatggcgcgatgttggcttactgcaacctccacctcctgggttcaagcgactctcttgcctcagcctcccaagtagctgggattacagacatgcaccaccacgcttagctaattttttgtatctttagtaaaggcaaagtttcaccatgttggccaggctggtctcgaactcctgaccttgtgatctgcccgcctcggcctcccaaagtgatgggattataggcatragccactgtgcctggctgattgtaaaaccatttttaaagaggtcatgtctctcacataatacacttccacttataaaggtatgcttctactttctcacataaaatatgaaaaaaaaaccctgagatcaatcacatatggaaaaaattgactttaacagcacacctcattttaattgtttgtgctaagtatatccatcatataagtgtctttggggcacacatcctttagttgtgaaaatatgattatatatacatagggtgtatggagagaggaagagaagagaatccaaattccataagtacaaatacctttatacatgtaagtattcatgatgtgcattattgatggtaggtcatcttaacatactaaagcttttcattttggataggcagctcaatgaggagaaacttattaaaaagaaaagtcaaggtggaaatttccctataggcatttggcactttgcacaggcaccaaaaatgtgtgcaaatgtaaatgtacct

SEQ ID NO: 75115 - DNA, 630 bp, Homo sapiens
cttgacacatgaatattacattttgtgatgctcagaaaatgggaagaaacaacaaagtgggtggtagtccagccttggcaattcaaaggaaaattgacttgttgctaattccagcccactcactctcttaatcctctggacaaaaagcagtagtcaggagccttacgattctgggattaatggagacaggaggttgagctgtggtgatgtggaagggacagcaaagttctttcttttgccaatataattatagcccttattatgtgccagatactgttttagtgttatgctttgcatatactcactcatttgatgttcacgagaaccctaaaagcttgggaatagttttaattccatgttatgatgaggcaactgaaataaataatgaataagttggtcaaatttgcagtgtgattgtcagaggcagatttgaacctggggagctttgtgctagagactggctcctaaccatcacactgcctctcaaaatgggcctatgccaagcgagrgtccccctttctgtattatgcaaactaacttgggtgcaccatgactggagtttgggatttatatccagatgactagcttttcaatccgttttttattataagcaacctggacctatgtgag

SEQ ID NO: 75116 - DNA, 1332 bp, Homo sapiens
tgtgtcctccagggaaaaggaatttgttttcggttgagtggggttctgggtctaatgggtctatctattttgaaagaaccagggaaaaagagagagtactctagaaccagaaggaaggaaggacgtgctcccgggggagataagtaacagaggaagggccaggcgtagtggctcatgcctgtaatcccagcactttgggaggccgaggcaggtggatcaacagaggtcaggagttcgagaccagcctggacaacatggtgaaactccgtctctattaaaaatacaaaaattaatacaaaaattagctgggtgtggtggtgggcacctgtaatcccagctacttaggaggctgaggcaggagaattgcttaaayccaggaggtggaggttgcagcgagcactgcactccagcaggggtgacagagtgagactccatctaaaagaaaaaaaaaagaaaaaaaaagaaagggaggaggaagaagaatttccccctttcacagagatacaggaatgaggaaagagagggaaggagacagcccctgggagcatggctgctgatccttgtgcatttacctagaaagtggatgcacctagcaaaggacccccatggaggcaaaggactcccatgttggagctcccataagctaagtgacagttgaatcagaatccatggactgtcccatgtttaagttgaaacctctcattatttgcactcaagagttcaccagctcttcctcccatggaagagcggtaaggactttagctcattagcatccagcacctcaaccactgaccacccaatggaaatgacacctgtttgggtaatgcacccttgcttagtcaccaaacacacaatacctaaagacactaataaagccaagaaagaggctgggtgcggtggctcacacctgtaatcccagcactttgggaggccgaggtgggtggatcacttgaggtcgggagttcgagaccagcctgacaaaatggagaaaccctgtctctactaaaaatacaaaaattagctgggcatgatggcacatgcctgtaatcccaggtactctggagactgaggcaggagaatcgctttaacccggaaggcagaggttgcggtgagccaagatcacgccattgcactccagcccaggcaacaagagtgaaactctgcctcaaaataaaataaaaataaataaataaataaaataaaataaaataaatcacattattggctgggtgcggtggctcacacctgtaatctcagcactttgggaggctgaagtggacagatcacgaggtcaggagatcgagaccatcctggctaacacagtgaaacccc

SEQ ID NO: 75117 - DNA, 1332 bp, Homo sapiens
tgtgtcctccagggaaaaggaatttgttttcggttgagtggggttctgggtctaatgggtctatctattttgaaagaaccagggaaaaagagagagtactctagaaccagaaggaaggaaggacgtgctcccgggggagataagtaacagaggaagggccaggcgtagtggctcatgcctgtaatcccagcactttgggaggccgaggcaggtggatcaacagaggtcaggagttcgagaccagcctggacaacatggtgaaactccgtctctattaaaaatacaaaaattaatacaaaaattagctgggtgtggtggtgggcacctgtaatcccagctacttaggaggctgaggcaggagaattgcttaaacccaggaggtggaggttgcagcgagcactgcactscagcaggggtgacagagtgagactccatctaaaagaaaaaaaaaagaaaaaaaaagaaagggaggaggaagaagaatttccccctttcacagagatacaggaatgaggaaagagagggaaggagacagcccctgggagcatggctgctgatccttgtgcatttacctagaaagtggatgcacctagcaaaggacccccatggaggcaaaggactcccatgttggagctcccataagctaagtgacagttgaatcagaatccatggactgtcccatgtttaagttgaaacctctcattatttgcactcaagagttcaccagctcttcctcccatggaagagcggtaaggactttagctcattagcatccagcacctcaaccactgaccacccaatggaaatgacacctgtttgggtaatgcacccttgcttagtcaccaaacacacaatacctaaagacactaataaagccaagaaagaggctgggtgcggtggctcacacctgtaatcccagcactttgggaggccgaggtgggtggatcacttgaggtcgggagttcgagaccagcctgacaaaatggagaaaccctgtctctactaaaaatacaaaaattagctgggcatgatggcacatgcctgtaatcccaggtactctggagactgaggcaggagaatcgctttaacccggaaggcagaggttgcggtgagccaagatcacgccattgcactccagcccaggcaacaagagtgaaactctgcctcaaaataaaataaaaataaataaataaataaaataaaataaaataaatcacattattggctgggtgcggtggctcacacctgtaatctcagcactttgggaggctgaagtggacagatcacgaggtcaggagatcgagaccatcctggctaacacagtgaaacccc

SEQ ID NO: 75118 - DNA, 722 bp, Homo sapiens
gttagtaacatgaatagaaaacccaaataaaacccctcttctggcagtggctttgcaccatcctcttcatcctcaaggtagcctactattgccattagctactaagtctaatcccaaggttccrgtttcacccttcactggctttgctgcacggtggagtgcagcacgttgtaacaggaccattggcactcatcaccccaggacaagcagggcaagatcaggttaattttgaacaaaacgataaaaacaggaagttgagcctccagttccctttgccctctaacattgttctctaccatttcacaggccttgaggcttgatgccccttgctgtcttttgtgcgttaagagcttggttccatgttagtgttggcttgttcctttgacttattgttactggcaatgctttgataaacttgacattttaaactgcagaaacaagggaatatgatgttcattaggcttagctgtttgacactaaagtgctaaaccaactcatgtggtctctattattagtttacgaaccctggtccatctctagaggccgatgtttccagacagcttcatttcctgctggtgaacaagttctctcattatcttccttctttttctgcctagtcactgaaacagtcattgaattgttgtctcatgcctgtgtgctatcaagcaccatggaatatggaagaaggaatagtggttgtgccctccctctctctggtgagg

SEQ ID NO: 75119 - DNA, 905 bp, Homo sapiens
agtgtctctgatctcatgctttccttgggggcttgtcctagttgcagtgatactgcagagggattagaaacatgggcttcctgtccacgttgaagtcccgtctccagtgcttcctagctgtgtgaccttggaaagatccttaatctcacccagcctcagttttcttttatgaaattggaagaagcagtagtggcyatctagggtggttgtgagggtgaaaacagataacctccataaacccacattacagtggcctggggaagtgctttgcaaagggggcttaggaaaagtagctgtggaagaagagacagcagcaacccctagagatctcagaaactgtagatgccaatcctgttcaatttcaatcataaatgttttagtcatacaccagggcatgtatatatattatgttctgtaagtctcactatcagtacttattctgaaaagcataagacatttgcatcacaattccaatagttaaaaatacccttgagttgatttgatgtgtgaacttttaattccatctttagtatcataattttagagttgatgtggatttttgaggtcagctaatctacctattattcaatcaccaaacctttattaagccccaataatataataataatagcttccagttatggctgctcactatatccgagtactttacatatattatctctaatcctcatatcaatgcttcgaggtagggattatccacattttacaaatgaagatgaggctcagtggtaatcaactggcccaaggccacaaacctagccacgttgttcagctgggtttgaacacagatccctcagctaccagtctgtctgtgttttcctttctgcacacacacccctattcgtgtgtgcacatgcgcctatgtctttgttttttcccatgca

SEQ ID NO: 75120 - DNA, 544 bp, Homo sapiens
tcagactctgaggctgcatgaaacttgacccccaacacttccatctccagggagaatagagaatgtgtgtcttggaagacaggctgtcatttgcttgtgaccgtgacargctacttcagctgtggggcgggggggggggggggggggggtacggtgattaccagtaacacctgagacagagccctggacccaggcgtgttcaataaatagctgatgaaaatgagattcactgccaagtcaccacgaggtcatcctgtctcctcctgctgtgctccccctgtagcccatgtggactgggtcccctctcaggctgcctgggtcccagcagagggcagaggacagtggagggtccctgtcctggggacggtcaaggcagagcagtcaccacctgtgctgggtgagtggtcactggccttcctctggcccaactgggggctccaaaatgaccataattacaaacctgatactggccctacgtcctaccaaaaacccagagggagatggaaacagtggcactgatggattctagagttgaacaggaggt

SEQ ID NO: 75121 - DNA, 656 bp, Homo sapiens
tcattcatttaacaaatacttctcaaaccctccttatccaaatacacgcaaaggaaatagtgtcagccctgaaacaacctcctctcaatcacaaaaccaccacttgagatgctgttctggtcatgggctgcaatactttgctcaactctgctatggtctctttctggagtgaaaggaggagaatgtgcttctggaaggctagagattgagtgtggctgttactttaatgctctcagccaaccaagcaagatgtagaaattgagtatggcctatgggtctgagaatcaaaatagaccagaaatagaccccagttctggttaaactggaaatctgtgtttgggatatgagatttcactttatagacaygtttcacagggatataccaatccagaatattaatgatcgaacagtcaaagtcattccaaatcttccatatacagtagaattttcagagtaagtgtactggtgagcatttattgttattgctcaggtaaagctgaacttttttcattataacaataggaatccttcttgctttgagttttatagcaatcagcaactgagaagaaacatctccagataatttgacaaggaatttttctgcattgttaccaaaattatatataaaactaaagtctgagaaagcattgcaagta

SEQ ID NO: 75122 - DNA, 405 bp, Homo sapiens
aaaggtttcaggaaaaaaagttgcaaaccaaaatcctcttaaaatcttttttttttttttgatacacagcagacccccccaaaatgaaatgaactcgaactcacccaactcagccctgccactcaatgctggcacatatccccccaccctcactctaccagttaatacagattcgcccatcactggaagcagaaccggaatgacccttgcatttccacaagatgaagaaaargaagccaaaggtgccaactggacctaccaaagcttgactcacccacagcagcactgaagatgtcggcagggaggacccacctggcacgtagtagatgctcagtaaagagtaaagctctgttcaaaaaaggaaattgcctccacggttcaactcattttccacaatttttcttt

SEQ ID NO: 75123 - DNA, 542 bp, Homo sapiens
cactccatcagtaagggaggccaggcagcctggtgygatcccatcaactgaatggccgggcgggccagtctgcccactcttacttctggagggggctcctggaggggcctgtagatacatgcttgggactgcctggcctgggatcggcaggattccaccgtctgtttgattcagtgcaagttctccagggaggatgcgtcatcgcagcatggggggctcctgtgggctgtgcggggatgagagcccagggaaggtgaggctccggggctgcatcccacagtggctggacaccccgaatactgtcccagggcacagacccaggggctgctgggaggtgtccacacaacgaattggggtgtggggagaagggtgtgagtcgagggtggaacagaggggaccaggaaatgctggcccaggtcctagggtagggccacaacaggaagaggcctgtgggaaggtcccacacaggaccctggaacgagggggacgcaggccatggagggagtggggcggggcagggggatgctgcacagaaaggaagg

SEQ ID NO: 75124 - DNA, 1138 bp, Homo sapiens
ggaaggacctggatggagcagggccgctgctccacaaagtgctttcgggccaggcctcttgccagtgggcatcaggacactggggtagggctaagctggccagatttgccctcctggctggcacgggaccctcccccaaccgctccaggagacccagctcctcctgccgagggcctgagaccaggacacactaggaaactgaaatctgatccccaggtatgcaggctggggagggggtgacacaggaccattaatcaaaggcaaatgccaaggagaaaattacagaggtaagaagatgattgtatttaacttgtttttctccccttacagccccagctcgtgagcctctacatgcccacatctgtgcgtgcatgtgtgtgcataagtgtgtgtgtgtgtgtgtgtgagtgcaggcacaggcagggtgtggggagaaggggcaggctaagaggggcatggccagccagtgggcccccaaaggggaggagggatccagttggcgctgggagggagtgctttgctgtcccagggggtgcttccggtccagcccacttcccaagctggcagtgtcccagctcctcattatctcagagtcaaaacaccagggggggaggccgggcagctggaagcccagctggcccccacccccatccctccctggcccactgaggcacttccttccagtctcaggtccacagacaaaatcctccttgtgttgcagtttttgctcagaagcaggggcagtgcccaccgagagggtgctcctgccgcctcaccctgcccccaccccgccctcactctgggcctggacacaggtcaagaactgccccaacgcacaatcatctgttcaccgcacaatcatctgttcaccgagtgctcctccygcggatcactttttacatcttgttttgggccgggtgtggtggctgacacctgtaatcccaacaatttgggaggctgaggtgggaagatcacctgaggtcaggaatttgagaccagtctggccaacatggtgaaaccctgtctctactaaaaatacaaaaattagccgggcatggtggcaggtgcctttattcccagctacttgggaggctgaggcaggagaatcacttgaacctggaagtgaaggttgcaatga

SEQ ID NO: 75125 - DNA, 537 bp, Homo sapiens
aggagttgccaagccccctcctcacttctttgcatgctcatgctcctctttctccttggactctctcctccactgctaaaaatcccacctcttccttgaaatgcccacttcccaggttcacccacatcatctgatgtggttttcccagtgcagtcctgagtgggtgccttgaaaagtcctctgtgtatcccagggggagcgtgtccctgctgtcctccagcaaccccaggaccaggaccatgtccctttcacctttatcaccgagcctcacatacagtttgtcrttgggaaggtcttattgcatgaaagagggggtgaagaaatgacggaacaaatggccaggtctgctgcagctccacagtgactggtgctccctttacagctgggacagccgctcagaaccaaaggcaaaccttgccttccacagagctgtgggcggcactttgccctgccctgtcctctcatccccactgcctcgggcagcacaaagcccaggtgaagccaggccagccagacatgtcctgactttgtgttctc

SEQ ID NO: 75126 - DNA, 760 bp, Homo sapiens
agagtgcaggggagcctgatgccyggggtagtggccccctctgagctaccctccctgtgatgggggctatactgggccttttcttttctgagcaatttcagaaaacattttgagattaaagtgaatgtgacacagaccagaaggggcaggaaggacactgtcagaaccaacagaacagcaagaatacgttcagaggggccacccccacactcacactccagggctgggcagacccctgagaatgccagaagatcacagaaagggggcccaggacagaggcaagggcctgcctccttcttctgcctccttctcctgcctcagccgggcctcctggccctgcctccctcagggagtgtccccagcagagcagctgagagagagaattacttagtcctcaggggcaggagtcccagaccaaccccacaagggacccagccactgccctccagcctccattccccactcaggcccccaggacgttttgcaggaagggccaatggagggcaggtggaagaggcaggtgtggggggagagcggcagggggcagtagagcatctgccctggtggctggaggccagagaaaggccaaaagggaggtcaatggcacaggaggagtgaagagcagagagggaggccaagccaaaagagcagagggagggtgggccatgggggaagggacttcagggggctgcagggtggcagggtccaaaggccaggggcagccagtgggagatgggagcttggctgtttgagaagggcc

SEQ ID NO: 75127 - DNA, 545 bp, Homo sapiens
ccagtatcttacaaagactgaaaagttagtattatgtgatttatagctttcgtgttctttttctatcacagaaaccaaagaaaatctgaaggaagatgacttcaaatatgtaattctttttttattttttgagatagtctcactctgtcacaaaggctggagtgcagtggcacaatcttggctcactgcaacctccacctcccgagctcaagtgattctcatgcctcagcctcccaagtagctgggactacaggcttgtgccaccacacctggctaattaatttttggggctagagacagggtttcaccatgttggccaggctggtcttgaactcctgacctccatccatccacccaccttggcctcccaaagtgctgggattacaggcgtgagccaccatactcagcccaaacatgtaatmctttactaaaaaacttgggagtcttgcatagggaatataaatttgctggcgacataaatatgggaataaataaatgccaatgtggctacgaaaaagagagtacaaattaaaatccatctttaa

SEQ ID NO: 75128 - DNA, 952 bp, Homo sapiens
gggtggtctcaaacttctgggctcaagggatcctcctgcctcagccccgcaaagtgctaagattgtagatgtgagccaccacacccggccctgagttcccttttggctctagaatgtgaggatcgcaataaatggctgtttcctgcaggcctctctttccccatcaggaccctccagtcctttacaggtataacatgagatggttctgagacatggctctttttatagagagcacccattttcaactgaccccaaatgtgaaaatccagatcagtcaaccaaaggaaggtattttttttttcttaaaatgaaggcttcctggtttgtttagaaatgtaggttagccttcaagaactcggtttccatgcagcttttcttcaaggtcagattatactttccctgctgggacaaagcactgttaaacacacatgtggatcttcagtttcctgtggatttcctgtcctccagatctcgtgcctgctgggccagattgaactggaaggtcggagacccccgctgatggcgtctggcaagtcactgccctgctttgagccttatgagttcacccccagggctggtggctttgtcactggcaggttcctyaccggcatcaaacctcctgtatgtattttggtttttccatttagctttttccctcatttctaggcttaattgtaggtgaactatgactgccctacagggtagggcagaagacactgggggctattgtagctgtcgaggtcaaaaagtcctaggagatcagggaagggagtggcctgtctggtcaggaaaggctgctggaggtgttggcctgagcccttcaggaagcgcactgtcctcactgtcacctttgggacctgggtcccattctctgcaggagttcttcttccactgcatggcaggacgagagggcctggtggacactgctgtgaaaaccagccgctcaggctat

SEQ ID NO: 75129 - DNA, 960 bp, Homo sapiens
agccactgctctcacttcctccccattgcaaaagggactcaaggtgggaatcagggtcagctgcaccctgagaggaacttacctgatttgcagccagggatgctcctctcatcttttggggaactattgagaaaggaaagacgtgcccaatttcccaggatttctctgaattcctggatatttactcctcagatttcacatctgggggatgcagtgatgtgctgaagctagctcataccagctcaaaaaagctgaccatgctcctctcctcacagttccacgtccacaccttcatgttggtcaccatggtgggagtagggacaccatgagaactggcaattctacccatcagggatttaagggcttttgttttcagagagctgtggttacacactgcccagcacacccctgggtgggttccttaggacccctagggaagtagtcccagctactcaggaggctgaggtgggaggatcgattgagcccaggaggtcgaggctgcagtgagctgtgattgtgccactgcatgctagtctgggcaacagagcaagactctgtcttaaaaaaaaaaaaaaaaagatgcattctctttatacatgttacactttaagtttttggaggaagaaaaaaagagcattttcttttgaagttactcacattttagtggggatagaggccaataatgccactggctccaatgataagagttttactagcttttctagttttttgctagtttttctagagggcccaggggagccagggagataccctttgggctgtggggtttcattttggtcacatgtctcatttctgcctctgattctgctagttctcagaaccactaatattctgccctacatgttagggtctatttttagaacttcctcttgacagcaccactcctatcttgtgtccacagaagggkatcctgactcagcacagggttctcgggtgtgc

SEQ ID NO: 75130 - DNA, 1310 bp, Homo sapiens
ctcccatttacccaggagatatatatttataatcttcaagttgcattttaaaatgattttaaaaagccttatttacaaaaacatgcaactmttttcattgtgaggtcatatccctagggagacttactaaatctgtgttcaaatttctttgccgattttttcaccactgtcatcaggtgacctttataaacatacaaactagcattgactgaggtcatttcaggtgacggcatctcagacagctgtcattacttaaaaagatgaattaaaaaaagtggagggaggaaaggtgaaagagaaatgcagaaagagaaaaaagaaaataaaagagaggaaaagagaaagaggaaagaatgagaaagagaaggaaggaaagaaggaagaggaaagaggggaaggaagcaaaaaaggaaggaagaggaaataggggaaggaaggaagggaggaaagaagaaaggaagggaagaatagagggaggaagtgagggagggagagaggagactaaggtttctaatataagactacatggaattagtcttttctgagggataattttcagaaaaataaacaaacaaaaaacccttggctcatattcagtcatctctggtgccatcttttcagtcatagtgtctagaacagtgccaatgaatgtttctggaatgaattaactgattgctattgtcttctagccctaacaaagatttctccatgacccttagatccttggacccctggtcctaagagaaacatcacccacctcatgcccccatgcctggcttttgcttggctactaagctccatcttgcttcttttttcttccaacatgtgtattcagaagctcttggcttttattaaatgcaactctgctgctaatacattacagaatttaatcttgtgccagccacaccctggcactgaacccagctgggcagggggccagatttgaagtgaggttctccctgccagtgattaagtttggttaagaggtgagatagtcactgccagatgcaaaaactccaggaggcatttccagctgcatgtagaactctgtagtttctgcctctggtgatggagtttgggggtcatctgaatggggagtgatgagaggtaggagctgaaatagaaagatgcggccgggcacggtggctcacgcctgtaatcccagcactttgggaggccgagataggcggatcacgaggtcaggaggttgagaccagcctgaccaacatggtgaaaccccgtctctactacaaatacaaaaattagccagccatggtggtgtgcgcatgtaatcccagctactcgggagg

SEQ ID NO: 75131 - DNA, 1413 bp, Homo sapiens
ggatcctgggaatgaaaacagaatgaaaagaatccagggaaatgccccagactgcctcaaaaaactgaatagaagaaaaaaaatcctaaacctttatgtattagtccattttcatgctgctgataaagacatacccgagactgggtaatttacacagaaaaagaggtttaatggactcaaggttccatgtggctggggaggcctcccaatcatggtggcaggtgaaggggacgtctcacatggtggcagacaagagagaatgagagccaagtgaaaggggaaaccccttataaaaccatcagacctcatgagacttattccctaccaygagaacagtatgggagaaaccgcccccatgattccatcacctcccaccgggtgcctcccaccacacatgggaattatgggagctacaattcaagatgagatggggtgggtgcattaattttagaaaaacgagcacagggactaatgattgttacaatctacagacatagactagtctgtcactgaaagggctttcagtatgcatctcataaccccatgcctctgttttaagggagaaaggggcccagtgagtgactttgccactggaaagcaaattgtagagttggaaccggaacccgcacctccagattcccagttcagcattggaactggactaggatttcttatttaacatcctgtgtaaggttgtgcacttggatctgggttagaatcccagctcaggcacttactctctgtgggaacttgggtttttcccaacttcacagttttctcatcagtgaaactggaaaaaaaattacctcctcctttctttttaagtttgttgtggggatgtgggaattaaataaattaagtaaagcatgtcagagcttggttcaatgcctgacaattagagaattttcaacacacgtcagccagatccagtgatgagcacttgattgagtggaattgagctgatgcagtgatagcagacattcttctgaagcatacactctgcagtcacagaaaaaactggttcaggaaagtggtgagttggttgatgacaaacatgttgaggaactttgccaaagaaacatctgagtaaaggccaaattcctggctcatgatgtttttaaaattgatttttgtgtgtttttagattggccaagaagatgctcaaaatggaggaatggaagtttgaacatgaggaggagggcaagacagagatgtgggtgtgtctttcgggaacttcaaagtcctaggtgtccttagaggtactgagggtcctgcacagggctcctctatgaacacgtgacctacagtaagaggttagagcttcaggccaagcagggctaacctcacgcaacagtgagaaacaagttattcatctttggggtccttcaatggcctctgagcattcctgcttgg

SEQ ID NO: 75132 - DNA, 807 bp, Homo sapiens
aattaaccacatactgaaactatccatcttatttatttacttgtttattatatctccactatctcttgcttctttccaagtaagttgtgacctccatgtgaatgagggctttgtccttcttaaaagaggcaattatggagcagtgattaagctctcacactctggaagcagatttcttggattcatagcccaattttgccacttgctaggtatttgacctaaaataattgtttgacctctctgttcctctctcttctcattagtaaaatgacagcagtaaaaagacctgcctcatgaaattgttgtaaaaagctcactccctgcaagttatccctggcgcaaggcacatactcagcaaatgttggctgccactgttgatgactgtacagtacctgcttaacacgtattaatagcgtgaacaggccgggcgtggtggcttatgcctgtaatcccagcacttcgggaggctgaggtgggtggatcaactgatgttaggatttcgagcccagcttggccaacgtggtgaaaccctgtctctactaaaaatgcaaaaattagctgggyggggtggcgggtgcctgtaatcccagctactcgggaggctgaggcgggagaatcgcttgaacccgggaggtggaggttgcagtgagccgaggttgcaccattgcactccagcctgggtgacagagcgagactctgtctcaaaaaataaaaataaataaataaataaatagagtgaacaataaattagttttattattcaaggaacacttctgctctgtcatggaacatttttgggaatatgca

SEQ ID NO: 75133 - DNA, 800 bp, Homo sapiens
gcgttatatctgctttcagtaactggctctcctgtccgcatccagtaaggtttccactcttctctccgttgactgctgaagttactgaaacagcaaccacaaatggccttactaacctacttattttgcaattaaacttttaaaagatatccccctactcctcccctagggtggaacagaaatggctccgcggcgttggcagctcgtctgcgaggggaccctggctccccgaggctgcagtcctttttcttggacagaacgccccgcaggaccgttccctccactttcccccgcactaaggcagcgcaccgccagcacacacagcgctggcgcccgcatcgcgccgcaccacacgcgtctccggcttgaggagccagtcaccgagacccggagcgggaacgagatgtaaacacggagtggggacatgcagcccgatctgagaaggcggcgtgaagagtagacacagcctgcgccaggcggttcttatttacccagcacttacactccagggcaagcgggcccaggcagcgcactcttggagaaggatgcactggcgcagagcctggacctgctgaagcgggaaggaggagctagggctgggggcggagctttcacacgcgcaccctctgttccctccctycctccctcgacacaagcaactgggtctccagccgccactccgggtttatttgtttacaagcggattacgtcagctcctccctctcttccctatctctggacccgcctcctgaactcttttcccgcccctttcggctccgaaccggcttgcgtcacaatgg

SEQ ID NO: 75134 - DNA, 583 bp, Homo sapiens
acagaaatcttggaaatggtggacagcaaatggttttaaggaggaaaatgggtttgaattgaattggatagcaggatatctgaatgattctatcactttacaaagtaatggtcagcaccattacaagtacaattacatgatattacaattacttaattgaccattacaattcaagggtcaatataacccttgagttgactattcattagctttgttcaaaagcccagctgaaacaaaacactagtgaaaaaagatgaactaagaggacaccatatattccayatttgttttgttggcttgtttaatttctactggaggttataaattatttgtatgtttatgaaagctatgtacctaattctcagaaaaataccactacaaacacacatataaagttttgtacggagcccacgctaagaatctcttctttttagaggaataaaagggggtaccaagccaaacaaagtttttattgttatcattattattattagttattgttattttaagatggggaattacagacagaagggaaatataggtagggaaggttagttagaacaggcgtgtattatacaaacag

SEQ ID NO: 75135 - DNA, 672 bp, Homo sapiens
tgtgttatggcattggaggatgctggcccctggtcactttggcctcctcgtgccaacgaacttatgggaaagaagagggttcttgttatgaccggggtgattgatcctgactatcaaggggcattaagatgaccatttcacacagggagtgggggaatgtgtctgtctcacagaaagttgtctgtggcaagatttgcacttctgcagtctggcctccttggacttgtgcaaaacgggaacactccccactcgtatgattgatctagcatcactttggcatctgcacccagcaaggactgtatgagaagggaaatttgcaggcccatgtcactcccaaacgtgagcatcaaaactgtacagaaatcatttgcaaatcaatgtatacaaaaatagcaaacacaaatattcaggtttatcccttgagttcctggtcagtttaataggacaaacttcagtgggtggaaaaataaatcattagcattcaactttcatcataagaactctgcaaattatgagcggaaagaatctcccttagcatgtgaaagggtattatctccctcagcttktggttgctatcacagaacacctcagactaggccatttacaaagaatgataatgtatttctcacagctctggaggctgcgaatccatgatcaaggtgctggaatttg

SEQ ID NO: 75136 - DNA, 1083 bp, Homo sapiens
catccataaattcatttgaactgacttaggtcagaaaactcacaatgataccagttccatatgcaaatcatttaaatttatggaaagtcatgttttaccatcaaaaatccctgtgagatatgttgccaaattttgtcttcttacaggttagggattgtaaaggagatttggttgcttttcctcatcagttacataacaaattcaaaatacacacataaaatctaagtaaaaactttaccaagcctctagcctcccatttcagctaggttgctgcttctaagtcacctgccatgtagaatttatcacaaccagtaaacaagcaaatttatgctttcctccataaaaacaaagactcaggaaatttaggtaaattttttaacgtcacaaagtggttgctcaaactcttccttatgtaacctaagcaatgtagattctctaatgatagtttccaataaaagcttaatgaacattcgtgttattttaacctgctattcatgttaagaagttcaaacactgaagtacttgcatttgataaatactgttatttataacagaaagcttaattaactggatacattaacctcattataaatataatatttgatagcttagtaattctgcagttgaaaacaggttaatatatgagttccgtgttcagtctaagttaatagaaagttgcacctcattttcttttcaacgcattcctccctactaaagtttgattgtttatcttcctgaattttatcatagaataggttttattttatttttctaggatgcgaaatgatagctcaggtggaaaattaaacaagacacataatattaaattggycttagtctattaagaaaaattagggtacaggtatgaaagaaattttgctaccggaatttttagcttttaatacactccacagtatctggcagcagtttttcaggagacactagattgacaggttaattatagaagacgtaaaactatatgtacagatagcaaatcaaacgagtattcattcacttggcactctaccagaaagcggcagacactttttatttgaaactatttgaggatacaaatcatataat

SEQ ID NO: 75137 - DNA, 913 bp, Homo sapiens
tgtggaggaatgggttgaacgtgggcattttagcatgctgctctggaaatctgttctctacttgattaatatttctatacccagactgccctccttggagacagagatctatttctcttgaaattccccagaggactctttactatattttgttcaataagtgctattaataaatgcaatttgtagaacgtaaataaactttattttttaaagttctagactaaacccaggcagcttctgtggggttcattctacgtgaagagttctgagcatgcacccacagcacacacggtgccattagctcattcagcttctcaacataatttcatacccggctagcatgagattgtcttttataaaagcattgacccatagcagtggcagcatatgtctattagtgtgctcaacattaaattggaattttaatgctgataattaactagaataatatctcacttggacagaagccatttcatcctctcttatgagytataatgttatttgaacaactatcaagtccaaagaagtagaaagaaaattttttattacagtgttttaggaaaggtaaaagaataaattcagatttcatgaaaatatttcttaaagataatgatcattctgaaatggcattagttaacacgaaacaatcttgttactaaaatgctatttcaattttcttctatttttaagccaagcgagtcatgaaggaataatattggtcgttgtatctgtattactaatacaaacgtgtaggcttttaatagtattcaagaaaatctggagaaatgaaattcacaaattttattgaagaccagtactagtaattttctttcataacattctgtaggaatgcttgataagtccgctttggtttcctgttttggtcaggctaaccttaaatgaagagcctggc

SEQ ID NO: 75138 - DNA, 913 bp, Homo sapiens
tgtggaggaatgggttgaacgtgggcattttagcatgctgctctggaaatctgttctctacttgattaatatttctatacccagactgccctccttggagacagagatctatttctcttgaaattccccagaggactctttactatattttgttcaataagtgctattaataaatgcaatttgtagaacgtaaataaactttattttttaaagttctagactaaacccaggcagcttctgtggggttcattctacgtgaagagttctgagcatgcacccacagcacacacggtgccattagctcattcagcttctcaacataatttcatacccggctagcatgagattgtcttttataaaagcattgacccatagcagtggcagcatatgtctattagtgtgctcaacattaaattggaattttaatgctgataattaactagaataatatctcacttggacagaagccatttcatcctctcttatgagctataatgttatttgaacaactatcaagtccaaagaagtagaaagaaaattttttattacartgttttaggaaaggtaaaagaataaattcagatttcatgaaaatatttcttaaagataatgatcattctgaaatggcattagttaacacgaaacaatcttgttactaaaatgctatttcaattttcttctatttttaagccaagcgagtcatgaaggaataatattggtcgttgtatctgtattactaatacaaacgtgtaggcttttaatagtattcaagaaaatctggagaaatgaaattcacaaattttattgaagaccagtactagtaattttctttcataacattctgtaggaatgcttgataagtccgctttggtttcctgttttggtcaggctaaccttaaatgaagagcctggc

SEQ ID NO: 75139 - DNA, 824 bp, Homo sapiens
agaaagtgatgatccagacctgagatctcctggaaagttgaagtttagtctcaaggaaggtgaagaaataggactggggagaaaaactccaaggactgggaatgagagagtttctctaggtttatcagagaataacagaaagggggaccttgaggagttggaagtttctctgatgtttccttgaagtcctgaaccaactttttggacaaattccagtaatttttccatttgcccatctctatgttcatagctcttgtcattgaatccatagtacaaattcacagttattcaatatatcaagctttaggaagattaaaagggctaacacagtagaaaatagcccgtttttcaagtgaacttgaccatagctattctggacaaaaaaatatttacatgttayttactcagttgaccactttcatggattctggtttatgtaggataaaatatggaaataaaaatttaggacattctttcaatccatagacaaaaacaatatactctctgtcatacagtaaatcccatttaaattgtacttctcttcttcactggaagtttacaatgtggtgattgatatgtctgatagtaacctcgggatacaacccagacttctgaattctcaaacaaagatgaaaatatgtccagtttgagtgtcaggaattatatacagattctttgaaaactgacattttatgttccatatatacatagacgcctctgatttaactagaatacttgatttacagactgctccattcactaaatagtgtgtaaactctagattgctattaggtttttagaattccctctttgttttatttgca

SEQ ID NO: 75140 - DNA, 576 bp, Homo sapiens
ctgtttttctgtacaggtccaaagggcaaaatctaagcttcttgtcttctgtagcatagccaggtggtattcctagaatgccagttggagaatcctagatgtttcctagttgagtaactattgctcagttattctcattcatgtgtagacatgagactggggtgggctcagtaggttgagtcagtttggcagcagatctataaactccagtcctctaaggttaaggagatgacacattctaatcctacatttctgaaagacagagtgcaacccacattcccaggagggaacatattgtcagccgcatcaggagcattttgctctctgcaggcagtggcactgctgtgcgtggatatcacatttccttcccagagtccgtgggaggcctccttgaatgtgagaagtgcaaacagagagggacacatttgttgtacagaagctggctccgggctttgggtttggagacaggctgaagatatttgctttaaaatgtcacaggtaaagtatggacctgtgactayagaacatttttcgtgaggggaaggaatcagaaggccttccaaacacagggactcc

SEQ ID NO: 75141 - DNA, 684 bp, Homo sapiens
tcaaggtcagaattcagaattgcagtaatgaattccaagcagaaaacctgaaaagatggaaggtgattattgtagaagamagtgctgcagcagcgtttgctagaactattcaagcattcttggttccgtctacctcattaaccaaggcctgaaaattcccactgcatttcaggcagtttgtaatttactgaagcattctggagaagtgtgaaatgtgatctgcagtgaggagaaaacggcatgttctaagtgtcggtctcaggagaggcaatgctgaagtcagagcaagctcaagtcacatgctagctttgctatgagaccttggtcaagtaactggttttgggtttttcctctgtaaataggggaaagcaatatctactttacagagtctttgtgaaaactaggtgggataatatacgtataatatatatatttataatacatgtaataatatatagcatagtatctggcatagagtaaggactcaataataaaaacaatacaggaagtattatttttttccctatcatttatcttttatcttctttcaatgctttttttatttactcagccttttgaaggtatcactgatgtggtattccttacctcattctttcttggcccttctagtttagaggctggaaagccaattactcccttcccagtttcgcttgctattatggg

SEQ ID NO: 75142 - DNA, 1023 bp, Homo sapiens
ttttttattttttgtagggacagggtctcactatgtttctcaggctggcctcaaactcctggcctcaggtgatcctcctaccttaacttcccaaagtactgggattacaggcataagtcactgcacacagctaacaaatatttattgataacttagttttgggagaaggtttaaggatggattctgcagtcagactacttggatcagaagcccagttctgccacctagcagcacattttaaatcttttctgtaccttaatatcttcatctgtaaaatgggaaaactacagtaatgaatgaccgtttaaaaaactgcctaaaacttgtcagcataagaagtgtttggaagtacttttcttcacaaattagtactacccctactttgctcagctttcagaccaaatgctgcaagaacttatgaatgccaagtgacaacaagtatttataatgcttgtgaaacattaacaaacaaaatttaatatggtgtagaatgtggcatcactatttatttaaaatatggtccttttggtattctttgtaactgggtcttcttcaaaggaatccaaaacagacctgaattatacacaatcagtttcagcggtgctgttgaccaaatttatccatgaattgaattaaaaattatagaagagtttggaggaagacrttcagcatttgagctaatatgtgcagcagatcactccattaagcatcatttctcattttgccgcatcacagttaaaccagaatgtggaccttttgatataaaccactgctggaaaatgactgtaccaagtaactgggttctttcctctgactcatcctgaccccagctacagaaaaccagttatctcatattgattagggatgggcttacttttggagggtaattaatctgttttttaagagagctaatagttagattcatggactttcacatacaatttttttaaaaattgaaaccatcctgagcatatggtatgaatgtgtgtgtgcgcacgtgcgtgtgtgtacgtgcgtgcacat

SEQ ID NO: 75143 - DNA, 807 bp, Homo sapiens
ccaaaatgctgggattacaggcatgtgccactgtgcctggccaaaaactttagcttatttgagtgtcccacagactactagccacacaggtatgtaattttcgagtatctgrcctgggctaatgcttcgttggaactgttttcttaatactcaactaatttaagatctttcttttcatccagtgttggcactaattgtaccatcacttttgcctccattaccttcttttgcctgataagtttttatctttgataggtgactgatctggaaaacacaggtgatgctgcagtagagttacatatttacactcaaagttgttcttgttcttgatttgatgtctttgatctggtttcacacttttcctccattgtccctggtataacaaggaattaagaacttggaaggatgaaattcataggccagtaatggaggagactcacatctcagggtatactgatcaatttagttaccatggtaaagcttaaaaaattctccaaaatgctatctataagaaggaaagcaggacagctcctcttttctaaactactttttaaattcttcttagtggatctcttaatgcatgtatagactgtgtcaacagttactaaagacttcattcaactttgaatctgccaagccttgctattagtgattagcttattccttattgaaggtatcttccctggattgactgttgctgcaaagatggtgaggcagtcatgattaaaggacaatacagtgttccacaatgatcaggcgagagaaactttgtgtggcgagagataatattgcaaaattccttatagg

SEQ ID NO: 75144 - DNA, 572 bp, Homo sapiens
gggagaaatgtggacagctaaaatctgaagccttactgagaagatagagaccattgttcatgacctacagctttgaagagagtagtcatgttgtagtggggaagccaatattgctagaattacagaagttacctggctttggggagggaagtgrtcaaagtggatgtttattatggcagaaagtgaaaggcggattcccagttgaattgagaaagctctgtttggtcagctcaggcctcccctggctggggctttgcatcttctggttcaggtcttcctataggtaaccagtgccctatatcattccttagaagcagaagacattgttcatagccctttggtgttttactgttgaaactgtctgatgatcctatggtcagatcatctcaactcagtgttgccttggttttgtgacaaagacaaatactagtgagggattgagcaggcaatccctgatgtgagtattttacttacatcagtgtttactcccaaaggtcagtagcaccttctttcctaggattggtatgtatcttccttcttttgtttagtttggctacttggtatagctcttt

SEQ ID NO: 75145 - DNA, 988 bp, Homo sapiens
catattctttgtattatggtagttttgtagcatctaatctcttctctcactagtctgtgattwggtatggaaaatcccatactagatttaacataggatttaaagtgaggataaaaatcatgaattcagatttctttgttttctgctgatctgaaataggtttatatgcactcattgaggaatgcttagctaggggaaaagaacttcgttaatttctgcttttcaaaacaccatcgagatgctcttttgactagacatgtcaagtgaaattgttctactaggcttcagtatctcagatcatgacaaatcatgacattctgttattgtgtttaatactgataagatatgtaagtgaataataagccagaaatacatccaatgaaaataacttagtagcacaatacttttttgagtagttcgtgaaggaaagggttgcataggaagaatataattatgtaagttttgaagacaaagaaatgaatttcctaccatgtaaacttagtattcactatatctttctgagatctattttctgtctaaaatatgaaaaataattaattgagaattaaatgaaataatacacatgatagcattttgcaaattgtcttacaactttttgattgctattataacaagtattattactacttaacaattattaacttcttcctacgttccaggcacagacagaggcactttaccacgattaactcatttagtccgtataaaaatcttataatctatgttctattaagttttccattttatagataaagaaaccaaagtttagagagctcaaataacttgtgcaaagtttctcaagacactggtgattgagttatggaaaaaatcataattacctctggagaagattatgcttaatcattatctgatacagcgaagcaaaacttttatccaatagtagtaggaacaagaaatagtaaattaattgaaacatggaataaaatgggaatcataaaaatatatt

SEQ ID NO: 75146 - DNA, 988 bp, Homo sapiens
catattctttgtattatggtagttttgtagcatctaatctcttctctcactagtctgtgatttggtatggaaaatcccatactagatttaacatagkatttaaagtgaggataaaaatcatgaattcagatttctttgttttctgctgatctgaaataggtttatatgcactcattgaggaatgcttagctaggggaaaagaacttcgttaatttctgcttttcaaaacaccatcgagatgctcttttgactagacatgtcaagtgaaattgttctactaggcttcagtatctcagatcatgacaaatcatgacattctgttattgtgtttaatactgataagatatgtaagtgaataataagccagaaatacatccaatgaaaataacttagtagcacaatacttttttgagtagttcgtgaaggaaagggttgcataggaagaatataattatgtaagttttgaagacaaagaaatgaatttcctaccatgtaaacttagtattcactatatctttctgagatctattttctgtctaaaatatgaaaaataattaattgagaattaaatgaaataatacacatgatagcattttgcaaattgtcttacaactttttgattgctattataacaagtattattactacttaacaattattaacttcttcctacgttccaggcacagacagaggcactttaccacgattaactcatttagtccgtataaaaatcttataatctatgttctattaagttttccattttatagataaagaaaccaaagtttagagagctcaaataacttgtgcaaagtttctcaagacactggtgattgagttatggaaaaaatcataattacctctggagaagattatgcttaatcattatctgatacagcgaagcaaaacttttatccaatagtagtaggaacaagaaatagtaaattaattgaaacatggaataaaatgggaatcataaaaatatatt

SEQ ID NO: 75147 - DNA, 988 bp, Homo sapiens
catattctttgtattatggtagttttgtagcatctaatctcttctctcactagtctgtgatttggtatggaaaatcccatactagatttaacataggatttaaagtgaggataaaaatcatgaattcagatttctttgttttctgctgatctgaaataggtttatatgcactcattgaggaatgcttagctaggggaaaagaacttcgttaatttctgcttttcaaaacaccatcgagatgctcttttgactagacatgtcaagtgaaattgttctactaggcttcagtatctcagatcatgacaaatcatgacattctgttattgtgtttaatactgataagatatgtaagtgaataataagccagaaatacatccaatgaaaataacttagtagcacaatacttttttgagtagttcgtgaaggaaaggkttgcataggaagaatataattatgtaagttttgaagacaaagaaatgaatttcctaccatgtaaacttagtattcactatatctttctgagatctattttctgtctaaaatatgaaaaataattaattgagaattaaatgaaataatacacatgatagcattttgcaaattgtcttacaactttttgattgctattataacaagtattattactacttaacaattattaacttcttcctacgttccaggcacagacagaggcactttaccacgattaactcatttagtccgtataaaaatcttataatctatgttctattaagttttccattttatagataaagaaaccaaagtttagagagctcaaataacttgtgcaaagtttctcaagacactggtgattgagttatggaaaaaatcataattacctctggagaagattatgcttaatcattatctgatacagcgaagcaaaacttttatccaatagtagtaggaacaagaaatagtaaattaattgaaacatggaataaaatgggaatcataaaaatatatt

SEQ ID NO: 75148 - DNA, 988 bp, Homo sapiens
catattctttgtattatggtagttttgtagcatctaatctcttctctcactagtctgtgatttggtatggaaaatcccatactagatttaacataggatttaaagtgaggataaaaatcatgaattcagatttctttgttttctgctgatctgaaataggtttatatgcactcattgaggaatgcttagctaggggaaaagaacttcgttaatttctgcttttcaaaacaccatcgagatgctcttttgactagacatgtcaagtgaaattgttctactaggcttcagtatctcagatcatgacaaatcatgacattctgttattgtgtttaatactgataagatatgtaagtgaataataagccagaaatacatccaatgaaaataacttagtagcacaatacttttttgagtagttcgtgaaggaaagggttrcataggaagaatataattatgtaagttttgaagacaaagaaatgaatttcctaccatgtaaacttagtattcactatatctttctgagatctattttctgtctaaaatatgaaaaataattaattgagaattaaatgaaataatacacatgatagcattttgcaaattgtcttacaactttttgattgctattataacaagtattattactacttaacaattattaacttcttcctacgttccaggcacagacagaggcactttaccacgattaactcatttagtccgtataaaaatcttataatctatgttctattaagttttccattttatagataaagaaaccaaagtttagagagctcaaataacttgtgcaaagtttctcaagacactggtgattgagttatggaaaaaatcataattacctctggagaagattatgcttaatcattatctgatacagcgaagcaaaacttttatccaatagtagtaggaacaagaaatagtaaattaattgaaacatggaataaaatgggaatcataaaaatatatt

SEQ ID NO: 75149 - DNA, 950 bp, Homo sapiens
gtatatttgaagtatgagtttactatctgctgaaaatacatatttctttattattaacatacttacatatttgttttaaggtaaagtaaaacagcaccataaggcaaaatggaagttggtaggagtgcgtactatgaaaatgtgtgcttattaaaggcagggtttaaatttagttaggttttgaaataagtaaatagagaacataaatcagttttgtgttactaatggagaatcctaagcctacaaatagtgactttgagaagagatgtaarttcaggggtgaaaattaaaggcactaatacagaaggcagcttcgaaagataggatggtgtaatgagatcccaaaagagaatcaactacacaacagttaacaagcttaataaggagtaataatatatgtttacagtttccacacatgaattaagatcctggcctgcacacttcaccagcctagacatggggggtatacacttaattttcctaagagttaagaagcttaatatatctaaaatagcagtgatcaacagtttaaaacactgtttttaactgtgttaggatattggaaaagaggaactcattctctttaaagtgcagctttggtgtaaatttcttgctaatttggacgtttctttctagattaataatgtagaaatcttttgatccagcaaccttttgaaatatgccctacctatatgtgcatgtgcacctatacatattgtatatatttataagatgctcacagcattggtactataaccagaaaaatggaatcagctggaaagtctattaactgggaagcatgtaaataaatcattacatatttatgcaattatacaatgaataaagagtcagaggattgctctcactcacacctatatctaattatcccttttcccccagcacaaaatcattgttcatcttgttactcacaaaaaaaaactcagcaactg

SEQ ID NO: 75150 - DNA, 950 bp, Homo sapiens
gtatatttgaagtatgagtttactatctgctgaaaatacatatttctttattattaacatacttacatatttgttttaaggtaaagtaaaacagcaccataaggcaaaatggaagttggtaggagtgcgtactatgaaaatgtgtgcttattaaaggcagggtttaaatttagttaggttttgaaataagtaaatagagaacataaatcagttttgtgttactaatggagaatcctaagcctacaaatagtgactttgagaagagatgtaaattcaggggtgaaaattaaaggcactaatacagaaggcagcttcgaaagataggatggtgtaatgagatcccaaaagagaatcaactacacaacagttaacaagcttaataaggagtaataatatatgtttacagtttccacacatgaattaagatcctggcctgcacacttcaccagcctagacatggggggtatacacttaattttcctaagagttaagaagcttaatatatctaaaatagcagtgatcaacagtttaaaacactgtttttaactgtgttaggatattggaaaagaggaactcattctctttaaagtgcagctttggtgtaaatttcttgctaatttggacgtttctttctagattaataatgtagaaatcttttgatccagcaaccttttgaaatatgccctacctatatgtgcatgtgcacctatacatattgtatatatttataagatgctcacagcattggtactataaccagaaaaatggaatcagctggaaagtctattaactgggaagcatgtaaataaatcattacatatttatgcaattatacaatgaataargagtcagaggattgctctcactcacacctatatctaattatcccttttcccccagcacaaaatcattgttcatcttgttactcacaaaaaaaaactcagcaactg

SEQ ID NO: 75151 - DNA, 505 bp, Homo sapiens
agtaacttctgaggggtcaaagaataggagaaaaatggtcaaaggtgtctctggtctagataattagaggaaataataaaatgaaaactttaagtatcctggagcccttgtcctcagccacaagcaccctccattacaagagagttgartgttacctaactaaactcactttcaaattagtatttgaggaaaagattgaggtccagccaggttttacaatccagccagaatgacatgttgagagaggtggagatggcctcaggccctcagtctcaatccccttggatttctacagcgggacattgtatccagagcttaccactgacttgtctcctttgaattttgataagaattctgttaatttatttttatatctaaaatataattataaataatacgacatttctgactagcactcatacgaggcaaattagaaaaaaaattcaaaattgcaatgaagatttcacttaccatttttttcttttaaatttgattcctgctgaag

SEQ ID NO: 75152 - DNA, 505 bp, Homo sapiens
agtaacttctgaggggtcaaagaataggagaaaaatggtcaaaggtgtctctggtctagataattagaggaaataataaaatgaaaactttaagtatcctggagcccttgtcctcagccacaagcaccctccattacaagagagttgaatrttacctaactaaactcactttcaaattagtatttgaggaaaagattgaggtccagccaggttttacaatccagccagaatgacatgttgagagaggtggagatggcctcaggccctcagtctcaatccccttggatttctacagcgggacattgtatccagagcttaccactgacttgtctcctttgaattttgataagaattctgttaatttatttttatatctaaaatataattataaataatacgacatttctgactagcactcatacgaggcaaattagaaaaaaaattcaaaattgcaatgaagatttcacttaccatttttttcttttaaatttgattcctgctgaag

SEQ ID NO: 75153 - DNA, 966 bp, Homo sapiens
ttttgcggcagtcatgatttgtattcttcctggcagctctcctactttacaggccctaaataagtttggttctagcctacaactgcaggagagcaaaaatccatttcctgtatccatttccgtggctcacacccattcgatgttgttgtctttctgatacttgccaccaaagttaytgatgatgttacaaaatggacagactgagaattagacgcttttcacaagatctgataattaagtaataataaggaaccaaatctgtaaaagcaaagcaaaaatattttacaatacaggccccaaagacaaaagaaatccttatcattttctgttataaaacagacctataatttgcaaataatgcaagtgaaggtgctttaatcttgtattatatctgtttatggcttttatcctaaattaattcatgctttttaaagtaatatgtaaatgtgaaattacacaagtgcaatctaattttaatgctaattaatcttctatccaacacattcttatttactagctagttaaatttgccacaaattttggataacaacgggatcattaaatagtttattttggaaattttgatcttttcaagtatctctcttttctaccaatttctacaattgtgtcttgtagcacaagatacaatttttttcctgaagtagaataactgtgcttccaataaggaaaatatttgagtattaaataaatatttctaaaagatatattacgataggcaacattaatagatagacaattaaggtcaattaatattgtaatgatattggaaataaattttcagcaggtacaagactttgtttactcaacatgggatcacaatagtgtatcaactgtgagcgggagaaaggcaataggtgcttaactggagagatgtgctaaaacatggattcggtgcataaacaaaaacaaggatttaatttctggttaagatgaaaaagatgagaa

SEQ ID NO: 75154 - DNA, 572 bp, Homo sapiens
ggtgagcttctactgctgcagaatcagaaaggaaaggggacattttacagcatggagactatgatgattaatattgactatcaacttgattggattgaaggatgcaaattaytgttcctgggtgtgtcggtggaggtgttagcaaaggagattaacctttgagtcagtggactgggagaggcagacccacctgcaatctgggtaggcaccatctagtcagctgccagtgtagctagaataaaacaggcagaagaacatggaaggactagactgggtgagtcttctgaccttcatctttctcccgtgctggatgcttcctgccctcgaacatcggacttcaagttctttagcctttgggctcttgggcttacaccagtggtttgccaggggctcttgggccttcagccatagactaaaggctgcactgtaggcttccttacttttgaggttttgggactcagattggcttccttgcacctcaccttgcctatggtctattgtgggacttcattttgtgatcacgtaagtcaatactgcttaataaactccccttcatatatacatctatccta

SEQ ID NO: 75155 - DNA, 407 bp, Homo sapiens
ctctctctactttcccacaagcacttttgaatttttcacaatgtaatgaaaaaggttctatcacatttactctactttcaccttgaaagttaaaggaagcagggttttctttagttttcatttgaagttctattttgaagatgtttctgtatgcctttgttcatttattttattaygctgatggttttctccaacctgtaaatcttatttgttataaatattttgtgtattatatgttttcatttggccagactttttataaaaagttgaaatcttacattaggtattatttacaacatgtttttgctacttaggattaggactatgatttgttttttgttttttttttattatactttaagttttagggtacatgtgcacaatgtgcaggtttgttacttctgtat

SEQ ID NO: 75156 - DNA, 407 bp, Homo sapiens
ctctctctactttcccacaagcacttttgaatttttcacaatgtaatgaaaaaggttctatcacatttactctactttcaccttgaaagttaaaggaagcagggttttctttagttttcatttgaagttctattttgaagatgtttctgtatgcctttgttcatttattttattatgcygatggttttctccaacctgtaaatcttatttgttataaatattttgtgtattatatgttttcatttggccagactttttataaaaagttgaaatcttacattaggtattatttacaacatgtttttgctacttaggattaggactatgatttgttttttgttttttttttattatactttaagttttagggtacatgtgcacaatgtgcaggtttgttacttctgtat

SEQ ID NO: 75157 - DNA, 749 bp, Homo sapiens
tccaatagacaggaagacagatagcaaagcccaaaagaaaccttcaatgaacatgtatcacaagacatttttaaaaagctttttttgtgtttttatgccaaagatattctttattaccgaatgattactttatctttacataaatattgtgattataaactgaaatatagtatttctatgtaaaactatagaatttgtctatataatgacatagaaaaatctagactacatttaggagtgaagaagctgggtagacgatagtattacagattagtgtatataattgagacagtaatggagagcattgttgttatttggtatgggggagaaatgttttctgaaaagcaacgtggtaaatccataaatcatttgccttgtagtaacacagcttgaattagagcaggtatttagcaatattatttaccctgttaaatgtaatttcaaaatttctcatagactatcctgggagattgaataaatgctcaacaatattgccccataaaacamagaatgtcatcaaatatacacaattatgaaaatgtagcaaagtatacagtgagtattcagtatttttgagcctaaataagaaaggatataaattattaataatgagcagtatttcctttttacatgatgtctaaacctttacatgatgtctaacattataggttcaggctttgttttggtatttttctaaataacaatttctaaagtttctatttttaaaaataagttattgatatctccac

SEQ ID NO: 75158 - DNA, 749 bp, Homo sapiens
tccaatagacaggaagacagatagcaaagcccaaaagaaaccttcaatgaacatgtatcacaagacatttttaaaaagctttttttgtgtttttatgccaaagatattctttattaccgaatgattactttatctttacataaatattgtgattataaactgaaatatagtatttctatgtaaaactatagaatttgtctatataatgacatagaaaaatctagactacatttaggagtgaagaagctgggtagacgatagtattacagattagtgtatataattgagacagtaatggagagcattgttgttatttggtatgggggagaaatgttttctgaaaagcaacgtggtaaatccataaatcatttgccttgtagtaacacagcttgaattagagcaggtatttagcaatattatttaccctgttaaatgtaatttcaaaatttctcatagactatcctgggagattgaataaatgctcaacaatattgccccataaaacacagaatgtcatcaaatatacacaattatgaaaatgtagcaaartatacagtgagtattcagtatttttgagcctaaataagaaaggatataaattattaataatgagcagtatttcctttttacatgatgtctaaacctttacatgatgtctaacattataggttcaggctttgttttggtatttttctaaataacaatttctaaagtttctatttttaaaaataagttattgatatctccac

SEQ ID NO: 75159 - DNA, 749 bp, Homo sapiens
tccaatagacaggaagacagatagcaaagcccaaaagaaaccttcaatgaacatgtatcacaagacatttttaaaaagctttttttgtgtttttatgccaaagatattctttattaccgaatgattactttatctttacataaatattgtgattataaactgaaatatagtatttctatgtaaaactatagaatttgtctatataatgacatagaaaaatctagactacatttaggagtgaagaagctgggtagacgatagtattacagattagtgtatataattgagacagtaatggagagcattgttgttatttggtatgggggagaaatgttttctgaaaagcaacgtggtaaatccataaatcatttgccttgtagtaacacagcttgaattagagcaggtatttagcaatattatttaccctgttaaatgtaatttcaaaatttctcatagactatcctgggagattgaataaatgctcaacaatattgccccataaaacacagaatgtcatcaaatatacacaattatgaaaatgtagcaaagyatacagtgagtattcagtatttttgagcctaaataagaaaggatataaattattaataatgagcagtatttcctttttacatgatgtctaaacctttacatgatgtctaacattataggttcaggctttgttttggtatttttctaaataacaatttctaaagtttctatttttaaaaataagttattgatatctccac

SEQ ID NO: 75160 - DNA, 770 bp, Homo sapiens
aatttcttcagaatattctctccttaaaggaaaatagaaaggaactttacttcagagcagaaatcttagattaataggataaattgtgtattagatatagaaagaaaaaatagtcattttgcaaccaaataataaagtgccaccataaaaacctacaacacataataagaataataaaaagaacgagttataaagagaatcttcatcaacattagagtaaatggcatctaagcaaatctgagtttagtatcatagtgttggaaagaaagaacaaaacaattacaaacataacagtatggattgttgttgtatttaaagaagcggcccctgctagtacttctagaatgtagaaagatgaagrttcaggcattacctgcttcccagctggttggatgattatccagcttagcatcaggtagttaagttgtactgaggcaaaatgaaaacatgagaggataatgctagaggatccagctgggccacagacaaagttttcattcctctattcactcatgcattcattcagcacaaatttatcatgtatccagtataagctaaacattatcccagatacaaagatgaataaaacaatgcttctcaccctcaaaggattaaatctagtaagtgtagacaaacaaatgaacaaagttaatgcaaaagaatatcgagggtactctgatagaagtggggggtcagtgctactttgaacttgaatgactttttgaaaaattcccttccaattaagcaaggcagtcttttctatattccta

SEQ ID NO: 75161 - DNA, 770 bp, Homo sapiens
aatttcttcagaatattctctccttaaaggaaaatagaaaggaactttacttcagagcagaaatcttagattaataggataaattgtgtattagatatagaaagaaaaaatagtcattttgcaaccaaataataaagtgccaccataaaaacctacaacacataataagaataataaaaagaacgagttataaagagaatcttcatcaacattagagtaaatggcatctaagcaaatctgagtttagtatcatagtgttggaaagaaagaacaaaacaattacaaacataacagtatggattgttgttgtatttaaagaagcggcccctgctagtacttctagaatgtagaaagatgaagattcaggcattacctgcttcccagctggttrgatgattatccagcttagcatcaggtagttaagttgtactgaggcaaaatgaaaacatgagaggataatgctagaggatccagctgggccacagacaaagttttcattcctctattcactcatgcattcattcagcacaaatttatcatgtatccagtataagctaaacattatcccagatacaaagatgaataaaacaatgcttctcaccctcaaaggattaaatctagtaagtgtagacaaacaaatgaacaaagttaatgcaaaagaatatcgagggtactctgatagaagtggggggtcagtgctactttgaacttgaatgactttttgaaaaattcccttccaattaagcaaggcagtcttttctatattccta

SEQ ID NO: 75162 - DNA, 770 bp, Homo sapiens
aatttcttcagaatattctctccttaaaggaaaatagaaaggaactttacttcagagcagaaatcttagattaataggataaattgtgtattagatatagaaagaaaaaatagtcattttgcaaccaaataataaagtgccaccataaaaacctacaacacataataagaataataaaaagaacgagttataaagagaatcttcatcaacattagagtaaatggcatctaagcaaatctgagtttagtatcatagtgttggaaagaaagaacaaaacaattacaaacataacagtatggattgttgttgtatttaaagaagcggcccctgctagtacttctagaatgtagaaagatgaagattcaggcattacctgcttcccagctggttggatgattatccagcttagcatcaggtagttaagttgtactgaggcaaaatgaaaacatgagaggataatgctagaggmtccagctgggccacagacaaagttttcattcctctattcactcatgcattcattcagcacaaatttatcatgtatccagtataagctaaacattatcccagatacaaagatgaataaaacaatgcttctcaccctcaaaggattaaatctagtaagtgtagacaaacaaatgaacaaagttaatgcaaaagaatatcgagggtactctgatagaagtggggggtcagtgctactttgaacttgaatgactttttgaaaaattcccttccaattaagcaaggcagtcttttctatattccta

SEQ ID NO: 75163 - DNA, 770 bp, Homo sapiens
aatttcttcagaatattctctccttaaaggaaaatagaaaggaactttacttcagagcagaaatcttagattaataggataaattgtgtattagatatagaaagaaaaaatagtcattttgcaaccaaataataaagtgccaccataaaaacctacaacacataataagaataataaaaagaacgagttataaagagaatcttcatcaacattagagtaaatggcatctaagcaaatctgagtttagtatcatagtgttggaaagaaagaacaaaacaattacaaacataacagtatggattgttgttgtatttaaagaagcggcccctgctagtacttctagaatgtagaaagatgaagattcaggcattacctgcttcccagctggttggatgattatccagcttagcatcaggtagttaagttgtactgaggcaaaatgaaaacatgagaggataatgctagaggatccagctgggccacagacaaagttttcattcctctattcactcatgcattcattcagcacaaatttatcatgtatccagtatawgctaaacattatcccagatacaaagatgaataaaacaatgcttctcaccctcaaaggattaaatctagtaagtgtagacaaacaaatgaacaaagttaatgcaaaagaatatcgagggtactctgatagaagtggggggtcagtgctactttgaacttgaatgactttttgaaaaattcccttccaattaagcaaggcagtcttttctatattccta

SEQ ID NO: 75164 - DNA, 770 bp, Homo sapiens
aatttcttcagaatattctctccttaaaggaaaatagaaaggaactttacttcagagcagaaatcttagattaataggataaattgtgtattagatatagaaagaaaaaatagtcattttgcaaccaaataataaagtgccaccataaaaacctacaacacataataagaataataaaaagaacgagttataaagagaatcttcatcaacattagagtaaatggcatctaagcaaatctgagtttagtatcatagtgttggaaagaaagaacaaaacaattacaaacataacagtatggattgttgttgtatttaaagaagcggcccctgctagtacttctagaatgtagaaagatgaagattcaggcattacctgcttcccagctggttggatgattatccagcttagcatcaggtagttaagttgtactgaggcaaaatgaaaacatgagaggataatgctagaggatccagctgggccacagacaaagttttcattcctctattcactcatgcattcattcagcacaaatttatcatgtatccagtataagctaaacattatcccagatacaaagatgaataaaacaatgcttctcaccctcaaaggattaaatctagtaagtgtagacaaacaaatgaacaaagttaatgcaaaagartatcgagggtactctgatagaagtggggggtcagtgctactttgaacttgaatgactttttgaaaaattcccttccaattaagcaaggcagtcttttctatattccta

SEQ ID NO: 75165 - DNA, 747 bp, Homo sapiens
accgttaaaggagtacaagtggcctgtttttgtaaagatctttacttcatacatactaagaacaattttaaaaattgtacacttagttattggaattagattgcttttaacaagactatgtgtaaacatttaagcaaatcagcacatttsaatgctttctcaattttcaccgtacaaggatgcttattcataatatagcctttttttgtaaacttagcacatcagttcacaataggttatttaggaaaagcacaatgcaatgtgttgtgttttaagtgccgttaggtgcatatagtctccttctgtgctaatttctaagacaatatcatgacctctttcttgtgtgctgagtgtaccagtttacatctggagtcatttctcagttttttgggggtgttttatttttccttctcagatctaaattagttcaagtaatagaagttaagatcaagaagattttcacaacattgtaggtaagaatgagcaaaaaggcaaagaacacattgattcaaggagattagctttctcctaatccatgcacacaaaaattattacacattatgtaattttatgacaattaaaaatatatacaataagtataatacaaagataaaagagtttctcagaaagaaaaataaaaggcatcctccttatgtggagattaattttaacagttatttctttcaaatacactacttattgaattccatttataaagatttaagtttttctttttatcatgctctt

SEQ ID NO: 75166 - DNA, 707 bp, Homo sapiens
ctacgtctctaagtgagacacaaccagtcgaagtctgtatttcacagatgaatagttctaagtttgtcggggaggtgggggtttttctcccagtttgggatagtggctgcttccaatcaaagacagatgcttccagtctttttggtacaaacattcagttagatagaaggtataaattctactgctctatagcacagagtagtgactttgtcaatttctaagtaggtaaaaagagtacttgaaacgttcccgacacatagaaataatacttaagttgacagatatcccaaataccccaaatttgatcattatacattctatgtttscaacaaaatatcacatataccacatgaatttatcaattatatattaaagtcaatccaagcaagctttttttaaaaaaacctacatacaatattttcatagatcatttaaacaaagattcttattctctataatttagtccattaagcaaataaaatatgaaagaaacatgtaaaaaatactattaaaagaaattgcctttcttcacaaagcatctggaaaagaccttgagtttgtgttctcatgcatttttgtagatgctcttatggaggaaaacacatttctaatactccacttttcatagggaatctattgttattgatatgttatcgctatgttttattacacccttgagaaacaggtaatattgcttgtatcagttt

SEQ ID NO: 75167 - DNA, 707 bp, Homo sapiens
ctacgtctctaagtgagacacaaccagtcgaagtctgtatttcacagatgaatagttctaagtttgtcggggaggtgggggtttttctcccagtttgggatagtggctgcttccaatcaaagacagatgcttccagtctttttggtacaaacattcagttagatagaaggtataaattctactgctctatagcacagagtagtgactttgtcaatttctaagtaggtaaaaagagtacttgaaacgttcccgacacatagaaataatacttaagttgacagatatcccaaataccccaaatttgatcattatacattctatgtttgcaacaaaatatcacatataccacatgaatttatcaattatatattaaagtcaatccaagcaagctttttttaaaaaaacctacatacaatattttcatagatcatttaaacaaagattcttattctctataatttagtccattaagcaaataaaatatgaaagaaacatgtaaaaaatactattaaaagaaattgcctttcttcacaaagcatctggaaaagaycttgagtttgtgttctcatgcatttttgtagatgctcttatggaggaaaacacatttctaatactccacttttcatagggaatctattgttattgatatgttatcgctatgttttattacacccttgagaaacaggtaatattgcttgtatcagttt

SEQ ID NO: 75168 - DNA, 707 bp, Homo sapiens
ctacgtctctaagtgagacacaaccagtcgaagtctgtatttcacagatgaatagttctaagtttgtcggggaggtgggggtttttctcccagtttgggatagtggctgcttccaatcaaagacagatgcttccagtctttttggtacaaacattcagttagatagaaggtataaattctactgctctatagcacagagtagtgactttgtcaatttctaagtaggtaaaaagagtacttgaaacgttcccgacacatagaaataatacttaagttgacagatatcccaaataccccaaatttgatcattatacattctatgtttgcaacaaaatatcacatataccacatgaatttatcaattatatattaaagtcaatccaagcaagctttttttaaaaaaacctacatacaatattttcatagatcatttaaacaaagattcttattctctataatttagtccattaagcaaataaaatatgaaagaaacatgtaaaaaatactattaaaagaaattgcctttcttcacaaagcatctggaaaagaccttgagtttgtgttctcatgcawttttgtagatgctcttatggaggaaaacacatttctaatactccacttttcatagggaatctattgttattgatatgttatcgctatgttttattacacccttgagaaacaggtaatattgcttgtatcagttt

SEQ ID NO: 75169 - DNA, 916 bp, Homo sapiens
ctgacactggttttgatttacaaatcatattttttcaaccaaatatgagtcaagttctactacacgtagcactggaaaaaaaagtgttagttgtaggcacctggtaatttcaagtagtaaggttacattttccagctaaaactagcatttggggactcggtgtttttgtttacctaaatgtcctccagcatcagtagatagtgccgttattgatacattttgttttttttgcagaaaagatcactgggaaaaactcatgcccttcccataggaaattaacagatctgaatatggatgctacagctttcacccactccttttattttcgatttttctttactcagcataatgccatctttttgctcataacagcctcaatcagcactcttggccgcgtcaaggtcaggactgcctgctgcractggctcgagattcaataaccagccatgaggggtgcacaacattaaatggacacagattgctttttctgtaactccatttaataagcgtcttttctaaacaatccatgcaaaaaatataattttttaggatcaaaaagaaatagaatttactcattattatcttagactctaaacaactaattgtagtgataattatgattatttcaaaaccatctcagtgataagcttaattaattctccaggcaaattcactaactgacaaaagttttctcattcacgggacaatccaaaccagccttaaaaatttaaaaagctaagagatatgccagtactacatctgcttaacagtacccccacagtatacaagagtatggttttacttaacttcgtgtttcccaaatagacaccagtcaatttggcagctcatgaagcttaataatcagacctatagcattttaaaaatcattttcacataatacttagcattttacatg

SEQ ID NO: 75170 - DNA, 916 bp, Homo sapiens
ctgacactggttttgatttacaaatcatattttttcaaccaaatatgagtcaagttctactacacgtagcactggaaaaaaaagtgttagttgtaggcacctggtaatttcaagtagtaaggttacattttccagctaaaactagcatttggggactcggtgtttttgtttacctaaatgtcctccagcatcagtagatagtgccgttattgatacattttgttttttttgcagaaaagatcactgggaaaaactcatgcccttcccataggaaattaacagatctgaatatggatgctacagctttcacccactccttttattttcgatttttctttactcagcataatgccatctttttgctcataacagcctcaatcagcactcttggccgcgtcaaggtcaggactgcctgctgcgactggctcgagattcaataaccagccatgaggggtgcacaacattaaatggacacagattgctttttctgtaactccatttaataagcgtcttttctaaacaatccatgcaaaaaatataattttttaggatcaaaaagaaatagaatttactcattattatcttagactctaaacaacyaattgtagtgataattatgattatttcaaaaccatctcagtgataagcttaattaattctccaggcaaattcactaactgacaaaagttttctcattcacgggacaatccaaaccagccttaaaaatttaaaaagctaagagatatgccagtactacatctgcttaacagtacccccacagtatacaagagtatggttttacttaacttcgtgtttcccaaatagacaccagtcaatttggcagctcatgaagcttaataatcagacctatagcattttaaaaatcattttcacataatacttagcattttacatg

SEQ ID NO: 75171 - DNA, 873 bp, Homo sapiens
ccattctgaggatttacagaatgcttaaaattatctaggaaataattcatctggtaatatcaaaaatgcaggatggctgggcatggtgcctcacacctgtaatccagcactttgggagggtgaggcagaccaatcacgaggtcagaagttcgagaccaacctggcaacatggtgaaacccccgtctctactaaaaatacaaaaattagctgggcgtggtggcaggtgcctgtaatactactcgggaggctgaggcaggagaatcgtttgaacctgggaggcagatgttgcagtgagctgagatcgcactattgcactccagcctgggcaacagggcaagactccgtctcaaaaaaaaaaaaaaaaaaatgctggacaacagcagcagggtaatttctgcctaatttttgtggaattgagctgtttaaatgtttacttgatgatggaatgtgtctcaaaaagctayatatcagcagcggggccagggttggggctggggtgcagcccaaatgtttgtgagattctgagaacaccaagacagacagtaatatctgtccaagggaataatgccctttgcaaacattaacagtgtgagatttttacgtttttcaatgattttttaaacatcaaagttgagcaaatgactgcagtttttcatgtaagaaaaaactatttatcataaatatgtaaaataagtataaatgagaaaataaaagaaagagtgttgaactataaacactgccagcacaaacataaaagaatgcgagacagaagatatcacagtggaaaaattaaaattggcttcggctgtagcgagcaacataattgacattgtagaaaatgaaatcactaataaagtagacagttctctaaa

SEQ ID NO: 75172 - DNA, 1148 bp, Homo sapiens
catttaattctcacaacaatccttggaggtaggtaagattacatgtccgtttcaacgaagagaaagttgtggcttgggggcattaattcacttgcttgaggtcacacagctcttacgtattagggcaagatttgaacccaggcagtctcactcccaatttttcttttaactactacattataatgcttcccacttcaagtgcttagcataatacggttaattattcttctgtcttcctctttctcttctttttcttcccctctccctcctccccttcatcctcttcttcctcttttttccttttcaggatgcacatttgaaaatctgtatcattgtagcttctctgctttctaggtgagctgggggaatattaccatcaaaagaaagaatattgatgggaactaattattaaactagatagaatatacttttcacctttgttctagctgttgtgttttggacttattctatggtaataatctcaactatatgttcacagtatctggggccttgaaccactcagtctcagacacaattagcagtattggacatctaatattccaggccctgtgctgggcggtccacaaccatcgtcttgtttaaatctcacaccgaacatggaagaactccaagctaagaactcattctcttattccacagccatctcatgtgcattaaccatttaacacaatgaaaataagccttagctgattttgaactctctaacaatgttttctttctttgcgtttggaaattctaatacccaaagtgatgttgttttaagggtttggcataagtttactccaaagttaaagtgtacactacaaaaggaagagaaaatatcctacttgtaaaaatgatttataatttagattttaaaaggtcacattgyaagcaatattcacagaatttcggaacaacttttctgagtgcagacaaacctgattcttgtaatctcaaataatacatactaaaacaaatcctctaaaaataaatccatctaaaagaagaaatgatgttggaagggtgtgatcattatgggatggagatttactgtcctctcctttgagacatggctcctctgtgaaatattgactcactggtctctacaaggaaggtattatctttatattgctaaatcacatatg

SEQ ID NO: 75173 - DNA, 2712 bp, Homo sapiens
atcaaaatgactttattttgttataatagttgttacatgaaactatccataatttttcaagataaaacagtgactttcctaaatatacatgtaaagtagtctttactctttcagaaatgaccccttttacaggaatttctccttgaaatgtatatagtaagtttagcaatgtctaaatacttttagtcccaaaacaagatatagccttacaaaatatcttatgatttttgttatgcataattttacaattatatttaaaatgctctacaaagcagtgctctactatttatactataatcaataaatgctgtgtgaaacttttacaatctggttttcaaatcttttgtttttgcacaactaacaagcaaactgacattttgcaaggctttccaagctgcactggtgattactatatcacttaatttttatgaaattttgttgtgagaagatgcacaacccaagtcatgcaaacataaacatgaaacacgggtgagctcttgggtagtgggtaaatgtgagacaggaggactattcatggaacacacacagacacagaggttattattgttcagctaagaattgacaggacatcttatgaatagagcccaagttgtaagcatcaaccagcaaaccagcactaatgcattttttttgttgttgttggaaaaatagtgagagccatgtgagcaacaatcttagaaaaactgtaataacaaagagaattaagccctcctgaggtcatagttcacacatgttaaaatgctttttttttttagcttatccacaattagatggaattaacacattttcatggtgtttaatgaaaaatggctaaagcatacctcctttatttttaagtggattaaaaacatttctgcaaagtcttgtcttccaaaatatggagaaaaaataagaaaggaaatatctcctcagggaaagctaactactgttttagttaatagtttgctttaacttagaaaaacttaattckgaaaaatatggtgtgaattttgcatttggatgaaattgaattcttttgagggttttaggtaatagaactataaggtatctactagtttctctccttttcataaatgtatattataaaagtacacttgaaggaaactaatcaaatctgacagaaaaaacattttaaatggtaatgtgatttttttccttcaatgcaaatgaaaaatggctttaagtgaagaaattcaactgaatgggcatatggcaaaaaaaaaaaaaaaagaaaaaaaaaacaaacaaaaaaaactagacaaacaaaactttgaatgtaatacagtcttttccagtttcactgacctctttattcaacattttaactaacatgtaccatataagtaaaactaaatttagcaaatagacattgtctaaaaataataaaattgtaaagagtattttttaatgagtttgccaaaaatgaactagaacataaattcaatcctaaattgtgtgtagagtattatttcataaactatatgcaagtaatattttagaattctaacatataatgaatgatcaaaatacattcatatcaataatgaactatgggattttaaacttactgcatacatactatgattttagcaatgagtattttagcaatgagtgctatggaaaataagagtcgctttgaaagttaaactgttagatcaaaccaatttcccaaatctgaaacgaaatccaaataatagagataagagggaaaccagccctagatttggttttatgtattgattaattcacccaagggaagcaaaacaggctatgacacagacatccagattcatttccatgggaaagagacgagagaaatgcggttctccttaatttaatgactgaacaccctcctcccaatatttccataggtaaaatgctttgtacaattatgatcagcaaaagcaccccgttttaagaaacctgcaaataatgcatattggatgcctagaatcttctatacagcaagtgatggctcaaagaaaatttgaatccgaatctaaagcatgttacagggacagtcagaattcaggggctatagtgatgtataaatgtaaacaagctatgacccaaaagagaatgcaggcttgatgcatgtctgtttgttgtcttattttaatttttatttttaaatgagtatttatccaaattattccaaagttaaattcagactttgtaatactaagctactggagaatatctttcctataacaaagttatacattgccttacttctggatcattgatttggggctagagaagagagactatgataatcggaggcatgcatagattatccgactagatgaatgttgaaaagccatttcagaaaaggtccctgcaggaaaagtcattgcaggaagaggtatccatttccactttcaaacaaactctggaatggaaagaaaggtccgtgtagacaactttggtttctaattctcccacttttctgcatttgtattaaacagggcaaagagacatgagttctatttccagctctactacaaattagctgtagtgtcttaggcaagtaacttaatttctcagagcctcggggccttcaaattaaaaatgaagaaatattctctaaagtgtctaaaattctagagaaatattctctaaagtgtctaaaattctaattaatgtttttgaatttacttattccatgcaaaagtaatttcaatgactttt

SEQ ID NO: 75174 - DNA, 2891 bp, Homo sapiens
tgtatgtcaatgttatttaaagttaaattttactttcttcaaaggattatggttaagctcaaatgacattaggtcctttataaaaagataaaagatagtttgtaatatttttttaaattatcaataccttctgatggacagcatcaatgtgccttcgatttaggtttggaaattgtgctttcacaattttatttagacagctacaactttaaagtaaaaagcttgtataataattaaaaactgattgattttaacgaaatcacagaattcagaatctcctagtcacccactgatttagggctaaatagttaaataaatgactgagtgtctggtagttaatctttacacagtttcacattcatgcctgaaataagcaaattgtacataggagttcaaagtttagaacctgacttaaaaatatgttgagaaagcgtgtagtttttcattagtaaagaaaaaaggaaaaacaatatgcatattgagcaagattctttaagcatatcattgagaaatgggtaacattactctgctacgagtgtatatttcatatctaggatatgaattacttgctgaacacgttaagaaaatcaatacatttgcttcagtgttactactaaataacaccccactggcctcaaaataaaagcagaaaggaaaaaagaaaatctagtatatttttaaaaagtgtatcaactttcttttcttaggtttcataaaatgaaaggggaagaaactctgttcaagagtaggcattttcacttctctaaataaatatttaatatgactactagcagcataagacaattaaagttaccagaaaacagaggacttaaaatctgtttaagaatatctttccctcgtctggagtttgacctaatcttaccgcttaaactcaaataagaacaggactaactttggtttgtcaaatgtaaccatattcagtgcactatgttcatcagttcttttctattacattagtaaagatcttttcatttaacccatttctaaaggtggggcctttaggaaggtcataccatttttatttacaaaaagaatatatataaaaaaagaagagagtagcagaaaaaaacctctaaaacactatgacaaggattctagctgacagaagtttcatttggaaaaaacatggagtaaacattagggtagagagtttttatcagcgcctcaagcttaccagctaggatcccaatggagtgtttggctcccagaatctctccaagaacctctcaagaattccttgaaaatgtacaggccagatcttagggtgagaaattcaaagaactgctcagactccacccagtggagaatttataaatattttactttacttcctctcccctaaccaatcggtaatctccagccactgtcagaaatttaagcaacatgtgctcctgcccaccatttcaaatgccagagcctccagtgagggcttctttccagaggcaactttgctctttaaactcaggtaaacacacacttgtcctttaactatataaatctctgacccctgaactgatgagttggtcttagagctaaattccaaattttgcctttcttcttcactttgagctctggatttttgagacaataccctccttcaaatacactgaggattttcagtctgatggttgaawctatgacatttaatgggtaaactttttagtcaaaagtttaaaataggctctcaattccagaatacactctattgcctaatatgtgagttttcaaaaactcctaggtaataaatctggacagttaacaagacaatgaaggaagaaagatctgaagattcaagtggaaactagcctggcaaacttcattaatgcaaattattcatttaagtctgtgaattgtcttttgttctagtctgactacctctttaggcttattcctgagcttgggtcttttgatgaatatccttgtagttataaaaactaagagcaaagactttcgatattaggactagggatgaagaatgtgcttgaataattgaatgacttatgcacacctatgctttatttagtaacccacaacaaatcaagtaaagtgtcatttaatcatttctatcaagtgttcattgtataaccctgagcaattcacttaacccttgtggaggctcagtctcctatttatcaaatgaacttaataataccttcctcccaagattactgaaacgataaaaccatgcaggttgaaggccatagataccatgacactcaagtcaaaagtgacatattgtcttttttttaatcttaagtaaccagacaaaaagtactactctccagtttccaagagagggagataaagtgcatgaaattgctttaatacgagtaattgaccagtgaaaataaaatatatttcacttcattgatcctatccttacaataatcctataaagtaagtagactaccaattgattaacttagaatagtaaaagtttgaatccattcaggaaatttcagaaggtgtactttttttgcatctattctgtgtatgcctcatgctgtaaaaactttggaagattaccaggctctaatatatggggagcgaaccagagggcggatctgtgtcatttttgtgtcactcttttaaagactgactatagatttagagagctagatatggacattaaggttttgttttcacaagatcttgcttcttctaaaatcttgtaataatatgattaaaaatttcatcaaaatattatcttaaaaactactgtttaacttgtcacctttaaagaacttgcttggaggtctaagctatacttctatttcttatgttttataaatttctttctttctttaaatttgttacatttgaggaataaaaataaaatcccaagcccctagattaactgaacggacacg

SEQ ID NO: 75175 - DNA, 1807 bp, Homo sapiens
aggttgtctgtttactctgttaatagttacttttgctgtgcagaagctccttagtttaattaggtcccatttgtcaatttttgcttttgctacaattgcttttggtgtcttctttatggaggagggagaggatcgggaaaaataactaatgggtactaggcttaatacctgggtgaggaaataatctgtaccacaaacccccataacacaagtttaccatgtaaaaaacctgcatttgtaaccctgaactaaaaataaaagcttaaaagaaaatcctaaggaaattcaaataaagtatggacttttttaaaaaatagataggtaaataaattaagaagtattgacttaaaaaaaaaaaagacaggaaaggccatttctcaaaaaagcattccctggtgctttactcttatttcacatggagttacatattttgatttcttatttgtaaacttaactgtttccaaaaatcaaaataagaataggaatcatgagctgtgtggtgagatggacactaccaaaaagatggcaacgaatgatgaagatatttggcctgccatgaggccttcggctgtcttgtgatttacaagttgttctcaacttccaaagatgtaggaaaaatcctttttcctctcaagaaaaggaaggtttgctgccagtagtttctctcacagcacatctatcctacgattccgagaagtatttttttttctttgttttattctcccctctgggatcttatatcatgagaggaaaagcaggcctgatgggaaacaaaagcagacattttatggattgtaattgatgaaagaatgaaatgcattaactaattgagaacagaaaattggagcttgagatcccattagaaatctcttctacttcctagatctttttaaagatttccaaaatgcttttggttggccccctcactgctttccatctgctgtgtttttcttttttttttttctagcttcccatttaacctgaaacaattaatttactcataaaaccaggcagataattttttttcagatagcttagaagaaaaaaaagagaatgaatttctaattaggtaattatccatcacctcatgcaactaaggatttatcattacttccaataccacagtagcgtgaaaaatggaaaagaatgcaacaccattgggtttcacagcagcagaaatgttcaccctgaagaaacattatggcccttagtctttcctggaacgatcagtcattgtgctttggctgagatcaggattaaggctattaacccagaactatgtagtttgcaaaatacttttccatgctttgttgtattcattcctcatgtaggccctacaaaattaatgatattcatccattttgccaattaaaaaaatgatcgctggaagatttatgagaattgtccatggttatctactggagagcacacatacctagcaacattccctttaccatgcagacagtggacactctctcttagactttggagagracaatggtcgacttcttcttagagtttaaaagcaagtgcctagggtaaactgcacttggttcctttcctagaaggaattatgaagtgtatcttttattaattggtattgcaatcttatctctgctctgtttccagaagatgatgccaattcctaggagccccatttctgggctggaagttttgaccaggagacttgacaccatttggaggtagaggtggttggtttggttcatgaaaattttccacccagatgcaaaaagactattttgtagctaatatatatatatgtacatatatatgtgtatatatatat

SEQ ID NO: 75176 - DNA, 1807 bp, Homo sapiens
aggttgtctgtttactctgttaatagttacttttgctgtgcagaagctccttagtttaattaggtcccatttgtcaatttttgcttttgctacaattgcttttggtgtcttctttatggaggagggagaggatcgggaaaaataactaatgggtactaggcttaatacctgggtgaggaaataatctgtaccacaaacccccataacacaagtttaccatgtaaaaaacctgcatttgtaaccctgaactaaaaataaaagcttaaaagaaaatcctaaggaaattcaaataaagtatggacttttttaaaaaatagataggtaaataaattaagaagtattgacttaaaaaaaaaaaagacaggaaaggccatttctcaaaaaagcattccctggtgctttactcttatttcacatggagttacatattttgatttcttatttgtaaacttaactgtttccaaaaatcaaaataagaataggaatcatgagctgtgtggtgagatggacactaccaaaaagatggcaacgaatgatgaagatatttggcctgccatgaggccttcggctgtcttgtgatttacaagttgttctcaacttccaaagatgtaggaaaaatcctttttcctctcaagaaaaggaaggtttgctgccagtagtttctctcacagcacatctatcctacgattccgagaagtatttttttttctttgttttattctcccctctgggatcttatatcatgagaggaaaagcaggcctgatgggaaacaaaagcagacattttatggattgtaattgatgaaagaatgaaatgcattaactaattgagaacagaaaattggagcttgagatcccattagaaatctcttctacttcctagatctttttaaagatttccaaaatgcttttggttggccccctcactgctttccatctgctgtgtttttcttttttttttttctagcttcccatttaacctgaaacaattaatttactcataaaaccaggcagataattttttttcagatagcttagaagaaaaaaaagagaatgaatttctaattaggtaattatccatcacctcatgcaactaaggatttatcattacttccaataccacagtagcgtgaaaaatggaaaagaatgcaacaccattgggtttcacagcagcagaaatgttcaccctgaagaaacattatggcccttagtctttcctggaacgatcagtcattgtgctttggctgagatcaggattaaggctattaacccagaactatgtagtttgcaaaatacttttccatgctttgttgtattcattcctcatgtaggccctacaaaattaatgatattcatccattttgccaattaaaaaaatgatcgctggaagatttatgagaattgtccatggttatctactggagagcacacatacctagcaacattccctttaccatgcagacagtggacactctctcttagactttggagaggacaatggtcgacttcttcttagagtttaaaagcaagtgcctagggtaaactgcacttggttcctttcctagaaggaattatgaagtgtatcttttattaattggtattgcaatcttatctctgctctgtttccagaagatgatgccaattcctaggagccccatttctgggctggaagttttgaccaggagacttgacaccatttggaggtagaggtggttggtttggttcatgaaaattttccacccagatgcaaaaagactattttgtagctaatatatatatatgtacatatatatgtgtrtatatatat

SEQ ID NO: 75177 - DNA, 658 bp, Homo sapiens
ggtctgccatgatggaagagaaagtgtgtgctgaataagggaatacatctgatctctaattagatccatatttaagcacatctcaaaagaaaaaaatcataaagtcaaatatgaaaaggaaaagctttcacaaacaagaattgtaaggttttgctaatttgtatttgccaaaaacaaaaacaaaacataggtaatatatatggaarttgattctgtgagagaagaggaagggagaaaaatctggattctgctgaatttatcacggagaatccacacaccagagattataaattaattgtgcttgcttaataaactgtatatagtattatttcttaggttagttctctaaaatctagacttaacatttcactcactaaatcaagttaaaatgatagaaattcagtgaaataatatagataaaagtattagaataatgcattagaagaacatccaatgaaaacgttgcacataactaattacttgtaactcacttgcccaccacccatatttttccagttttagggtcccagagttccttctttcaatgaagaattgaagaatactttggggaagggagaaccagtatatctgaaaggttatcgtggcagttattctgttttcaactagaaatttggtttggatatactggctttgaaat

SEQ ID NO: 75178 - DNA, 1260 bp, Homo sapiens
aaaactaaacaatggtgagcaggttgagggaggggtgaaacttgcagtgggataaaataaaataaattattacactgtgcaatttattgtgttgtagactaaaatattagatagtaaactattaaatatggatattcacaaattatgtggttcaaagtaatattctatgatcgaaatagcctttctttaataagaaatattataaacaaaggctcaaaatttccttcaaaggtgtttctttagctagaacaactatttttggagttgtgttttgaaatgtgtttgcagagccatctacttaccattttgccatcatatgtctctattgttcaaattctttcatatcacacgttctctgctttatcctgagagcatttgtttttatgatcaccatgtagggwtttacttgaaaagtgaaaacagatactattgtggattgattgtgacccagattgttatgccttcctgcatccacaatcttttgcaataggactttgtccactatcacaaatggcaaaatcagttttctaaaggctttaatttgagccaactttgtgacttatttctttcaatagaacatagagatagtgatgttctgtcatttataaggctaaccttgataaagaggcagacatagcttgcaggataataaaaggcatcttggagtggaggtcagtttttctagatgaggctgtctaataaactatagcaaaatatgtgacagagcccaagagtagtcagcttaggtgtgcacctacagctgcacacagacacataagtaagcccagtcaaggcccagagatttctccagatgacttgtagactacaagtaatgcatgctttatgtttatgccatcaaatttttttgtactaactactggtagcaatataaaaatattgtatgcttggacactataattttatgttttgcagtcacctgtaaattgtagacaaagacaacagagcccagaaaaagtaaatccaattaacataatattctgtcgaaatttagaaaaaaatatgtttagtgtctgtgtagctttgcttatcactgataatctctaaaccatattaactagtttaaaatgacaacactcacttttctccatccttgctttgagctagtggtaatttcctcacacagaaccatgccactcctctgtaaaataagtaattaaatggtgttcatggctgtttatttccgagaggtatacatctattagtatatcattagaaactcctttgcaacatattctcaac

SEQ ID NO: 75179 - DNA, 870 bp, Homo sapiens
ctataattgataaacatatacactttatggacttttagattatcacagccttttctacagagagttgtttcatatctattagaaaatccattaaagccgtaatcaattctctttaagtaaacataacaaaaatagaatatttatagtcattatgacacgttataagatatactttgaaaagacataacattgttttctgtcaggttctacctattagttttctgtttttagatcttaatgtcagaccgtgctagtatcaaaaataaacctttatcagtaaatataatagtagtaacacatggttataatattatgatgccttagatattagtagaagtctcagactcactgtcctttggtaattcaacagcagactctagtttatttttttaattaaagctaatagatctattttccaaaatgaccatttgctatgcagtgtttccaaattggaagggtaagtctaggtttcagtttgacatcaggagatgttgaaaaatttatccttttattgaaatgtaatacattccagctaatgaacacaaattttcttattacttaaattcactagacaaaggaagaaccatgttgcagacacttggatatattctgcattcaccggcaaagcaaataagccacagtaattatagagatgccatgaacacatgattacaaattacaaaaccttctaatatgcaagtatttatttgaaaacattttcaatgaagaactctttagataggtggtgataaacattccagttttcaaattacacaaagctaactaaacgggtaagcttttctyttttaccctgtccaggtccttttaattttaaatagattagaaggaaaaaaagaaagaggaatatgc

SEQ ID NO: 75180 - DNA, 870 bp, Homo sapiens
ctataattgataaacatatacactttatggacttttagattatcacagccttttctacagagagttgtttcatatctattagaaaatccattaaagccgtaatcaattctctttaagtaaacataacaaaaatagaatatttatagtcattatgacacgttataagatatactttgaaaagacataacattgttttctgtcaggttctacctattagttttctgtttttagatcttaatgtcagaccgtgctagtatcaaaaataaacctttatcagtaaatataatagtagtaacacatggttataatattatgatgccttagatattagtagaagtctcagactcactgtcctttggtaattcaacagcagactctagtttatttttttaattaaagctaatagatctattttccaaaatgaccatttgctatgcagtgtttccaaattggaagggtaagtctaggtttcagtttgacatcaggagatgttgaaaaatttatccttttattgaaatgtaatacattccagctaatgaacacaaattttcttattacttaaattcactagacaaaggaagaaccatgttgcagacacttggatatattctgcattcaccggcaaagcaaataagccacagtaattatagagatgccatgaacacatgattacaaattacaaaaccttctaatatgcaagtatttatttgaaaacattttcaatgaagaactctttagataggtggtgataaacattccagttttcaaattacacaaagctaactaaacgggtaagcttttcttttytaccctgtccaggtccttttaattttaaatagattagaaggaaaaaaagaaagaggaatatgc

SEQ ID NO: 75181 - DNA, 560 bp, Homo sapiens
taatcaaggawatctgattagaagagaaagggtcatttttttatcataaattttcatatttttctaaaatgtgaatcaaatcagtgcatgttcactagtggaagcaagaaatctataaagtaaatgtcattgttaaagtattcagtacaaagtctggaatgtagtaagtggctcaaaatggggttaactatgtatgacgcaagggttttgtgtctgggttccagagattgccctaaggtgttcatagatagaattttggataactttacattaaaacaggaaaaaaatacagttttattttcattaatttctaactgaattttagcatttactttaagttgaaatgcaagtgagaactcacattagtatcagtattaactattaatcgccaccagtagaatcacagacttttagatcacgtgatttattgtatctcaaaatatcaggtatgcacaccactccttttaaaatgtagtactttgtttcagcgcgataataaagtagtacagatatctatacagcccaatttaaaaagtagtattttggtaactgtgaaactg

SEQ ID NO: 75182 - DNA, 660 bp, Homo sapiens
gcatgagccaccacacccggccctgtatcttgtgtaatttgtatttccgttttctgccctttccaagtttctctgctcctcttggggtttgtttaggcatgcctcttttctccaactctaataataataataataataataataataataatagcttcaagatcttcaaagtagcaggggaaataatttgcaaattgagtatttgagtttgaatttctcagttctcacgatttcactgaactttgttttctttcttccttttttttttcccagacagggtctcgccctgtcctcctgaggacactgcacgccccctgaggctggagtgcagtggtgcaatcatagctcactgcaacctcagtctcctgggctcaagcaatcctctcacctcagcctcccaagtagttgggaatataggtgtgcgtcaccatgcctagataatttttaaattttttgtaaagacaaagtctcaytatattgcccaggctggtcttgaactcctggtctcaagcaatcctcctgcctcagcctcccaaagtgctgagattacttgtgagcctgggaactttggcttcttaacctgtagatggagcattttccaggcactctgagtgaaaagcctctcctgtagaacctgactaatacacttgtgtgcagcat

SEQ ID NO: 75183 - DNA, 1010 bp, Homo sapiens
ttaatatttctcatatggttgaaggcagctatttcatttcaatgacagatggctggttttctacttttgttttgttttctgtgtattacttcaaacataaaatacaggcttaccttaacttttttaccragtcgatccttccacttctcagctatagagccttccaccaagagtaatctgtatttttgaaagaagcaaacatttttgaaaaattaaaacctgttactgaaaagtacaaggaaacagtacttgaacaagaaagacttacatgtttattcttgaataggacagctaagatttagaacagtaattattaaccatttgtaagtcacagacccctttaagaaacaaatgaagttatggcccctctcccaagaaaaatgtaaacctataaactacacgcatacacccattccatatatgaaatcaagaaacccaactaaaacttatctgtaatccccaagaaggtagacagatcccaatgtaaaaatgcgagggtagcatctctagagacaaatttaatgagagtaggataagcaaagtagttattctgtatccttaaagagtgaattacctggaacgttcctcatcttcatagcccatgatgatatattcctcattaacattaagtggagggcagaggcagccagagctggtatagaggttgacagtgtcccgtggaatgtttaccagagaggactttagaatctccttcacctccactactgcagtcacatcatggcacttagtctttatctctttaactttagcccaaatgactgggataaaagacaagaaaagctgataataatatgacacataatagctaccccattcaaaaaaagccaaagtaggcttctctttagttaattcttatccacttgatattcaacgaatggaacagaaaagtcagccagatatttttgccttagactgtagtgtgtgacataaaacaacacacctgacctaatgctcagccctgctctctttccaatttgtggctgtgtata

SEQ ID NO: 75184 - DNA, 1010 bp, Homo sapiens
ttaatatttctcatatggttgaaggcagctatttcatttcaatgacagatggctggttttctacttttgttttgttttctgtgtattacttcaaacataaaatacaggcttaccttaacttttttaccaagtcgatccttccacttctcagctatagagccttccaccaagagtaatctgtatttttgaaagaagcaaacatttttgaaaaattaaaacctgttactgaaaagtacaaggaaacagtacttgaacaagaaagacttayatgtttattcttgaataggacagctaagatttagaacagtaattattaaccatttgtaagtcacagacccctttaagaaacaaatgaagttatggcccctctcccaagaaaaatgtaaacctataaactacacgcatacacccattccatatatgaaatcaagaaacccaactaaaacttatctgtaatccccaagaaggtagacagatcccaatgtaaaaatgcgagggtagcatctctagagacaaatttaatgagagtaggataagcaaagtagttattctgtatccttaaagagtgaattacctggaacgttcctcatcttcatagcccatgatgatatattcctcattaacattaagtggagggcagaggcagccagagctggtatagaggttgacagtgtcccgtggaatgtttaccagagaggactttagaatctccttcacctccactactgcagtcacatcatggcacttagtctttatctctttaactttagcccaaatgactgggataaaagacaagaaaagctgataataatatgacacataatagctaccccattcaaaaaaagccaaagtaggcttctctttagttaattcttatccacttgatattcaacgaatggaacagaaaagtcagccagatatttttgccttagactgtagtgtgtgacataaaacaacacacctgacctaatgctcagccctgctctctttccaatttgtggctgtgtata

SEQ ID NO: 75185 - DNA, 1010 bp, Homo sapiens
ttaatatttctcatatggttgaaggcagctatttcatttcaatgacagatggctggttttctacttttgttttgttttctgtgtattacttcaaacataaaatacaggcttaccttaacttttttaccaagtcgatccttccacttctcagctatagagccttccaccaagagtaatctgtatttttgaaagaagcaaacatttttgaaaaattaaaacctgttactgaaaagtacaaggaaacagtacttgaacaagaaagacttacatgtttattcttgaataggacagctaagatttagaacagtaattattaaccatttgtaagtcacagacccctttaagaaacaaatgaagttatggcccctctcccaagaaaaatgtaaacctataaactacacrcatacacccattccatatatgaaatcaagaaacccaactaaaacttatctgtaatccccaagaaggtagacagatcccaatgtaaaaatgcgagggtagcatctctagagacaaatttaatgagagtaggataagcaaagtagttattctgtatccttaaagagtgaattacctggaacgttcctcatcttcatagcccatgatgatatattcctcattaacattaagtggagggcagaggcagccagagctggtatagaggttgacagtgtcccgtggaatgtttaccagagaggactttagaatctccttcacctccactactgcagtcacatcatggcacttagtctttatctctttaactttagcccaaatgactgggataaaagacaagaaaagctgataataatatgacacataatagctaccccattcaaaaaaagccaaagtaggcttctctttagttaattcttatccacttgatattcaacgaatggaacagaaaagtcagccagatatttttgccttagactgtagtgtgtgacataaaacaacacacctgacctaatgctcagccctgctctctttccaatttgtggctgtgtata

SEQ ID NO: 75186 - DNA, 532 bp, Homo sapiens
attttaagcaggttcaggtaagatctgggacacttgggttttggagtcacaaccgatctttgttttactctgtgatcctgggaatagtagcccttttctggatttttctccacccttagctaatgtgttaacaatgtgttgtatccttgtcttaagtattgtagtgttatcacttaaaactgcctcggatgtccttttagagagcagttcctccatgtatgacattttatttaacaattattccttgttaaattccaacggatactgtgagacacatggcagatacagccctgcccacagggaccttccattctggtgggcaaagaaaggaatactgaaatttcatctacagagaatccaccccaaggtgagcccgctatctctaagactttcaggcggcactagagtgaactaactagaaggaagactggatagagatactagataaagagataaacascaaataaatgcaacaaatggccaaaaggtctagaaccgtttacatcttagatatctgtataatttacctctc

SEQ ID NO: 75187 - DNA, 677 bp, Homo sapiens
ttagggaattgccaaaattatggaaccaccatgatggaatattttgcagctgttaaaaatgtttggtaggttttcatacctgtcatttgtttttttttttttttgagagggagtctctytctgttgcctaggctggagtgccgtggtgcgatcttggctcacggcaagctccacctcccgggttcacgccattctcctgcctcagcctcccaagtagctgggactacaggtgcccgccaccacacccggctactttttttgtatttttagtagagacagggtttcaccgtgttagccaggatggtctccatctcctgacctcgtgatccgcctgccttggcctcccgaagtgttgggagtacaggcatgagccaccgtacgcagcccatacctgtcttttttttttttaagttttcagatctgccacacattgctggtgagaatataaaatcgtacattccactttggaaaatagtttggcagtttcttacaaaatgaaacatatacttaccatatgacctagcagttgcctcctgagcatttatgccagagaaatgaaagctaatgttcacaaaaaaaacctgtccacagctttatatgtaatagcccaaaactagaaaaaactcacacgttcttcagtaggtgaatggtacattcatactatggaatactattca

SEQ ID NO: 75188 - DNA, 703 bp, Homo sapiens
tgctatccaaaagaaatatattgtaagccacatgtaattttaactttctagtagtcacaggaagaaagtaaattaagcaggtgaaattaattttaagaatatgttttatcgaaccaattatatccagaatgttttttttaacatgtaaccagtattacagtgagatagtttacattctttttttcaaagacagtcttcaaaatctagtgtacattttagggttacagcaaagtttagttcagactaaccacatttcaagtgctcagtagccacctttggctagtgggtaccatattgaagaagaggatgagtagttgggagtgagggctttgatgtcagacccaagtttgagtaacagcagctctgccatttgctcaccttgtgaccttgggtatgttacatgaacttgtgcttttgtttttcatttataagrtagggataataacttctccatagtggtattagaaggattaaatgagtcaatgtaggtagcatgcttggcacaggactgggcacaaaatatgtactgtaaatagtatatgttacacagtgataattttttaaattcccatatattgtgtactgaattgaatgagtaaccattctaaaagtgtgactgatttcttagtagtagtagtagtgagtaaatatataagcagtacatgaaataatccttactttttacaattaaagttttggatcc

SEQ ID NO: 75189 - DNA, 860 bp, Homo sapiens
attttttttttaaatgatgtatccagatgttaaattatcagtatactgtatatctgtggaaaatgattgctgagttcaagtgaatattcaaggcataatgtaggatgaaattttcatgccatgatataacacttggaagtacccttcagcatgtagagccatcaggaaaagtgtccaaaaaaggacatgaaggggcatgggctaaaacacattgtagacagaaagaacaagtggaaacgcataggaaaagcatggcctctgactcattcctgtggactatttagaattaaacatctgttgctttcaactttcttggtgctctccctatttaccttaagtcatttagctctatcacacgagatacttacatctgaaaatggaagatcacctcttgatatgacagagagatagaattttcagaacacctcttggtgtgtgggagaggtggagagatggaggtgtggctggaaatgtgagatagtgcaggtttgcctagaagctgacaaaatttaggctttagggtccctccttttccccaacctcttctataatcttatatctaatcctgtataatcattttgtattcttctcaaaaatggtcaatggccatccaaagtgtataaaatttagatcccacaagatccacattctttcmttaactggcaatgtgtttccatggttacatggatttggaaaatttgtaaaagaaatgcattttaatcacaactggtccttgtctcttttcacactagtttccctatttgcattttttttttccttgcagtggtggcaggtattttggaatttagctaagggtaagttgggtaagagatgcatttattttgaattcaataggatcc

SEQ ID NO: 75190 - DNA, 860 bp, Homo sapiens
attttttttttaaatgatgtatccagatgttaaattatcagtatactgtatatctgtggaaaatgattgctgagttcaagtgaatattcaaggcataatgtaggatgaaattttcatgccatgatataacacttggaagtacccttcagcatgtagagccatcaggaaaagtgtccaaaaaaggacatgaaggggcatgggctaaaacacattgtagacagaaagaacaagtggaaacgcataggaaaagcatggcctctgactcattcctgtggactatttagaattaaacatctgttgctttcaactttcttggtgctctccctatttaccttaagtcatttagctctatcacacgagatacttacatctgaaaatggaagatcacctcttgatatgacagagagatagaattttcagaacacctcttggtgtgtgggagaggtggagagatggaggtgtggctggaaatgtgagatagtgcaggtttgcctagaagctgacaaaatttaggctttagggtccctccttttccccaacctcttctataatcttatatctaatcctgtataatcattttgtattcttctcaaaaatggtcaatggccatccaaagtgtataaaatttagatcccacaagatccacattctttccttaactggcaatgtgtttccatggttacatggatttggaaaatttgtaaaagaaatgcrttttaatcacaactggtccttgtctcttttcacactagtttccctatttgcattttttttttccttgcagtggtggcaggtattttggaatttagctaagggtaagttgggtaagagatgcatttattttgaattcaataggatcc

SEQ ID NO: 75191 - DNA, 860 bp, Homo sapiens
attttttttttaaatgatgtatccagatgttaaattatcagtatactgtatatctgtggaaaatgattgctgagttcaagtgaatattcaaggcataatgtaggatgaaattttcatgccatgatataacacttggaagtacccttcagcatgtagagccatcaggaaaagtgtccaaaaaaggacatgaaggggcatgggctaaaacacattgtagacagaaagaacaagtggaaacgcataggaaaagcatggcctctgactcattcctgtggactatttagaattaaacatctgttgctttcaactttcttggtgctctccctatttaccttaagtcatttagctctatcacacgagatacttacatctgaaaatggaagatcacctcttgatatgacagagagatagaattttcagaacacctcttggtgtgtgggagaggtggagagatggaggtgtggctggaaatgtgagatagtgcaggtttgcctagaagctgacaaaatttaggctttagggtccctccttttccccaacctcttctataatcttatatctaatcctgtataatcattttgtattcttctcaaaaatggtcaatggccatccaaagtgtataaaatttagatcccacaagatccacattctttccttaactggcaatgtgtttccatggttacatggatttggaaaatttgtaaaagaaatgcattttaatcacaactggtccttgtctcttttcacactagtttccctatttgcattttttttttccttgcagtggtggcaggtattttggaatttagctaagggtaagttgggtragagatgcatttattttgaattcaataggatcc

SEQ ID NO: 75192 - DNA, 2191 bp, Homo sapiens
ttcaataaagaatttatttttaaacccttttgctgaatcacccactgtgtatattaattcaaaaaatacaggcagagactgaaaatagagtctccgcagtcaattaactctcagctaactcatttttcacatgccttctatattgataccagactagaaaaaggtatcacatttatttaatggatgaaacattagccttttagcaaatgtggttgtttgcctacttctagatggctcattcattctttggcatttgaggatggtaatggagcatatctgtagctttagggacccagttggaatgttgtagggctatctctctgatggaatacatcagccacgtttcacctacaagtttacaacccatttatattctgaagttttaacaagttcaatctacaaatgggtcatcaaagtcatgcataattgttatggactgaattttgtcccctcaaaattaatatgttaaaattgtaatcctcactacctcagaatgtgactgtatttggagacagagcctttaaagaggtaattaaggtaaaataaggttatacgataggcccgaatccaatatgattgttgtccttataagcagagacaggcacaaaaagaccatatgaagtcgtagagagaaggcagccatttccaagaaaaagagaaaggctttagaagcagcaatggtgccaataccttgatcttgtatttcccacttcaaaactgtgagaaaatatattttcatgaagccacccagtctgtggtactttgttatggcagttctaacaaactaacacaataatcttctctccaaggcctcctgagctttgcaaaaagaacagaggtgagaggattcatcagacaagacacctttctaaaatgctttgctcaatgattttgcacttgtcccttccaagctcttacctaagaccttcaagctctttctcatctaacatttgtgtatgataacagaagcctagaagtctcacagtgttacaaagagcagacaacaaataatccagaacctggtccttggtcttgtaatctgggcagtgtttctttccccggagagataatcaaactgtgatcatgcatccacaccaagtaaactttacatgtctattgtgcaaactaaaacgtcttttattaacatactatttcgggctaataccttacaaagaacacaaaataagattatctagctgggagatttggagaaaagttcctagaagaggaagtgtttgaagaaggggcaatattttgtcaatgaggaatgatttttatatgtcttagagattagaaaaacaattgttaaaaaaatgagtcttttttcacgtcagtgtattactacttagcaaatttctattttcatgctacaaagagcttcaccaggaacctagggctacaaacagcatttcgagtttgatatactcaaagtaagtggttctccatgtttaaygggcagcagaacctcttaggaggcttatcaacacaggttgctagactccacccccagaaatctgactcagtagataaagaggtgggcctggagagtttgcatttctaacaggatcccaggtaaggttgatactgctgatggtgctttgagaaccactgctccaaaagactaacacacaaacagcaaagaatgtggtttgttatttgcaatactccagagactaagggaactttctttctttttcttttttcttttttttttttttttgttaagacgaagttgctctgtcgcccaggctggagtgcagtgacgcgatctcggctcactgcaagctccgcctccagggttcacgccattctcctgcctcagcctcccgagtagctgggactacaggcgcccgcccccaagcccggctaatttttttgtattttttttagtagagacagggtttcaccgtgttagccaggatggtctcgatctcgactaagggaactttctgtcgatatggagaactactcataaaacttccaataaattttccttcatataatactttaaattgaaaatggtaggctgggggcggcggctcacgtctgtaatcccagtactttgggagaccgaggtgggtagatcacgaggttaggagttcgagaccagcctgaccaacgtggtgaaacgtcgtctatactaaaaatacaaaaaatagccgggcgtggtggtgcacacctgtaatcccag

SEQ ID NO: 75193 - DNA, 1260 bp, Homo sapiens
atcatataggtcattaacccttggctatatggcagaagcgtttggtgttggtgtggaattcattgatcagtaagtttgaataatgccatgttaattgaagttttaaagttgccttttaaaatatgtgaacttgtacaattttttacttgtttacattggttccctcaatcttaacggggaggggagaggtttttttcctcagtattatcaaaacattcgtatcctgttgcctctgccttcctcatgtcatgtctgccccttgcattaacagatgggaagatgagttgtagtgaggctaagtgatttgttaaaggtcattagaccagttgttatcaaaagttgtcttctgttacttctttgtagaccacactgcagctacggtaatgactcttagatctgatatttacagttggtcatattccctctgataattccttccagtttttaggttgctgctgcaattctggtcagattggttgttaaatgtgggacttttagtacttgcatcagtgattaaacaaataaatacttaatgagccattcattactatatgtttggtattgttttacagctcccttttcacactttcattgtagtagtagggaagagatggcaaggaagcaaataaatataaaacgtaatttcacatatagaaatgaacctatggagatgagaaaatgctatccttacgtacggcatgcttaaggaggtgaggtttgctctgagatttgaattgagaggagtcagccatatggagtccttctgcgtgcagaaaagggaatagaaaaggctaaggctttgagccaggaataagcttggatgttgtaggaacagaaaatgtcagggtggctccagcatagttggagtggtaggagattttgaggataatatatggagagttaggtaggtaatgatttgtgtagggccttgtaggtcatgggatggagcttgagttttaagtaagttkgatagggagccattggaagatttagagcccaagttacatggtcctatgcagtgtctttatataagaaatagagtaaggtggcagagaggaccagttgtgctgtttagtagctcttagaggagatgttaccgtggcgtggacgagggtggtgagagtagagttgggtaggagacatactcaatatgggatgtccagatggcatctagatcagtggctcccacatgtaggtgtttttaaatgttgatgatggtgttttcaatggtctgcagtggaaactttaaatgaagatgca

SEQ ID NO: 75194 - DNA, 626 bp, Homo sapiens
tcctgcatttgctctggaatattcaaggagtcctgcacagcacagttgctggtgcagcaggaggtcagaacatcctttttttcccccatcctgggagttggtgcctttgggattytgtgggtaaatgtgctatttggatttctaaaagaggctccccttcaaattctaaaagctttggatgagcctcataaaacctacattcacctctggattctagctgctggtgatacctataaggtcatgctttcaaggtaattaacactactatggggagccctgcatttctttggggcagcctggaagaagagagaaacaagtaggaagctgccctttagaaatccctgcattcatatggcaagagtgcccaggtctctttttatccatttttaggatggatgggggaccagagaggaagattgagtctccaggcaccagagagagggtggtagaaggtagatgagcaaagctttgaccaccacttttgcctagtgatggagggcttttgggtaggaaggtatctcaggcaactggtaagcagaaattttcctttctcttctgtcacttaagaaattgtgtattaagctatttatttttttcattgtaaaatatgtgccatatatggaaaa

SEQ ID NO: 75195 - DNA, 626 bp, Homo sapiens
tcctgcatttgctctggaatattcaaggagtcctgcacagcacagttgctggtgcagcaggaggtcagaacatcctttttttcccccatcctgggagttggtgcctttgggattctgtgggtaaatgtgctatttggatttctaaaagaggctccccttcaaattctaaaagctttggatgagcctcataaaacctacattcacctctggattctagctgctggtgatacctataaggtcatgctttcaaggtaattaacactactatggggagccctgcatttctttggggcagcctggaagaagagagaaacaagtagraagctgccctttagaaatccctgcattcatatggcaagagtgcccaggtctctttttatccatttttaggatggatgggggaccagagaggaagattgagtctccaggcaccagagagagggtggtagaaggtagatgagcaaagctttgaccaccacttttgcctagtgatggagggcttttgggtaggaaggtatctcaggcaactggtaagcagaaattttcctttctcttctgtcacttaagaaattgtgtattaagctatttatttttttcattgtaaaatatgtgccatatatggaaaa

SEQ ID NO: 75196 - DNA, 1856 bp, Homo sapiens
ttttttttcctcctttcagactggttatctcaacagaatggcactattacagtaaatcttggacttaaatcatctcaactttcccccggaagaattggcttaaatgaatttagaggcttatttgcctcacatgtcaagaactacagatagaggcaactgctagagttgacttggtagctttaacatgccaagaaagcatttcagtggttcattcctaaatttgtttaagctggtgatggttytttttgatacttgaaggtgaaatgatattgcagctgattcaagttgaacaactgaaggacaactgaagtcattgttccagggctgggcaattgtcttacatcaggttagacagaggccttccctgggaatatttgaaagtgaactggtaaagaaaaattttccttcctatcacatggctacccctaactgcaagagaggttaacaaattagcatttagctttccaggcttgagggcagaagaagatgttgtagctattattaatacctactattatgcagttctcctctacttccaggaacacttccttactccatgaagttaagtgtggtcatgtgggtagtttttcccaacatggcatatgtaacatgtgtcattttcaagccaaagcattcaggatccattgtgtgggtctctatgctcccttccacaccacagcaagcacagaaacgaagcttactacgagggcgctgccaaactgaagcagcctctatcactgagccctagtatgggagacagctgtgctggagagttgcctggccttctagtggacttgcataggtgggaaataaagctcttttaaaaaaaatcattaaaattcgaggttgttatcacagcataacttcgcctatcctgagtaatagagaaagcaaaggaaaggaaaatggggttggaaataagaattgtgtgagccaacttgcagcatctgccaaaggtgagtcatgagattcttaattaaaccacatgttagagtgaagtggaggtggaggaatgggtaaaagagacaggactacaaagatattgctgtgagcctagttactactatacacttgggtctatggcaattgtcaaatgaattctcctttacatccattaagaaaatattaagcatcattccatgtactttttaggtactgcagacatcatggtcaataaggtagatatggcccttgctttcatagattttccagcagggaatcctgctagtgtctcaaaaatggaaagtgctgttggaacctgtaacagatggattcataataggctatgagatcagggaatgctttctagaggaaaaggtatttaaattgaagcccaataaatgagaatgtattagctagtttcatagacagtaatgggagatttctctaggtagagaaaatagtaagggctcagccccaactgagaaacttcatggcatatgcaggaaccatgggcagactcgtagggacagaacatagaaaattcagggaaaagaatgatgcttctaggtcagttgtagtatttgattcatttggatattttcgtcaccttattactcattcattaggtttcctactcctaaactctatgtttagtttcccctttccctggtaaatccataagaacctaggtgcacacactttcctttgtcctgctgctcagaatgtatttaaccctaagctacttgccaatttcctcactataacccttctacctccttttccgttctttattttcctcttgaactagcacaatagtctgtacaggtccttgagtgacatcccctctggtgaatccaactacaaattcatgctcctttctgagaaattccagtccattgaggttttattcaggg

SEQ ID NO: 75197 - DNA, 686 bp, Homo sapiens
acaacctgctcttgccacaggcctgtggaaccctggcagaaggagaccccttgaccaccacagacattagagttggcaaggagagctgcttagagaagtgatagaggcagcaagctggctgatgtagatccttgagggtttgttgtaagagcatctacagtggagcatggctggggcagccatcctcctaggctcgacttgcttccataggagactttagccctaggggaactgtcagacttgaactctgcagggtagccttttctatcagatgggaccacttcaacctgagcacccccttgtctgttggcctctcccaaggccccagcctggctatgtctgcctgcaggacagactgaggtgctctgggagcctgcactaatagcgtctgtgttggtagactatgcctgactagcaccctgctccagcagggggttcccatggccatgcaccagccatactacaacagcttcccctgggacccacaacaacaccccacgttgctttgctggtgcatctgtgygggcaggtttggcttttcttgctccaccaatgcatgggagtgcagtctgcctcccttccccctactaattgctattgcagatggagcctttgtaggcacagagccagccagcctcacccctgccagcaccctgcccttgcactaacactgtgcagagaacagt

SEQ ID NO: 75198 - DNA, 686 bp, Homo sapiens
acaacctgctcttgccacaggcctgtggaaccctggcagaaggagaccccttgaccaccacagacattagagttggcaaggagagctgcttagagaagtgatagaggcagcaagctggctgatgtagatccttgagggtttgttgtaagagcatctacagtggagcatggctggggcagccatcctcctaggctcgacttgcttccataggagactttagccctaggggaactgtcagacttgaactctgcagggtagccttttctatcagatgggaccacttcaacctgagcacccccttgtctgttggcctctcccaaggccccagcctggctatgtctgcctgcaggacagactgaggtgctctgggagcctgcactaatagcgtctgtgttggtagactatgcctgactagcaccctgctccagcagggggttcccatggccatgcaccagccatactacaacagcttcccctgggacccacaacaacaccccacgttgctttgctggtgcatctgtgtgggcaggtttggcttttcttgctccaccaatgcatgggagtgcagtctgcctcccttccccctactaattgctattgcagatggagcctttgtaggcacagagccagccagcctcacccctgccagcaccctgcccttgcactaacactrtgcagagaacagt

SEQ ID NO: 75199 - DNA, 539 bp, Homo sapiens
tctaagaaaccctagtatgtggaaattcagtggttccagctgtgagaatagggcttcaaatcctrtgaaactacatttagacactactaatatcccggactcaacttgatttaaagcaatttttgtgcattatcaggttacttttcacatttaatagatgtcttagtccattcaatttgctataaaaatactatagactaagtggctagtaaacaatttatttctcacagttctgaaggctgcaaagcccaagattaagatgctgacagattcagtttctggtgagggattgcttcctggttcacagacagcagtctttttgctgcaacttcacacggtaggaggaagtgaaggaggtctctggggtctcttttataaggacagtaatcccatttatgagggctcttctctcaagacctaattacctcccacaggccccacctccaaataccatcacatggtcattagtgtttaacattttaatcgtgggtgttgggaaggagacacaaacattcagtctaagacaatagatgaacctg

SEQ ID NO: 75200 - DNA, 1103 bp, Homo sapiens
cccctcccagtgaacatttaggtgttttcaatgtgttgctactttcagaaacagtatgatgaatgtcttcctacaaatatctttctaaaagattttttgcatgtgtacaatcacacacacgtatacaataatgaaataaaaattttatgaaactacacgaatccttactatatttaatgtattcctagttttctatcctatgtcttaaaaatttttttttcctaaattgttacaggtagtcagataggcgtcagctgggcaggagagggctctccccccacccactaggaatgtcaggttcaacaattacttaagtggctacgtagtctggggtatataccctggggttcatcgtcttgcgccaggaaaatttaggacatggacacacacgaagagtttatgagcagaggtttaataggcagaagagaagagaaagagaaacagctctctctctatagagagaggtctcccagcagaaaggactggtgggcagcagatgtgctggattttatagtcaggtttgaggaggcagtgtctgatttacaaagggctcacagattggttccatcaggtatgacatttacatagcatgtgggaaggctgaccaccccaccctaatcttaccatgcaaatgaaccctcctgttaaccggagtctgctccttactgtacatgtggctgataaagagaagggaagatggggccgccattttgaacacgaytggcacaactgctggcatctatgactgtggctcgattttacaggctgctctttgttagaaaggaaaatgatttggggctgcttttcattaaaaagaaaaccttactgaggacttctgtaccctcattagccaacctaagtaatttcttcttacctcctgtatcattatcacactgcctctctaaaaatgataatttcacagcccaccaagggtgccagggagaggccatttcctgatgatccacagctattaacattaaagtgttgactgaatgcagctactggggagaaaaaccttctgggcatgtgcacttaaagacaaaatggtgaaacatgaccttccgggtgcactccactggaaaaagggaagaaagcttcagatg

SEQ ID NO: 75201 - DNA, 1018 bp, Homo sapiens
gcatactcatttaccagaggctgcagaggtatcaggcaactttggtttgttcagcttaccgggttttgatatgactttgaattgcaaatttggcttggggagaaattagggaattttctatgtagtaactgtcaaattgcaaaccacagagagagttggctactggatttttctgggaatcatttattcctagtcttgggtataattctgagctgatacagtaatatgggaaattcttggtttctgagaagtaaatcagaatcctggtaagagtggtgacatcacctcttgaactcaggagagtctccaggactttttatgcagcaacacatctgtaaagctccccattgttggagtttcactaatttggtgctctgtacatccctttgggccatgtgacatcacttatgagagggttgtggcatgtctcatagtgttgtatatgtcaagtagaaagttattttcattgacctcaagactgcagaattagacaatatctccctatttttacccaatttagccaaattctttcattcaaagattagattattattaatccctgaacgcaggttcataggaattaattcaagagtcrtaaaatttgcttgcctggtttccaaactaaataaaagggaattttctttctttgatggctccaaagggttcggtgtttctccctgcagaaccacaaagtgggaggtgtgctgctgctttgtaccatgaactacacagtcatcaaacatatacattttctccacaacctatgctgcataaataatatgatactttctgagtatcattcgattcagagcaatttgtacggcatgcgtgaaacagttctagatggggtttccttatatacctcactacaattgtgaaaaaaaggaacacgaatagttggttcaagtaaaaagcaatgtttaattcaggaactcaggctgaatttaaatcctcacactcaggaataaatcgcagaaccttctctttaccacctgctcaatcccttccttctgataag

SEQ ID NO: 75202 - DNA, 939 bp, Homo sapiens
aaagttgacttgaatttgactgagaaaattatcagacctgcttttacttgtacatgtagctcattttcaaaaatacttttgtgtatccactggtatgttgatggtcctatgcagcaataggtctgtacgcttgtccaaagaatgtctaacagccccacatcatgattagcaggagctgggtcactggggcagagctggtttgacaggtggaaaacttgtcctgagtagttctgtattagcttacctcctaaactggagcaaaggtcaaggccaatccaagattgagaasaggcgccgaacatgttacatggtaaacactcttttattagtggtcttttgagggaaagttgctgtgttgttctttgctgttatttctgctagaacagtgttcacaaaagtgaacaaaagttcaatgctcaagttaaagaaatctaagaatggagactatcagtagccatgttggggcaccatggtaaacaatggaactggataaaattttatgtagttgcctacacaattctttctatgaccatacctgctgttcctatcctctgaattaattttcatgtggaaaatagtcatttgcagcatatattaggctacaaatgttgccatcaaaaggtaacattctatatgctagtctcttgtctttagtactaagatggctctattgatgataatacgaacacattttaggttcccaattgctttgggaataaagaattgtgacttagttaatataagttgctttttcaaaaggagaaacagtgtttcccatcattttttaaaattcaggaatagtggtcttttttaattcagattttgaaggtttggtaagtttattgctaatgttggaccacacgcaagagaaagttagacattattttgtgaccagcattgttaagttgtcacattctgaacaaatcccttaaagacctg

SEQ ID NO: 75203 - DNA, 939 bp, Homo sapiens
aaagttgacttgaatttgactgagaaaattatcagacctgcttttacttgtacatgtagctcattttcaaaaatacttttgtgtatccactggtatgttgatggtcctatgcagcaataggtctgtacgcttgtccaaagaatgtctaacagccccacatcatgattagcaggagctgggtcactggggcagagctggtttgacaggtggaaaacttgtcctgagtagttctgtattagcttacctcctaaactggagcaaaggtcaaggccaatccaagattgagaagaggcgccgaacatgttacatggtaaacactcttttattagtggtcttttgagggaaagttgctgtgttgttctttgctgttatttctgctagaacagtgttcacaaaagtgaacaaaagttcaatgctcaagttaaagaaatctaagaatggagactatcagtagccatgttggggcaccatggtaaacaatggaactggataaaattttatgtagttgcctacacaattctttctatgaccatacctgctgttcctatcctctgaattaattttcatgtggaaaatagtcatttgcagcatatattaggctacaaatgttgccatcaaaaggtaacattctatatgctagtctcttgtctttagtactaagatggctctattgatgataatacgaacacattttaggttcccaattgctttgggaataaagaattgtgacttagttaatatawgttgctttttcaaaaggagaaacagtgtttcccatcattttttaaaattcaggaatagtggtcttttttaattcagattttgaaggtttggtaagtttattgctaatgttggaccacacgcaagagaaagttagacattattttgtgaccagcattgttaagttgtcacattctgaacaaatcccttaaagacctg

SEQ ID NO: 75204 - DNA, 996 bp, Homo sapiens
caattgattaactgagaaatgagttatgaatgccactgacttaarctttgcatgtcctatgctctcaacactctttaatgctaatatacattgtttcttgcagtcttggaactcagaggtgtaattagccttatcttacagatgtggctaataaaggttgaataaaaatttcaggctgcctctacttagaaaccagagaggctcatcatttgcaaggagctgaaatgtagacatctcaatacctagactcagtcactttttatcttcaaggaatgacgtaaagatgcaatggcaattacaaattatcctcagtgatggtggtatccacggtctgtggctatggtatctacagacccatgctctaatcagttggtggttttgccttgactgtgtttcctgggtccactttcacttggttgctgcctaatttttgagcctgtttctctagccttgccattaatactgtgagctctctgatattatcctaatccatttcaggttctattgcttgcactgaaaaatcttactgatgtaaccctgtagtcagaaatcaggagcaagctgctaatatttttcacctggattattgcaatagcctgggagatttgcactcactgttctgtctgcctaaaatactttgttgcaacatattcacgagtagcttccttacctcttcaggattctactcaaactcacctgtttacatcttatcaaggagttctctcattaccctatgtaaaatggcaccccaccctaacactccttatctgtccccttttgttctctttcattttattttctccagcccttgtatctactcaagatacttattacaatctgctggcaccagtggtacgtaaactccatgagggctccgttactcttttggtgacttatatttcctggaacctagtacagtgcctggtacatatgaggtactcaacaaatatttattgaatgaatatatgaatgcacttaaattatattcagaagtaa

SEQ ID NO: 75205 - DNA, 635 bp, Homo sapiens
aagcccaagctaactgagctgggtgaaggcttgtgcatcacctggcttgagttccttgctgtcacagatgataggttcatgtacacaacattaatgtttgataaggaaagcattttttttgttaaaattgaattgtcagtactttacttttttcctcccaaagaggtatatatagactgcagaaacttcagtcccatatataaacgttcatgtcattttagaggattatatggttgtctccagagaaattaacttacattatcaaaaaattctttgtctaatatattggagtctttaaaaatgttgaagaataaaatattaattagaacaacttcaaatgctaaggtgatgttttaccgggacttaattaaatataactttttcctttcgaaaaagactgttcacatttgcttccaggtgtaattattgctttcattccttacccccctcaagcaaatgtgaaaagtatactgacctaagattctcattagttttarttcttaaaacgaatagtaaatgatttcacagcgtaaattctggaagctggatgatatggaagagttcatgtgcctggacacacagttccctgtaatcctaccatctagggagataacctctgttaacattttgatgtt

SEQ ID NO: 75206 - DNA, 664 bp, Homo sapiens
agatataacctatagtttagaatactattaacagagttttttttttaatctaaaatatctctcaggagaactggtgagtgtgtataatttttcacaatgctggcttgttcctacttaaaattgagattgttggagtgtatattttcaggtggaactgaagatactctttctaattttttctgctcttcttcagttaactgtcttttattcctaagcctgctggacaatcataagtggcaccgggaggcctaagatgttttcttctttgggtgtttgtttgtttgtttgttttttgagatggagtatcactctgtcactcaggctgaagtgtgatggtgtgatctcagctcactgcaacttctgccgcccgggttcaagtgattctcctgtctcagcctcatgagtagctgggactatgggcacgtgccaccaagtccagctaatttttgtatttttagtagagacgggtgtcactatgttggccaggctggagcctaagatgtttataaaggaaatgtaaaagagagaactataggatgtgaagagatgaaaaagaggtgaagctggtgatcccatgggtatagactgggamctcacaagtcaaaacagtgacccgctgtcaggagccactcttcactgatcaaagatgcaccacacaaatgga

SEQ ID NO: 75207 - DNA, 619 bp, Homo sapiens
catgctgagaaaatgagcattttagtgtgaggatacattttgtatgtaattttgatgacagtagcactttagattttaagatcatcttggagttgccccataggagggagtttagataggtaaggtgtcaggaagtaccagaacattattaatgcaacattaaccaacacaaagtatactccagtgtggcttagaatgacataataaaaggaagatgctgtttaattagtacaatattaaaaatggaataaagggttgagccacaaagtaaaacttattataaaatgttctacttttctagaaatggtaggtagtgcttaacattatgcagtattcgtgtgtgtttatgtttgcacgtgtgtgtacgcacacttagctttaacatgttttggcactaggtacagtatcacctattaaagtttgtacgatatggtatcaggttggaggtttaggctcatgctgaaatgatatgcctgcatgcaaaaggaattgtttgtattcaaatgcctgtgtcagggtcctgtacaacataaatatgccttcacaaactacttctrtgaatttaccagccattacaatatttatgatttcttctttgtcctttcttttgtctgtctca

SEQ ID NO: 75208 - DNA, 847 bp, Homo sapiens
tgcagaccacatttcacagaaaaccccaaatctgtgtatgctggtgaacagctgaaaatgagttctcagaaacacacacacacacacacacacacacaagctgatgcacagtgtgtgccaatttctgtgttgtaaacagtcctgccatggccaacgggggaggtaagggctatcacygaggactgtgcagccctgcctgtgatcgcaaacgcctgaacagtgaggaaaacacccagagtcccagaggcctcaggggagtgttaatgaggaggtagggcgacccctgaggggggctctggggcatctgctggccaacgttatgttcattaaaggattccacagctgctgggaagccaggtgtcccttccacagcctctagcagcccacttcaccccaggatctcagagtccccagccatgatagggagggctcagaaagagaatcacagcccccgggggacttctctgtctgcgttttctcacatgggcaagactctccagccagccctggactcgctgacaaggatttgtaactccacgtaagtctatcaactcagatgccacttcctccaggaagaccacctggcctttccaggaggaggatgcacacgcaccctggtgtgaccccatctcaggcctggtgaccctggattttgatcacttgtggacccgcctcctgcagagactacagcagaactgttcagggagcttgggcaacagaaaagaatagaatggcctcatcagcacaaacagtttgaaggatgacggggacaaatgttcatgagagggttgaggtacgccatggactgccttggatttaaggccactttagtaccagcagtagggag

SEQ ID NO: 75209 - DNA, 847 bp, Homo sapiens
tgcagaccacatttcacagaaaaccccaaatctgtgtatgctggtgaacagctgaaaatgagttctcagaaacacacacacacacacacacacacacaagctgatgcacagtgtgtgccaatttctgtgttgtaaacagtcctgccatggccaacgggggaggtaagggctatcactgaggacygtgcagccctgcctgtgatcgcaaacgcctgaacagtgaggaaaacacccagagtcccagaggcctcaggggagtgttaatgaggaggtagggcgacccctgaggggggctctggggcatctgctggccaacgttatgttcattaaaggattccacagctgctgggaagccaggtgtcccttccacagcctctagcagcccacttcaccccaggatctcagagtccccagccatgatagggagggctcagaaagagaatcacagcccccgggggacttctctgtctgcgttttctcacatgggcaagactctccagccagccctggactcgctgacaaggatttgtaactccacgtaagtctatcaactcagatgccacttcctccaggaagaccacctggcctttccaggaggaggatgcacacgcaccctggtgtgaccccatctcaggcctggtgaccctggattttgatcacttgtggacccgcctcctgcagagactacagcagaactgttcagggagcttgggcaacagaaaagaatagaatggcctcatcagcacaaacagtttgaaggatgacggggacaaatgttcatgagagggttgaggtacgccatggactgccttggatttaaggccactttagtaccagcagtagggag

SEQ ID NO: 75210 - DNA, 708 bp, Homo sapiens
gagggctgggtcgggccatgggagtggaggggagatgggaggaggcggaggtgggtggcccctgcacctgaggtggcccgcacaccctgcgtcctgggaggtccctgagggtcctcggcttgtgtgtgtgtttgtattaacagcagcacaaaaccagcctcttccatatcatcacatggtttacaaagactatgaaataaaaataaagatgatgtgtctctgggagacggggtgagacactggatgctgagaatgttagtatcgagtctgtcagtgaggtcaaagccatcttttatgctgctcactcaggaactgtggggtccctcatgatcgagaccggagggaaagatcccgggaattctatgggtcacaggagaacgctcaaaacgtgctgtcaaccagaggggcctccttgttggaatgagttaacactctggtaatttgggcctttagaaagtgaaataatatcactaataatgacgccaccacccagcatytatacgcacctttttgctttccaagaacttaaagcacctcacgtgtacctttcttctagatctaaaagtgtatattagggagtttgggaaaacgcatttttgctactcctaaccacaatacccccgtttccatagtaacaaacaggaaaacgaggaaatagggaccccaaacccggaagcctggctcaggtcacagacacgtgacaggacg

SEQ ID NO: 75211 - DNA, 708 bp, Homo sapiens
gagggctgggtcgggccatgggagtggaggggagatgggaggaggcggaggtgggtggcccctgcacctgaggtggcccgcacaccctgcgtcctgggaggtccctgagggtcctcggcttgtgtgtgtgtttgtattaacagcagcacaaaaccagcctcttccatatcatcacatggtttacaaagactatgaaataaaaataaagatgatgtgtctctgggagacggggtgagacactggatgctgagaatgttagtatcgagtctgtcagtgaggtcaaagccatcttttatgctgctcactcaggaactgtggggtccctcatgatcgagaccggagggaaagatcccgggaattctatgggtcacaggagaacgctcaaaacgtgctgtcaaccagaggggcctccttgttggaatgagttaacactctggtaatttgggcctttagaaagtgaaataatatcactaataatgacgccaccacccagcatttatacgcacctttttgctttccaagaacttaaagcacctcacgtgtacctttcttctagatctaaaagtgtatattagggaktttgggaaaacgcatttttgctactcctaaccacaatacccccgtttccatagtaacaaacaggaaaacgaggaaatagggaccccaaacccggaagcctggctcaggtcacagacacgtgacaggacg

SEQ ID NO: 75212 - DNA, 694 bp, Homo sapiens
  misc_feature (1)...(694): n = A,T,C or G
gcnnnnnnnnnnnnnnnnnnnnnnnnnnnnnnnnnnnnnnnnnnnnnnnnnnnnnnnnnnnnnnnnnnnnnnnnnnnnnnnnnnnnnnnnnnnnnnnnnnnngggggntggggggnggggggggtggggggttgggggggggggggggggggggaggggcggngcggggggggggggggggggggggggggggtggggggaatgnggggtgtgggggtttggggggtgtggggtgtgggatgtgggggtgtggggtgtgggggtttgaggggtgtgggggtttgaggggtgtggggtgtgggatgtgggggtgtggggtgtgggggtgtggggtgtgggggtttgaggggtgtgggggtgtggggtgtgggggtttgggggttttgagtgcgatctttctttggaggcctggaacacattctctcccacctatgaatgtctagatgcttgcttagaatcagaatgacttkgtataattttattttaaatgcactccttatgagggcaaaacccgggaaatctatatttatgtcttatcaaaccaactggaaatgagaagtgcctgggcccaggtcagtgggtatcgttccattctctatttctttcctaacaggagtccttgaaccaggagggaaaggtgagtggatggcagggacgacggggcccgggggaagcagcacgggctgtgtcctaa

SEQ ID NO: 75213 - DNA, 758 bp, Homo sapiens
tgggggaatcagagctgggcatccagttagacaagagagttagagtccccagggcagagagctggagagaagagatcttcagagacaattcgccagagacctgcagatcttgagttaagtcgagtgcagttcagcaggtcggtcctgcagggaccatgcccggggccagaggaggagccccccaaaaggatgagtgggagcagcaccccgtgtcacaagggctggaaacatgcccgtcgcgaaaagcccaagaatgcccttcttactcaggggccatctgttaggcttctaagatggctcttgcttcagtctcacttgacaaatcccaaatccactcctgataaagtctttcatcaaacagcaggaggcattcctcagcctgataaatgtagccyatggaaccccgaggcacaggggtggggtgcgatgttcctgctgggtggttgcctccaggcgcgtgcacaggtatgtggcagcacatctgtgtgtgtgcgtgttacgccccatgattgtagtgatgccactggctttcattcagctctgcatggctcattccagccctttctccccaattctctataacctcccactctgtctggaagatgctaacacccaccatcactgtccatgcacttagctgcttggttcctctgcgtgtgtagcgtggtttcagagttcttagtccacacctcccctggaaacaacattatcagccagagaacagttcttaggcccggtctttgtgcctcatggatccc

SEQ ID NO: 75214 - DNA, 758 bp, Homo sapiens
tgggggaatcagagctgggcatccagttagacaagagagttagagtccccagggcagagagctggagagaagagatcttcagagacaattcgccagagacctgcagatcttgagttaagtcgagtgcagttcagcaggtcggtcctgcagggaccatgcccggggccagaggaggagccccccaaaaggatgagtgggagcagcaccccgtgtcacaagggctggaaacatgcccgtcgcgaaaagcccaagaatgcccttcttactcaggggccatctgttaggcttctaagatggctcttgcttcagtctcacttgacaaatcccaaatccactcctgataaagtctttcatcaaacagcaggaggcattcctcagcctgataaatgtagcccatggaaccccgaggcacaggggtggggtgcgatgttcctgctgggtggttgcctccaggcgygtgcacaggtatgtggcagcacatctgtgtgtgtgcgtgttacgccccatgattgtagtgatgccactggctttcattcagctctgcatggctcattccagccctttctccccaattctctataacctcccactctgtctggaagatgctaacacccaccatcactgtccatgcacttagctgcttggttcctctgcgtgtgtagcgtggtttcagagttcttagtccacacctcccctggaaacaacattatcagccagagaacagttcttaggcccggtctttgtgcctcatggatccc

SEQ ID NO: 75215 - DNA, 518 bp, Homo sapiens
agtacccaacagaatttaatttagatgcttgtggtctattgaggctagctccgtactaatgttatatctgctaccagtgggagttttaccaatgaaacgctagtatctgccactttctaaactacatctcaatgaaaatgttgcctctgttgcgttcgctacatgcttacactsgtgaatcccagaggttgaggttacagtcagtagtttacaccactggtattacagctctgagcaaatatagctttatgtctacattgccacacatttacatctatgatattatattacttagagaaactgccatccatctgcatgtgtgataatgctccataatttttgattagtcaaaggagctttattcctcacaaatggaaaagaaggagaaaatataacagctttgtcagtatgttaagtagcttacctttcctcctatattttcccgctttcttttgtcccctgcaaacaacatctgttcactatatttttggtgtttctcacaaatagaaatgaataat

SEQ ID NO: 75216 - DNA, 543 bp, Homo sapiens
ctaccccaagaatcagcctatctagacctactaacagtgggtcagcagacactgccccaagaatcagcctatctagacctactaacagtgggtcagcagacactgccccaagaatcagcctatctagacctactaacagtgggtcagcagacactgccccaagagtcagcctatctagacctactaacagtgggtcagcagacactaccgcaagagtcagcctatctagacctactaacagtgggtcagcagacactrccccaagagtcagcctatctagacctactaacagtgggtcagcagacactgccccaagaatcaacctatttagacctactaacagtgggtcagcagacactgccccaagagtcagcctatctagacctactaacagtgggtcagcagacactgccccaagagtcagcctatttagacctactaacagtgggtcagcagacactgccccaagagtcagcctatttagacctactaacagtgggtcagcagacactgccccaagagtcagcctatctagacctacta

SEQ ID NO: 75217 - DNA, 543 bp, Homo sapiens
ctaccccaagaatcagcctatctagacctactaacagtgggtcagcagacactgccccaagaatcagcctatctagacctactaacagtgggtcagcagacactgccccaagaatcagcctatctagacctactaacagtgggtcagcagacactgccccaagagtcagcctatctagacctactaacagtgggtcagcagacactaccgcaagagtcagcctatctagacctactaacagtgggtcagcagacactaccccaagartcagcctatctagacctactaacagtgggtcagcagacactgccccaagaatcaacctatttagacctactaacagtgggtcagcagacactgccccaagagtcagcctatctagacctactaacagtgggtcagcagacactgccccaagagtcagcctatttagacctactaacagtgggtcagcagacactgccccaagagtcagcctatttagacctactaacagtgggtcagcagacactgccccaagagtcagcctatctagacctacta

SEQ ID NO: 75218 - DNA, 543 bp, Homo sapiens
ctaccccaagaatcagcctatctagacctactaacagtgggtcagcagacactgccccaagaatcagcctatctagacctactaacagtgggtcagcagacactgccccaagaatcagcctatctagacctactaacagtgggtcagcagacactgccccaagagtcagcctatctagacctactaacagtgggtcagcagacactaccgcaagagtcagcctatctagacctactaacagtgggtcagcagacactaccccaagagtcagcctatctagacctactaacagtgggtcagcagacactgccccaagaatcarcctatttagacctactaacagtgggtcagcagacactgccccaagagtcagcctatctagacctactaacagtgggtcagcagacactgccccaagagtcagcctatttagacctactaacagtgggtcagcagacactgccccaagagtcagcctatttagacctactaacagtgggtcagcagacactgccccaagagtcagcctatctagacctacta

SEQ ID NO: 75219 - DNA, 543 bp, Homo sapiens
ctaccccaagaatcagcctatctagacctactaacagtgggtcagcagacactgccccaagaatcagcctatctagacctactaacagtgggtcagcagacactgccccaagaatcagcctatctagacctactaacagtgggtcagcagacactgccccaagagtcagcctatctagacctactaacagtgggtcagcagacactaccgcaagagtcagcctatctagacctactaacagtgggtcagcagacactaccccaagagtcagcctatctagacctactaacagtgggtcagcagacactgccccaagaatcaacctatttagacctactaacagtgggtcagcagacactgccccaagagtcagcctatctagacctactaacagtgggtcagcagacactgccccaagagtcagcctatttagacctactaacagtgggtcagcagacactgccccaagagtcagcctatytagacctactaacagtgggtcagcagacactgccccaagagtcagcctatctagacctacta

SEQ ID NO: 75220 - DNA, 732 bp, Homo sapiens
acgtgtctcctagagcccttctagaatgttccatccagactagacgtgaaaagcatgatgttgagtagtggctgcaattcaccgcgtgttcagtctcgatgatgctctttcaggcattataaaacgactcagagaattgatgtgttcaatctccaccacactctcccaggtggtataaarcaactcagagaactcacgtgttcagtctccacgacgctgtcccaggtgttataaaacgactcagagaattgactattcagttataaaatgactcagagaatcgataattttggttcattgtgtttggttatttaaatttgttgcctccacatgaaaatttttgcccctactttgccccaaaccacttctgagacacatttaagtgtcagtctccagaacaggaagaaatcagcagcttctgtgtctctgaagaagacacaggattcactttcgtctcaggcctcataccccgctgtgggtggtgtgctccagtgccaactttctggaggacgatttgggggcacatacgagaaaggtttaaagtgtacaaaatgccaacccagagattgcacttccagaaatgtatccgcagaaaagaaccagacacatacacactttttgcaaatatagaattacaaaagccttcttgtaaacacgtactgttgtttgaaacaagtaggaattaaaaaaaaaaatcctggcttgtccaatgtagtggttatcagaactgat

SEQ ID NO: 75221 - DNA, 732 bp, Homo sapiens
acgtgtctcctagagcccttctagaatgttccatccagactagacgtgaaaagcatgatgttgagtagtggctgcaattcaccgcgtgttcagtctcgatgatgctctttcaggcattataaaacgactcagagaattgatgtgttcaatctccaccacactctcccaggtggtataaagcaactcagagaactcacgtgttcagtctccacgacgctgtcccaggtgttataaaacgactcagagaattgactattcagttataaaatgactcagagaatcgataattttggttcattgtgtttggttatttaaatttgttgcctccacatgaaaatttttgcccctactttgccccaaaccacttctgagacacatttaagtgtcagtctccagaacaggaagaaatcagcagcttctgtgtctctgaagaagacacaggattcactttcgtctcaggcctcataccccgctgtgggtggtgtgmtccagtgccaactttctggaggacgatttgggggcacatacgagaaaggtttaaagtgtacaaaatgccaacccagagattgcacttccagaaatgtatccgcagaaaagaaccagacacatacacactttttgcaaatatagaattacaaaagccttcttgtaaacacgtactgttgtttgaaacaagtaggaattaaaaaaaaaaatcctggcttgtccaatgtagtggttatcagaactgat

SEQ ID NO: 75222 - DNA, 592 bp, Homo sapiens
ccagtccggtctcgaactcctgaccttaggtaatccacccacctcggcctcccaaagtgctagggttacaggcatgagccactgtgcccagccaagactggataatttataaagaaaagaggtttattggctcacggttctgcaggctcyacaagcctggcaccagcatctacttggcttctggtgaggcctcggggagcttttactcatagagcaggcgtgttacatggcaagagagggaggaatggagagagaacaagatagaggggagatcccagactcttttaaacaacccgattttgcatgaactaatagagtaagaattcactcattgccgtgaggacagcaccaagccattcatgaggaatttgccccatgacccaaacacctcccactgggcccatttccaacattagaggtcacatttcaacatgagatttggaggaaacacacatccaaaccatatcatcctcctggtaacccttggtgtctgtatgtgtttcccactggatttagtagctctatttactctgtgaagtgatcctcaagatcttagggcccccctatcagcagacagcgctctggctacggt

SEQ ID NO: 75223 - DNA, 592 bp, Homo sapiens
ccagtccggtctcgaactcctgaccttaggtaatccacccacctcggcctcccaaagtgctagggttacaggcatgagccactgtgcccagccaagactggataatttataaagaaaagaggtttattggctcacggttctgcaggctccacaagcctggcaccagcatctacttggcttctggtgaggcctcggggagcttttactcatagagcaggcgtgttacatggcaagagagggaggaatggagagagaacaagayagaggggagatcccagactcttttaaacaacccgattttgcatgaactaatagagtaagaattcactcattgccgtgaggacagcaccaagccattcatgaggaatttgccccatgacccaaacacctcccactgggcccatttccaacattagaggtcacatttcaacatgagatttggaggaaacacacatccaaaccatatcatcctcctggtaacccttggtgtctgtatgtgtttcccactggatttagtagctctatttactctgtgaagtgatcctcaagatcttagggcccccctatcagcagacagcgctctggctacggt

SEQ ID NO: 75224 - DNA, 385 bp, Homo sapiens
cctccacctcctgggttcaagcaattctcctgctccagmctccctagtagctgggattacaggtgcccgccaccacacccggctaattttttgtatttttagtagagacggggtttcactatgttggccaggctggtctcgaactcctgacctcgtgatccacccaccttgtgatccgcctgcctcggcctcccaaagtgctgggattacaggcgtgagccaccgcgcctggcctcaactttgatctttttccttcctccctgtagttcattcctcaaaagaggtttgtaaagtaattgaccataatatatatgcttactgaactagtgctccatttaatttcgataaaacaattaaagcaaggaaaaataaaagtgacaagaaa

SEQ ID NO: 75225 - DNA, 2176 bp, Homo sapiens
ctgaactctgattcaacacactcctttaacttggaatgacacacaagtagaaataatcttcctgataagttttggtaaactgagactatcctagattgcttagcatgaattaatgatatcgtatggctttataaagggaagaatgaaaagaaggacaagaaagtctaagagttgatgttatggatagtgtatgtatgtttatgtgtgcagctacacgtgtctgtgtacacacggatgctgcacaattcaattacaaaagaaacaaacattttccttttcttgaatttagacscttactcctgcttaaagaagttcaatgttagcggtgcagccctggcagtattcagacactaactggaaaatttcacctggtcttgcaaaagctttaagagcagggctatcagagggttcccaagtacctgttttggtcagagggattgagaagagctgctgaagaagcttgttttctgacgttctcaggaccacaaccacatcggcagggagagtgtctctatttttctcaagaaccccagaagcatcatataatacctgtaacatgaatagcaaacggcaaattagccaagtcaactgtccgtcattggtgacactggcaacttgcctaaccagttgttaatcaacctctatatagaactcatctttacatagctttcatatccagagcaccagataaagggaataattatgatgttgacagaccagtttatcttaacttattgtctagttgctttggtttttgttttttatgggttttcttttgttgttgttttgtttttttctttcttgagatggagtcttactctgtcacccaggccggagtgcagtggcatgatcttggctcactgcaacctccgcctcccgggttcaagtgattctcctgcctcagcctcccgagtagctgggaccacaggtacatgtcaccacgcccagataattttttgtatttttagcagagatggggtttcactgtgttagccaggatggtcttgatctcctgacctcgtgatccacccgcctcggcctcccaaagtgctgggattacaggtgttagccaccgcacctggcctgtctagttgctttttgaagactactatcaaagataaatcacatcagaataattattaaaatatattagataccatgtgcaaagcatccatcctatgaggtaaacactattattatctccattttactggtaggcaggcagagacttaggaagaggctgagtaatgtgcccacggtcacacatttcacaagtggtaggtaggtatcaaaactcaggcagtttgactctatgctcacaaccactttaagtactctcactgcctccctaggtcctcatgagatctgagtgatcactcaaggatgctgagtagttcttggttctcagaacagaggggatccagttcagataaattttaaggaacaccctcagagaattccttctctacaaataagctttgaatggcaaatggatgcagcaaaggacacagaggccagaaaaaataaaaataaaaaaagtttttcccctaaaatcaagaaaggaaaatagtaagagtcaagaagacgggtgggtaggacatagttataaaaggacagagaggtgagaagaggaggacaggaatgggaggcagaaaagaggaatggggaggggaatcagggtagatgctggtatttcagactctgaggaggaccttaatatgctaaggtaaataaaatatttaagggcaaaaactgaattgcaatgtctaacaaagatccaaaatagataccataaagtactatgtggagagaaaaataatccccttcccttgtactagaatttcccaacatccagttaggaaaatcagttccaatgccatgatgtgaatatgaatgacaatttcaatacatctgaaattaataaaataatcaaaaatgtcttttattgaactcctaccaattttctggacctacagcctcagcagagcccagaggaaccaatcagccataattcaaatggctcctttgggagtaacataagcaaggaacttgtggttatgggatagggaatttcctgaatcagtcactaatctgcttcaggaacttgaaattgagactgaggcataatgtatgaaaagtggacatttcagttaagttgtaaaagcttaacatctgg

SEQ ID NO: 75226 - DNA, 2176 bp, Homo sapiens
ctgaactctgattcaacacactcctttaacttggaatgacacacaagtagaaataatcttcctgataagttttggtaaactgagactatcctagattgcttagcatgaattaatgatatcgtatggctttataaagggaagaatgaaaagaaggacaagaaagtctaagagttgatgttatggatagtgtatgtatgtttatgtgtgcagctacacgtgtctgtgtacacacggatgctgcacaattcaattacaaaagaaacaaacattttccttttcttgaatttagacccttactcctgcttaaagaagttcaatgttagcggtgcagccctggcagtattcagacactaactggaaaatttcacctggtcttgcaaaagctttaagagcagggctatcagagggttcccaagtacctgttttggtcagagggattgagaagagctgctgaagaagcttgttttctgacgttctcaggaccacaaccacatcggcagggagagtgtctctatttttctcaagaaccccagaagcatcatataatacctgtaacatgaatagcaaacggcaaattagccaagtcaactgtccgtcattggtgacactggcaacttgcctaaccagttgttaatcaacctctatatagaactcatctttacatagctttcatatccagagcaccagataaagggaataattatgatgttgacagaccagtttatcttaacttattgtctagttgctttggtttttgttttttatgggttttcttttgttgttgttttgtttttttctttcttgagatggagtcttactctgtcacccaggccggagtgcagtggcatgatcttggctcactgcaacctccgcctcccgggttcaagtgattctcctgcctcagcctcccgagtagctgggaccacaggtacatgtcaccacgcccagataattttttgtatttttagcagagatggggtttcactgtgttagccaggatggtcttgatctcctgacctcgtgatccacccgcctcggcctcccaaagtgctgggattacaggtgttagccaccgcacctggcctgtctagttgctttttgaagactactatcaaagataaatcacatcagaataattattaaaatatattagataccaygtgcaaagcatccatcctatgaggtaaacactattattatctccattttactggtaggcaggcagagacttaggaagaggctgagtaatgtgcccacggtcacacatttcacaagtggtaggtaggtatcaaaactcaggcagtttgactctatgctcacaaccactttaagtactctcactgcctccctaggtcctcatgagatctgagtgatcactcaaggatgctgagtagttcttggttctcagaacagaggggatccagttcagataaattttaaggaacaccctcagagaattccttctctacaaataagctttgaatggcaaatggatgcagcaaaggacacagaggccagaaaaaataaaaataaaaaaagtttttcccctaaaatcaagaaaggaaaatagtaagagtcaagaagacgggtgggtaggacatagttataaaaggacagagaggtgagaagaggaggacaggaatgggaggcagaaaagaggaatggggaggggaatcagggtagatgctggtatttcagactctgaggaggaccttaatatgctaaggtaaataaaatatttaagggcaaaaactgaattgcaatgtctaacaaagatccaaaatagataccataaagtactatgtggagagaaaaataatccccttcccttgtactagaatttcccaacatccagttaggaaaatcagttccaatgccatgatgtgaatatgaatgacaatttcaatacatctgaaattaataaaataatcaaaaatgtcttttattgaactcctaccaattttctggacctacagcctcagcagagcccagaggaaccaatcagccataattcaaatggctcctttgggagtaacataagcaaggaacttgtggttatgggatagggaatttcctgaatcagtcactaatctgcttcaggaacttgaaattgagactgaggcataatgtatgaaaagtggacatttcagttaagttgtaaaagcttaacatctgg

SEQ ID NO: 75227 - DNA, 711 bp, Homo sapiens
tcacctgcatgcagacccctcagcctgtcccttctagaatctcacccgaggagcctgtgcccacgggagaggcagacagtggccagcagggagggggctgtgtgttcacccctcagtgagctctttaggatctgcccccaaggtgttcaggtcactctctcctgccctggaagtctctggtccctggagatgcctccagagtttccaggaactcagtttttctgcacccctcctggactcatccccagggaccttgggaaacccaaagccagggccagcaccatcacgatgcttcagaccttagacagcaccccgccaatgctgcctgtcacagcagagatggactcagagaggcctagtcgttgctcaaggtcacaaagcaagcaggtggcagagaaatggagcctgggcttgtgactcactccccagggggcatctttctttgttcttycatgaatccctcgaggggagacccctttatccctggaccgccttgatccctgggcctctgggtgcccggccctgtgccgggggctgacgccaatgcaccggcccccaagtccttccgtgggtggctccagcatctgtctggactggagagggccagtcccacagtttctttttggaagttttttccggaaggcgtttggaggccagccagtgggtcttttccatcaccatggaaatttcctaccatagaattattaaaac

SEQ ID NO: 75228 - DNA, 734 bp, Homo sapiens
ttgtttaaccttcataacaactgttgagacagatgctatctttagccttatttaaagataagggaactaaggcccataggatgttggtaaataataaagataaggaaactgaagctcaaggagatgaagtgttttcaaagtttgcacagcaggtaaactaaggagataggatttagatctgaaaggtactatgtcctgcctccttccactgagaagcatgagaagtgcttcagaaacactcctctactgcctgccctccaagaaaccaaggcctgatacagtggagggagttcccaaagaaaaatcasgatgtgttccttgcgtagggaggtgagaattcccatctgagccagacagaatgagtgcctttgaatgggcataattgcccctggtggccatgggagtgcagctgatagtcctgaaactcccagggtgggacagctggggaaagggacatccattggaataggcagggccagcaagcagaagggaccagggtgttcagtggtgcaggaggcatggtgcctcagagaccatcaccctgcggacaaggatctgcaggtaggggccaggcctagttctgcatgctcagtcagcatcaaggaattcggttcacaagtggtgagagcagcgacacttaaggcattgtgttccttgggtggaaagtctgggaagctctgggcacactactagggaaaaggtcgagcagaagccccaaaacaaaggtccacaaa

SEQ ID NO: 75229 - DNA, 734 bp, Homo sapiens
ttgtttaaccttcataacaactgttgagacagatgctatctttagccttatttaaagataagggaactaaggcccataggatgttggtaaataataaagataaggaaactgaagctcaaggagatgaagtgttttcaaagtttgcacagcaggtaaactaaggagataggatttagatctgaaaggtactatgtcctgcctccttccactgagaagcatgagaagtgcttcagaaacactcctctactgcctgccctccaagaaaccaaggcctgatacagtggagggagttcccaaagaaaaatcaggatgtgttccttgcgtagggaggtgagaattcccatctgagccagacagaatgagtgcctttgaatgggcataattgcccctggtggccatgggagtgcagctgatagtcctgaaactcccagggtgggacagctggggaaagkgacatccattggaataggcagggccagcaagcagaagggaccagggtgttcagtggtgcaggaggcatggtgcctcagagaccatcaccctgcggacaaggatctgcaggtaggggccaggcctagttctgcatgctcagtcagcatcaaggaattcggttcacaagtggtgagagcagcgacacttaaggcattgtgttccttgggtggaaagtctgggaagctctgggcacactactagggaaaaggtcgagcagaagccccaaaacaaaggtccacaaa

SEQ ID NO: 75230 - DNA, 547 bp, Homo sapiens
taaagccctgaaggaaaaaacaaacaaaaaaattatttccaatgattgaccttagtctaaaatccaaagtgtagaacctaaaaacaatatatattaccatgactattggtcattatacagttttttttacatgcttttgtgactagacacgatacagaagttgctagaaatattgcttagtataagagatataaataggtaatagaattagacctggaaagtgacaaagawgatagaatgggtggtcaagggcattaacaaatggtcttatcaatatactcatgttggagactatagagaaaaccatgaaaagcagagaaagagaaggttaaaaacacacacataataaactataattgaaacatataatatctgagattaaaaaatacaatagacatattaacagaatattagacattgtagacaaatacataaatttgaaaacacagaaattaaattattctaaatgaaacatatataaataaaagactaaaaaaattaagcacagcattaataagctctagaaaaacaccaagttgcttactat

SEQ ID NO: 75231 - DNA, 751 bp, Homo sapiens
tcatttttcaggaaaggaaattgaggtgttaagagttttgaacaactttaccaaatagatagctcattaataattagagttgaaaggtttatgatacccaagtgtgttttatgcacatataatttttgtatattagttgtgtcagagtctaatcaaaatcaaaatcaatagctgatcaggaaattgggaaataggaaaatagagaaaggggggaaaataaaatggtgatcacttgtggaatcactgaagatagattggaatccaaattgttttcttccactttgaggttttcagctttgattatgaggggattatgagtgaaagttgaaactttcactgtgggtctgataattcacataattgcagagtcaaagaagctgaaggaggagattcagcaggagctggacttccaacrgatcttctgggtctaataagggggaaaaaatgggaattcagagggtaagtggcaatcggcgtcagctaaaacatttttgccctgccccatattggaagtgtaagagtttggctatttcatttgcacctaccaaatctcacagaaaatgtcccttgtaactacgtgaatttagacatacacagggcaaggaatattggaaaaatacacacccaacttagctatgctgacacactgtaaacctactacagtccacgtatatacaagtctgtgggcttgtatatatcccacgtatagcaatgtttaacctccaaataaagacatgggtacaatcatacc

SEQ ID NO: 75232 - DNA, 1203 bp, Homo sapiens
acaatttttatttgtcagwtagagctcgtttggaggttccagcaggggagtgcagctccttgtatacccttgaccgaagacccgtcctccatcagggatggtcatcctctacgactgagcatgcagcttcaggaggggctcacatagagtggtgagggaggaaggggacacccgcctagccagccagatcagccgaatcaaccctggcgatcaatggggtgacagatttcgcagccagatcgccctcacatcctatttgtcagttaaagaaataaaaaatgttaaaaaaaagaaaaccagtacatagtgttttcaattttatgatattaaataccatgcagtatatgtcaggtagtttggcttcataagaaggagggataatcttgataattacacctgtgccacttgaaggaaatattctgagcattagagcaagtggagtctcttatattccagctggtgagaatcatgctatatttcagtttccttaacttctggaccatgacttcctgatatgtagtttttgttttttctgtctatttctaattcctttccctttttgttagcgtcagaggaaatagaagttattgattcctgtctcttgaatctcattatttaaaaaatcattttacaactcattatgcaccaacattttggtcccttgtgcctactcaggattgaaagtatgaagttttgccggtttttttttttttttttggtcgttcacaattactgtttcctcaaactgccatgcttcttctagaactgatagtgctttgtttcctttgatgatgagaagcctttcccttcagggtgaggacttcggggctgaagatgtactttgcagcagttcccttctgtttcttcataccacagatgtagaggaatgtggcatttatgggtcctggcccttggtggtaacattttacctgtagagcatcggaacattgaagactgagaatgtgaatcattcttagaatcattttctacataaagtcctgaattggtgtttttagaatccagtgaagcagtcattcttttaacagtcaccagcattccagaaaagtcatgaaaaattcaggcacagaattgtagagtaggctgggtccttccaggtcaggtaatttttagtctttgatttttcagataagggcaccgagtcacacataaactagacctcagcaatttgcccagtcacaggat

SEQ ID NO: 75233 - DNA, 1203 bp, Homo sapiens
acaatttttatttgtcagtkagagctcgtttggaggttccagcaggggagtgcagctccttgtatacccttgaccgaagacccgtcctccatcagggatggtcatcctctacgactgagcatgcagcttcaggaggggctcacatagagtggtgagggaggaaggggacacccgcctagccagccagatcagccgaatcaaccctggcgatcaatggggtgacagatttcgcagccagatcgccctcacatcctatttgtcagttaaagaaataaaaaatgttaaaaaaaagaaaaccagtacatagtgttttcaattttatgatattaaataccatgcagtatatgtcaggtagtttggcttcataagaaggagggataatcttgataattacacctgtgccacttgaaggaaatattctgagcattagagcaagtggagtctcttatattccagctggtgagaatcatgctatatttcagtttccttaacttctggaccatgacttcctgatatgtagtttttgttttttctgtctatttctaattcctttccctttttgttagcgtcagaggaaatagaagttattgattcctgtctcttgaatctcattatttaaaaaatcattttacaactcattatgcaccaacattttggtcccttgtgcctactcaggattgaaagtatgaagttttgccggtttttttttttttttttggtcgttcacaattactgtttcctcaaactgccatgcttcttctagaactgatagtgctttgtttcctttgatgatgagaagcctttcccttcagggtgaggacttcggggctgaagatgtactttgcagcagttcccttctgtttcttcataccacagatgtagaggaatgtggcatttatgggtcctggcccttggtggtaacattttacctgtagagcatcggaacattgaagactgagaatgtgaatcattcttagaatcattttctacataaagtcctgaattggtgtttttagaatccagtgaagcagtcattcttttaacagtcaccagcattccagaaaagtcatgaaaaattcaggcacagaattgtagagtaggctgggtccttccaggtcaggtaatttttagtctttgatttttcagataagggcaccgagtcacacataaactagacctcagcaatttgcccagtcacaggat

SEQ ID NO: 75234 - DNA, 969 bp, Homo sapiens
ctcttttttttggcggggggacatttttaaaattactgattcagttttgctgcctgttattggtctgttcatggtttctatttcttcctgatttaatatagaagggttgtatattaccagaaatttatctatttcctctagatgttctagtttgtgcacgtaaaggtgttcatagtagccttgaatcatcttttgtatttctgtggtattggttttaatatgtcaccttttttcttttttttttttttttgggaaatgatattaatttattatttcaatacacatttaaataccatccttacgtgtagctgtctcatccactaatatataaggaaagaatttcttcctggggcagtttttcattaaaaacaggttctctttgaatcagatggctatgaatgtcagtttgccatattatctstacttgtttaatatttttctttttttttttttgatttatttatggtgtttttttttttttttattatactctaagttttagggtacatgtgcacattgtgcaggttagttacatatgtatacatgtgccatgctggtgcgctgcacccactaatgtgtcatctagcattaggtatatctcccaatgctatccctcccccctcccccgaccccaccacagtccccagagtgtgatgttccccttcctgtgtccatgtgatctcattgttcaattcccacctatgagtgagaatatgcggtgtttggttttttgttcttacgatagtttactgagaatgatggtttccattttcatccaatatgtcaccttttttctatgagccatattacttccaattctagaagcatcattcaactcttacagctacttagagatgctgaaccaggttcccaagccagaacaagttggagtatttgtaccaacttgttttatttcacaccaaaatattttgccattgataaagtatacatcaaaatgtctttagttta

SEQ ID NO: 75235 - DNA, 969 bp, Homo sapiens
ctcttttttttggcggggggacatttttaaaattactgattcagttttgctgcctgttattggtctgttcatggtttctatttcttcctgatttaatatagaagggttgtatattaccagaaatttatctatttcctctagatgttctagtttgtgcacgtaaaggtgttcatagtagccttgaatcatcttttgtatttctgtggtattggttttaatatgtcaccttttttcttttttttttttttttgggaaatgatattaatttattatttcaatacacatttaaataccatccttacgtgtagctgtctcatccactaatatataaggaaagaatttcttcctggggcagtttttcattaaaaacaggttctctttgaatcagatggctatgaatgtcagtttgccatattatctctacttgtttaatatttttctttttttttttttgatttatttatggtgtttttttttttttttattatactctaagttttagggtacatgtgcacattgtgcaggttagttacatatgtatacatgtgccatgctggtgcgctgcacccactaatgtgtcatctagcattaggtatatctcccaatgctatccctcccccctcccccgaccccaccacagtccccagagtgtgatrttccccttcctgtgtccatgtgatctcattgttcaattcccacctatgagtgagaatatgcggtgtttggttttttgttcttacgatagtttactgagaatgatggtttccattttcatccaatatgtcaccttttttctatgagccatattacttccaattctagaagcatcattcaactcttacagctacttagagatgctgaaccaggttcccaagccagaacaagttggagtatttgtaccaacttgttttatttcacaccaaaatattttgccattgataaagtatacatcaaaatgtctttagttta

SEQ ID NO: 75236 - DNA, 560 bp, Homo sapiens
ccagtgaacttgtgacctctttttggtgctggatggacattccacattttcacattccattctcactgactcacggcagcttgtacccttctttccaccctgttgcacaagctgtgtggcatggtgttttgccttacacatcattgtgctagagtttatactcactgtagcaaaaataacctttaaatattaacccaaaattggaagcacacctgtgaacaattggctggctgtacaacagggagggaattaaggctagtgktaatagcacaaatattctaaagtgaggttgaacaagttcttttaaaacattaagataaatatcaaatggccaagggacaaatagttctcatattgaagcacagaaaaaaagtaaaatttttaaaatttattttctaagattagcataaactggtaaagacacacacacacacacacacacacacacacacgtacctatagaccaattcggtttgtgaatacaaaattgtaagttttaaattaaattctactggatcaatttcagttgggtattgaaataaaataatgcatcatggcca

SEQ ID NO: 75237 - DNA, 597 bp, Homo sapiens
ggatccaacaatgttagcagtggcaaggaagcttgtgactagttcttagacttggaaactgaggcttcttctgaacaaattgggaaatcatcaccatgataaatggtaactattataacccactactctaaacatttctgatagcaggaaatatatcttctgtatctttgtatcttagttatctttgtttcctcaatacataatcaggctcagtagatgtttgttgatctgtgtgccaaacttggccagttcaacacatgttatcttcctggagtgggtacttcagatgtaaccacactgagtgctaccctggttcttacaaagttggatgacagatgcaacaaggaggaatatgctttgggacaaagataatcttttttgttaattactttttctgattaaatgcaggcatactggaaraggaaggaagatgtaagaaataaatggttttactgcagatgagattaatgaaacaagatttgaatttctaaaccatggcctacgaactacatttcctttttgattaggttacttgcttggctgatgaggaaatacagtagacagtgtatctctgggttttagccagacatttaatag

SEQ ID NO: 75238 - DNA, 1062 bp, Homo sapiens
atgccaaatcgtgttacttccttattgaaaatcttggcaatgacacttttctttacatatttcctttgtctggtttttcggcaaaaaagacaaaccaatgacttgggtagaaaccaaccactagaaaataactacagaactgcacaggaatgtggaaagtgcccatgtgcatgcaaatgagctataagcaggccacttaactgctcaccatgtcattgggccacttccagccttctgcagctttctctcttccctgaggcaagatgctaataatgtgtgtgaccccagagctactagacaaatgcccacctgcctccgggtacaacatgcacatggggacataatcttgcaaaacattctgayattatagtgatcaaacaacaacttcaggacagtaggcagagtgagaattgtagccctagctttggaatttcaatgcaattgaacagcggcttactaggcctttactatgtgcaggtgcaatggataccgagatgaatgaggcaagatgcgtgaactctagcggccttggaagaagacacagccaaagcttgcattttgaagtggtaaagatgaaccaactgtgagtgagctctgaagcctctgagaaaggagctgcctgcctgggggatcccatcctggtatgtgtttcaagatgcagatgacgccacaccttctgacagctgtggcttcaaaaatgttccttttcacagtttgacattctccccaccccagtggtctggagagtgaacattattatgccttctgatcagtgtttttaaagaagcctccagggtgactcagatgaagttgggcagtgtgcttacagttcttgccagtgatgaaaagtacaaacagagctttctctgaacctcagggccaaggaaaattaagtgcagaaggacacgtggcccttcacagtacacatgagacagacaagccaccacctcagaaagacagttttaaacagatgtggggactcttcttatcagaacatccctcagtccctccatgtagaaatctgctatcggccacaggcaggccccaacctgctatggggat

SEQ ID NO: 75239 - DNA, 1188 bp, Homo sapiens
caaagtgtgatttgcttactttgtctttagaagtaagcaaatcaggtgatctaccttcaggatctgaaaaatatacacctgggccatcattasaagaaacccactgccatgcataaataattaaaaagaagacattgcctagctcttttcaagtgattagggccaaaaactgccccaaagtgtcaggagttgtttgtgtgtttggttttctcacacgcgcattggattttgcctgtggtcattctgccaccccttaagatctcttaaggaattaaaatgaggcatcgttagatttcattttgattttatattcaacgacaaggtcttcacaaggtcactattaatggggtgccacagtatgcccccaaaccatattttttgctgaaggttgatttcttaccttaacaacgtattttttatttgttttaagatgagtaccgttgacctctgggatattataattgaaagaatacatctgcttatttaggaaaatgtgatgtagtaaaccaaaggaattaagttctgggccatatatttaattaatggtttacttaacaaacagagatttgtttctgaggcaattcaaccaaatctggccaatgggcattttcaaggcattgataaatgtactctgaaccaacagacgtagctctcctgagaaacaggtctgaaacccatgacaaagagcaagtcaaacaaggtagtcaaataaattctgtcctcttctatcttctttttaaaagactgaaattttagtttaaaatgagtccaaggagggagggaaataatctggggattttggggaaaattgcccttgagcaaatccccagattttaatttccatgagaagtaacaagttctcttaagaaaggcagcatgcataaaatcactttctacattcctgtcttgcattattctccattgggtattttttatgtatttatatacacttggaatatatgcaatgatccatatgtatgctaatcaaagttcttggaatgtattactctttgctctttcgtaaataaaatagtataaattgggagcatattttgtctctgtaaaaatgccaacaggtaagccggccctagagaaaaatggaccaaatcaagctctgccagagctctggagtttaactgaaagaaagaacatctgattcctgcccagaaagcaacactgaacacctca

SEQ ID NO: 75240 - DNA, 1188 bp, Homo sapiens
caaagtgtgatttgcttactttgtctttagaagtaagcaaatcaggtgatctaccttcaggatctgaaaaatatacacctgggccatcattacaagaaacccactgccatgcataaataattaaaaagaagacattgcctagctcttttcaagtgattagggccaaaaactgccccaaagtgtcaggagttgtttgtgtgtttggttttctcacacgcgcattggattttgcctgtggtcattctgccaccccttaagatctcttaaggaattaaaatgaggcatcgttagatttcattttgattttatattcaacgacaaggtcttcacaaggtcactattaatggggtgccacagtatgcccccaaaccatattttttgctgaaggttgatttcttaccttaacaacstattttttatttgttttaagatgagtaccgttgacctctgggatattataattgaaagaatacatctgcttatttaggaaaatgtgatgtagtaaaccaaaggaattaagttctgggccatatatttaattaatggtttacttaacaaacagagatttgtttctgaggcaattcaaccaaatctggccaatgggcattttcaaggcattgataaatgtactctgaaccaacagacgtagctctcctgagaaacaggtctgaaacccatgacaaagagcaagtcaaacaaggtagtcaaataaattctgtcctcttctatcttctttttaaaagactgaaattttagtttaaaatgagtccaaggagggagggaaataatctggggattttggggaaaattgcccttgagcaaatccccagattttaatttccatgagaagtaacaagttctcttaagaaaggcagcatgcataaaatcactttctacattcctgtcttgcattattctccattgggtattttttatgtatttatatacacttggaatatatgcaatgatccatatgtatgctaatcaaagttcttggaatgtattactctttgctctttcgtaaataaaatagtataaattgggagcatattttgtctctgtaaaaatgccaacaggtaagccggccctagagaaaaatggaccaaatcaagctctgccagagctctggagtttaactgaaagaaagaacatctgattcctgcccagaaagcaacactgaacacctca

SEQ ID NO: 75241 - DNA, 1188 bp, Homo sapiens
caaagtgtgatttgcttactttgtctttagaagtaagcaaatcaggtgatctaccttcaggatctgaaaaatatacacctgggccatcattacaagaaacccactgccatgcataaataattaaaaagaagacattgcctagctcttttcaagtgattagggccaaaaactgccccaaagtgtcaggagttgtttgtgtgtttggttttctcacacgcgcattggattttgcctgtggtcattctgccaccccttaagatctcttaaggaattaaaatgaggcatcgttagatttcattttgattttatattcaacgacaaggtcttcacaaggtcactattaatggggtgccacagtatgcccccaaaccatattttttgctgaaggttgatttcttaccttaacaacgtattttttatttgttttaagatgagtaccgttgacctctgggatattataattgaaagaatacatctgcttatttaggaaaatgtgatgtagtaaaccaaaggaattaagttctgggccatatatttaattaatggtttacttaacaaacagagatttgtttctgaggcaattcaaccaaatctggccaatgggcattttcaaggcattgataaatgtactctgaaccaacagacgtagctctcctgagaaacaggtctgaaacccatgacaaagagcaagtcaaacaaggtagtcaaataaattctgtcctcttctatcttctttttaaaagactgaaattttagtttaaaatgagtccaaggagggagggaaataatctggggaytttggggaaaattgcccttgagcaaatccccagattttaatttccatgagaagtaacaagttctcttaagaaaggcagcatgcataaaatcactttctacattcctgtcttgcattattctccattgggtattttttatgtatttatatacacttggaatatatgcaatgatccatatgtatgctaatcaaagttcttggaatgtattactctttgctctttcgtaaataaaatagtataaattgggagcatattttgtctctgtaaaaatgccaacaggtaagccggccctagagaaaaatggaccaaatcaagctctgccagagctctggagtttaactgaaagaaagaacatctgattcctgcccagaaagcaacactgaacacctca

SEQ ID NO: 75242 - DNA, 1188 bp, Homo sapiens
caaagtgtgatttgcttactttgtctttagaagtaagcaaatcaggtgatctaccttcaggatctgaaaaatatacacctgggccatcattacaagaaacccactgccatgcataaataattaaaaagaagacattgcctagctcttttcaagtgattagggccaaaaactgccccaaagtgtcaggagttgtttgtgtgtttggttttctcacacgcgcattggattttgcctgtggtcattctgccaccccttaagatctcttaaggaattaaaatgaggcatcgttagatttcattttgattttatattcaacgacaaggtcttcacaaggtcactattaatggggtgccacagtatgcccccaaaccatattttttgctgaaggttgatttcttaccttaacaacgtattttttatttgttttaagatgagtaccgttgacctctgggatattataattgaaagaatacatctgcttatttaggaaaatgtgatgtagtaaaccaaaggaattaagttctgggccatatatttaattaatggtttacttaacaaacagagatttgtttctgaggcaattcaaccaaatctggccaatgggcattttcaaggcattgataaatgtactctgaaccaacagacgtagctctcctgagaaacaggtctgaaacccatgacaaagagcaagtcaaacaaggtagtcaaataaattctgtcctcttctatcttctttttaaaagactgaaattttagtttaaaatgagtccaaggagggagggaaataatctggggattttggggaaaattgcccttgagcaaatccccagattttaatttccatgagaagtaacaagttctcttaagaaaggcagcatgcataaaatcactttctacattcctgtcttgcattattctccattgggtattttttatgtatttatatacacttggaatatatgcaatgatccatatgtatgctaatcaaagttcttrgaatgtattactctttgctctttcgtaaataaaatagtataaattgggagcatattttgtctctgtaaaaatgccaacaggtaagccggccctagagaaaaatggaccaaatcaagctctgccagagctctggagtttaactgaaagaaagaacatctgattcctgcccagaaagcaacactgaacacctca

SEQ ID NO: 75243 - DNA, 1520 bp, Homo sapiens
tgtttatttgtggcatggctacatttctttcttttagtctatggaatatgattatttctatctctcccctccttcttttttttctatcttagtaaaggtcatttcttctttctaacataacatttattacatatcttgacttatatctttctacctgttttccaatgtattaagataggaagtaaatatatatatataatactatatatagtacaatttaaatagcatttatttaatatatatatgtatgtgtgtatgtgcatatatacacacatatacactatatatagtattaaccaggtggaactatctacatcacttacagaactatctgtacccactaacaggtatagagcttgtccatgagtacatatccatcgatggttcaagtcttttcttcctaccccacattgtgctgttttctacaggggtttsacatcttctgtaggaccaacatagatggtgtctgttagcttgtggctagcacaaccacaataatgtgggcttttgcttattggggctaaaaagtattaaaataattgtacaatgtaaagaaatactacacaaattgttttggccagaacaccaaataaagtgataagtgaagtttgagggcttactttaaaaattaacatacatggcataatttatttgaataattaaagcccccttattagctacttggtcaagttgactttccaaagaatgcatacaaatagacactttgtgcaaacaaatatctctaagaagaatgaaatactctttcagcaatgagatttgccctatgtgttgtaaggagacagactaatctcattagtgcatcacatgaactatgtgtacaaatgtgcatttggtacatttctgtatttctcttttaattctaggctggtggtccccatagactggtaggatcatacacagactatgctagccattgaaatggcttttggttaggctactgtctttaccgtcattagagatgacattttaatgggcccactaatttcaacatatgagtaacagcctattttctgcaatatgaaaattgataatatcagaatgcttttttattctcaagttaaatacctttagttacagcatttttattcacaaacagaagaaaatagaaactgcaggaaaataatttcttatgtgtccatagaattattctcggggaccagtaagagtttgggtatatttgtatatttgggtatatagataatgttcacctctgaatattatatatatgctataaaacacaaaagggtaaatgaatggcaaggtatgaaagtattttaaagaatctggtttgtaggcgtatataacacctcctacatcctactatttggaaagaacagatgaaatataacctttaataccgcttcactaacaaaacccctgggtttttaaccttttagaagtgtcagtgtttcccttgatcaacttgactaacttcaaaaggaaaccatagtccaactgcagtttccatagaaacataccattttataagatgcatctat

SEQ ID NO: 75244 - DNA, 1892 bp, Homo sapiens
agggggtgagatggaggtttcagatgtccgtctatgctgtgagagagatgaagacagaaaaggtgagaagctgcaacctgagcttggtggggagggtgagacagggggttaagaatgcaacattagcaataccattaaagtactctctggctacttctgtacttcctttttattctctgtctttcaagtcaaggtctgagtatgaatgcgaccaaaaatgcaaggacttcaggctgttaggggtggaatatggatttattttctacgtatttgcagctagcagtctaaataggaaattactcataaaacttttcattttgagttatcccagtcaataatgtatttcttttaaaaaataaaattggttagcattcattccttgggagtttgtttattcaaaatgtaaaagtgggttaaatttcacgtaattgcacaatatgctgattctttacagtgtattaattgcaaattgacatcaacttaagtgataaacttaaaaaaaaaactgtctctgaacaatggcaatgatggattaatagcttccttagcagagcagcatgatgccagtcttaatgcataagagggtgcctgcctgatgtaaagggattaggaatcaaggacccacaggtgaagtatgtggtcttaggcatcttggattcttgatctgtgaaatgaagaggctgagcttcaggatcacttgattctctcccagttttctcatcctacaatttaaagcattctaagtggggctataaagtttcctaaattgtggactgtgaactagcggtggttctgggaagatgaaggtggaacatttgataatactgaatcatagagttagagagtaaaatctaacgtttcaatccccttgatagatcaaggaggccgtctcagtttggtgctaattcttttcaacaactctctcaacaattgtcaatttcctattttattttatttttgagacagagtctcgctctgtcatccaggctggagtacagaggcacaattttgactcactgcaacctctgcctctcattttcaagtgattctcctgcttcagcctcccaagtagctgggattacaggcacgtgccaccacatccagctaatttttgtatttttagtagaattggggtttcgccatgttggccagcctggtctcgaactactgacctcaagtgattcacccgccttggcctcccaaaktgttgggattacagacttgagccaccactcccagcccaatttccctttttaaacaaagagagtgcagacaacattgtctagctaggattttaaacatttattcttaagaattatttcattatcattgaatttattttatgattaccttctatttatagcaagtattactggttttcacgtggcaatataaagttttattttaaaataaggttagttaataaaaagtagtgacttgatgtaaagaaaaagattaagcatataatgaaacaggtggtgcacagatatggcaacaggcatcagggttgtagacgatgactgaagtttgggaaatgccaccaaaggggaggaaaatgaagaaagggacaattaggtcttataccttaaatgggagagggtcttgcaagaaacagggaaagaaattcagggcttaaaacataattatgcatcaataaactggctctttcagaaaactttcattaagtggatgagatagcaaggaagacatgtttaactagctggtcagaaattgtgcacttgcttttctagttggatagactctagcaggtaacacaatagagtcccaaggggtcaacttgatatccgggggccaggatgtaaaggccccattccccatcccccaacacacaccccaggtgtctcctctacatcatcaaagacccagaagcc

SEQ ID NO: 75245 - DNA, 2452 bp, Homo sapiens
catgccatatttttatttaggtatttatttatgtagttatttttgataatggagtaagcacacacaaacttaccattcaaagcaaaagccaggatcttgacagtatcttacatctaactttatgatcccgccctcctgcctaccctgcccaatctcactatcatcctgaatgctgtgttcaccatgtccttgctttcccctctatatagttttagtacaaccagatgtactcctgaaaatattattttaaatttttagtttaaaaatttattaaaagaatatacagtgctataggtactcttttgtgactttttctttaatattatgctgctaagatttatccatattgctgcttgtcwtcgtgttcattcattttgactgttacatgctattccattgtaggaatattctctgtgcctaacactcagtgcctttacctcatttgctctttgcagcaaccctatatggtgggaactcttatcccagttttactgacaggaaactgaggcctagcaaggttaaacttgccagaggccataggagccaggttggaaactttccacctcccacagtgcgctgtgttttggtgctctggagaaaacacaggcattggagccagaatctcagggctcaagccccagctccacacttactggttgtgtgaccttgggcaagtcgctgtgtgtctctgacctcaatttcctcaacatcaaagtggggtgatcataactgccctccctacctccacaggcctgttgtgagactcaaggctgatgatgctgttgagaagcaggagcaccctgtatactgaaattttataaatcagtaaattgtgattaatataaatgtgccatcctcttacctcccacttccaatcaaacaatggaactcatttagaattcagaagagactgaatagcacctcattcagaaaagcaaagcattaggtggacaatcggcttgcagaaaactcagtgtgatcaaggaatcagaaaatcatcagcagatgccacaggctacactaataggagtatgtggttggctttgttctattcaatagagtttaaaaattattttttactatttctgacctatttgcaatatctgagaccctaccctggtgctgtttgtttgcggcatttcctctgcataatctgttctccaactgctacctcctggtagctgtgtgacattgggcaagtgacttctctgtgtctgtttccacatctgcaaaatttggataataataatacttattcctcacagggctgttgtgaggatccagtgaggtgttacataaagtgcttagagaagtccctgatgcatgccaagctgatgatatgattattatctaaaatctcccccacaccccagaaagtgcttgcttatcctctgagagttggtttagatgccacttcctccgggaggctgatccagccttcctggacaggtgagattcccctgttctatgcgccagagtagatgacttgttcgatgtccactgtgaatccatgaggactgagatgatgcctgacttagtatctgcccagtgttcagcacagtaatgggtacacagcaggtgcactggggaggggctaagtgacaacctggaattcatagaaaggaccacagactaggaaggccccatgaatcctgcctctgacaaatgtctccaagaacagaagggctctttgggagtgggagaagagaaggggtggagcagatgtgctacctggggagctggggccttggggagcagacatggatcaggagtgacagttccaagaccacaatattaggtttggtgtatagaagaactttccagcaatctgaactaagagaggcagataggtgtccctttcaagagggatggagcccaggtgggatagtccctcctcaggaaggctagggaggagtcagtacagtaggtagctgtggcattgtgaacccaggtgagatgtatccaacatcaaacttgggatttggcttccctcacccaggcaggtttcatcatttcaccaagcctgttttctcaatgtaagacagagataataacagtgcttacctcaaagggttgtggcaagaagaaagggagacaatgtatgaagactgtatgcatcatgccaggtacatatgaatcatgcttgtaagggttcattatgattactaatgttgctgcggttgtcagtgatgaaaggaaatcacccagggcctagattagatattctaggtgggaggctggaagctgagctcagatggccactctgactatctgcccaggtaggaagtcttccctcctttccttccctctcacctgcagaaacctttcagtgttaaacctggatttggttctgggccaggcccccatgaacctgccccacaggaatccacccctgaataggctctaggagaccccggggtgattcctgcctccatcattggggttgaggatc

SEQ ID NO: 75246 - DNA, 733 bp, Homo sapiens
ggaaggctcaccattttatggtggaaactgcttccaggagagaggaattgaaatccatgacactgacaagcagggcatttgaaattggcctccctgtcacccacccacaggccgaacatctgcctgctggggctgccaaacacacctcatcaaacttccaggtaaagggccatcagctttggagacagttttcatgtttctcccgccagggagataatgcttcatgctgagatttgaggactggcaggggaattatctatctatgtatctatgtatctatgtatctatgtatstatgtatgtatgtatgtatgtatgtatgtatctatctatctatctatctattttttaaaatttattgtcctgtggaataaagtttttagactgtgtgtgatcctagtctttgccccctggaggtcacctgtgtgtcagaatccccctaagcacgtgacaccaaggagagaacacataactgagctcagtgtttaccttggtattaggactgggtcatggcccaaggctcctagtcgccaaccttccaggcctttccacaacgagccctggagtcagcaggaagccagccaacaggcttctgcaaaggaacttttaaaggtagtaaaaagccaatgaggacaaccacaattccaagcaacacttggagtgggagccataaaaccagcccgatgaaagagagctgttgtgttttagtgttaacatcacttatgggggaatgg

SEQ ID NO: 75247 - DNA, 671 bp, Homo sapiens
ggcaggtgggggctctgcgtggggagctcatgcagtggacagaacaccactgctggccaggagcccgccaggcctgcagtgggggagtccgtgcctgggggtgggactgaggtgggctggagggtccckgatggggccagagccacagcgtggagtgaggaggtgggagccgcagaggcgtgcccagttgagtggtagaggcagcatttgggcctccttcatgctcaggtgctcagctccttcccctgaggggcaggaagtcagggaggagggagtgagaggtgggaggtggcaggcgggcggaggggaagatgtcctgtcccaagagccaggggtgccccaccccacggtgacatgttcctgaacgggttgtgagtggagggctcagttcctgggaactgcctcacctggactgtgggcgggaggcagctcctggccccgtgcccgccccctcgggcctgttcccctgccaggatctgggatggttcacaccccactggtctgtgatgcccagtgggcagcaggcatgcccctgctgggctggcccacctcccgatggcaggtccgcccccaggatcacggaagcagctagatccactcagtcgtgggtggatgtcaggccaggtggggctgctctggtgggtgagctcatggggttccctttcagaacg

SEQ ID NO: 75248 - DNA, 599 bp, Homo sapiens
cttttgcataaagaacaggtggagagaaaatgaggccaagggctagccccggctctgccaaagacggtgcagcccagggaccctgagtgggatggagggcctgggtaaagccttaccccrgttctgggggcctcaagggagggcccaggttccgggggccatgggtgggaaggggaaggacccgggtaaggccttaccccggttccggcgcagccgtccccagtggtaataacactcctcgtcccggatgcagcggcctgaagaggacacgaggtactcggtgccacagcggcagcaggtcctgcaggaagctgtgggtggggacccaggtggaagctgaggctcacgctggggcccgcatgcccggccttgcccacatcccgcacctgcccacctaggccgtcgcaggccagcgactcacagtccttgggcctcttctcctcagctgtgaagatgattgcgcccccgggccgctctgggtgcgggaaggggtagccgttctccttgagctggtcctgggtgagcaggtactccctgaggcggctgtacagggcagcccctgtggacaggcacagtggtcagcccctgcctgggatggc

SEQ ID NO: 75249 - DNA, 599 bp, Homo sapiens
cttttgcataaagaacaggtggagagaaaatgaggccaagggctagccccggctctgccaaagacggtgcagcccagggaccctgagtgggatggagggcctgggtaaagccttaccccagttctgggggcctcaagggagggcccaggttccgggggccatgggtgggaaggggraggacccgggtaaggccttaccccggttccggcgcagccgtccccagtggtaataacactcctcgtcccggatgcagcggcctgaagaggacacgaggtactcggtgccacagcggcagcaggtcctgcaggaagctgtgggtggggacccaggtggaagctgaggctcacgctggggcccgcatgcccggccttgcccacatcccgcacctgcccacctaggccgtcgcaggccagcgactcacagtccttgggcctcttctcctcagctgtgaagatgattgcgcccccgggccgctctgggtgcgggaaggggtagccgttctccttgagctggtcctgggtgagcaggtactccctgaggcggctgtacagggcagcccctgtggacaggcacagtggtcagcccctgcctgggatggc

SEQ ID NO: 75250 - DNA, 586 bp, Homo sapiens
gagtctccctcctggagacacctgtcaatgtctggacacagttttgggtgtcaccactggggactgggtggaggctgcttagcaccctgcagtgcccaggacagacccaccccaaagaatgatcaggcccaacatccacagcgtcgaggttgatgtcagcttttcaacatattctcaaagaggtccaggccctacyggtgctgccccgctggtgctggggacttggagggccctgcagtttaggtggcatcatgcagctgggtcctgagagcccagtggacagcagcaggcccctggagaccccggagacgaaggggcacaccgaggtggccagggccccactatccaggccagaaacaaagatgttatccttgacacctccttccacccactggatctgagccggtccatcaccagcccggtggctctgcctgtctcccatcagccaccgcccggtccctgcctccatcacctttcaccagagccacagcaacagcctccctccttgctgatcacctgctccaggacattctcccccagcagccaaacaatctttcacgacacaaatgcaatggagccgcttccc

SEQ ID NO: 75251 - DNA, 586 bp, Homo sapiens
gagtctccctcctggagacacctgtcaatgtctggacacagttttgggtgtcaccactggggactgggtggaggctgcttagcaccctgcagtgcccaggacagacccaccccaaagaatgatcaggcccaacatccacagcgtcgaggttgatgtcagcttttcaacatattctcaaagaggtccaggccctaccggtgctgccccgctggtgctggggacttggagggccctgcagtttaggtggcatcatgcagctgggtcctgagagcccagtggacagcagcaggcccctggagaccccggagacgaaggggcacaccgaggtggccagggccccactatccaggccagaaacaaagatgttatccttgacacctccttccacccactggatctgagccggtccatcaccarcccggtggctctgcctgtctcccatcagccaccgcccggtccctgcctccatcacctttcaccagagccacagcaacagcctccctccttgctgatcacctgctccaggacattctcccccagcagccaaacaatctttcacgacacaaatgcaatggagccgcttccc

SEQ ID NO: 75252 - DNA, 902 bp, Homo sapiens
aaatctaaagaccactgctggccccattgccaaaattcctcccaccccaaatatatttacccaaaagattttgcagatagttatatggtattgtggtgctgcaaamttttatccacagagcccattccaattctgggttcataacctctgatctagcttggttctcttattttacacatggggaaactgagtcaaaagagcacaaagacttgctcagggttatgaagacacttcatgacagcccttggtgtcagagtaagaactggatgtgagttcccttaccagctgagatgtcttctctctgtgcctcagtttccctatctgcaaagccaggataataatagcacttacttggtagggatgctatgaggatcacatgacacatatgtgaagcatttagaaccaatgccttaataaatgatagcttttttttttagagagagcttctcactctgttgcccaggctgctggagtgcagtggcacaatcacacctcattgcagcctcaaactcccaggctcaagggatccttccatctcagtttcctaagtagctgggaccacagatgtgcaccatcatgcccagctagtacttttttttacattttatgttttttgtagagacagggtcttgctatgttggccaggctgatcttgaactcttgggctcaagtgatcttcctgccttagcctcccaaagtgctgggattacaagtgtgaagccaccatgcctggcctatggctctaatttttatcaccgttctcttttttttttttttaagtgtagacccgagttgattctttagcctgtagctaagtcaaagtttgaaccaaagaactcctgccacctagtggttctgtgatgaataaagtagggtttgcagcactgaaacatggtgatcac

SEQ ID NO: 75253 - DNA, 902 bp, Homo sapiens
aaatctaaagaccactgctggccccattgccaaaattcctcccaccccaaatatatttacccaaaagattttgcagatagttatatggtattgtggtgctgcaaaattttatccacagagcccattccaattctgggttcataacctctgatctagcttggttctcttattttacacatggggaaactgagtcaaaagagcacaaagacttgctcagggttatgaagacacttcatgacagmccttggtgtcagagtaagaactggatgtgagttcccttaccagctgagatgtcttctctctgtgcctcagtttccctatctgcaaagccaggataataatagcacttacttggtagggatgctatgaggatcacatgacacatatgtgaagcatttagaaccaatgccttaataaatgatagcttttttttttagagagagcttctcactctgttgcccaggctgctggagtgcagtggcacaatcacacctcattgcagcctcaaactcccaggctcaagggatccttccatctcagtttcctaagtagctgggaccacagatgtgcaccatcatgcccagctagtacttttttttacattttatgttttttgtagagacagggtcttgctatgttggccaggctgatcttgaactcttgggctcaagtgatcttcctgccttagcctcccaaagtgctgggattacaagtgtgaagccaccatgcctggcctatggctctaatttttatcaccgttctcttttttttttttttaagtgtagacccgagttgattctttagcctgtagctaagtcaaagtttgaaccaaagaactcctgccacctagtggttctgtgatgaataaagtagggtttgcagcactgaaacatggtgatcac

SEQ ID NO: 75254 - DNA, 699 bp, Homo sapiens
tcccagacagtctctgtactwgtgagcaggagccagcgggcatgggcagggtacaagagatccttcagggacatcaagagttgctcagggaccaccaggagctgcacattgaggaggctgagtcgcagggctccctgtgggtccagccccaggaactcctgccccaggcgcaggtgcaggaccattcctggttccaagaccgcgatgatcatcttcctctggggaagctgtgggccctgggggagaaaagccgtgggtcagtcattgtcctctgagggtggctcaaacagggagagagcaaggcggggagctgccagtaacttccccaggcataaatgaaaccccgcagggacacccagaattggcacctgtattgacgccccttgggacggtgatttcctgcaagtcccctagggcctggagctcaggcagacctgtctcacccacgcccacctaggtggtgtgaccttacctggggcagctccaggggcagctgtgcagggtggtggggagctggctgtaccggagctggttctgcacctgtggagagagcagagtgtgcaggtgaaagcccttgtcatgcaggatgcccttgagggttcaaggtgccaccgtgagaaagaccaaatacagaagaagccaggtacaggacacccagccacggagctgcaggaggaagctcccgacactctggacagc

SEQ ID NO: 75255 - DNA, 802 bp, Homo sapiens
gttagtgaattaataaatacagcagtaaagaatagagttgtggttgggaatggtgtctcacgcctgtaatcccagcacaatggcatgccgaggcgggtcaatcacctgtagtcgggaggtggagatcaccctgaccaacatggagaaatcccgactctactaaaaatacaaatcagcctgtcatagaggcacatgcctttaatcccagctactcgggaggctgaggcaggagaatcacttgaacctaggaggcagaggttgcggtgagccgagatcgcgccattgcactccagcctgggcaacaaaagctaaattctatatcaaaaaattaaaaaaaaaaaaaaagaaggctgtttgttgaccatttgagtggccagtcttggtgcttcctggtgggcgaggagagccctgccccattcctacccattccagtagtcatggcataagagtgattctcactttctgctatagcctccttatccattggctgaaatgattgttttttaatgtgtcttataaatgcktccatagcaaaaaaaattgaattgacttttgtagggactctttcggggattgttacccatcattccataatttgtttgtactcctagaaaagggaagtatgccgagcacagtggatatttcgtctcaaataataaataaataaccaaatagaaaagaaagaaaaggaagtaaagggaaatatacaaatatacaaggtgttaggagagagttgctaatcgtgattcccccttaattgtccaaacagaccacctctggggatctattcgtaaaagactcg

SEQ ID NO: 75256 - DNA, 802 bp, Homo sapiens
gttagtgaattaataaatacagcagtaaagaatagagttgtggttgggaatggtgtctcacgcctgtaatcccagcacaatggcatgccgaggcgggtcaatcacctgtagtcgggaggtggagatcaccctgaccaacatggagaaatcccgactctactaaaaatacaaatcagcctgtcatagaggcacatgcctttaatcccagctactcgggaggctgaggcaggagaatcacttgaacctaggaggcagaggttgcggtgagccgagatcgcgccattgcactccagcctgggcaacaaaagctaaattctatatcaaaaaattaaaaaaaaaaaaaaagaaggctgtttgttgaccatttgagtggccagtcttggtgcttcctggtgggcgaggagagccctgccccattcctacccattccagtagtcatggcataagagtgattctcactttctgctatagcctccttatccattggctgaaatgattgttttttaatgtgtcttataaatgcgtccatagcaaaaaaaattgaattgacttttrtagggactctttcggggattgttacccatcattccataatttgtttgtactcctagaaaagggaagtatgccgagcacagtggatatttcgtctcaaataataaataaataaccaaatagaaaagaaagaaaaggaagtaaagggaaatatacaaatatacaaggtgttaggagagagttgctaatcgtgattcccccttaattgtccaaacagaccacctctggggatctattcgtaaaagactcg

SEQ ID NO: 75257 - DNA, 868 bp, Homo sapiens
taacccccctccwtcccccccctcactccctccctccttgtttccatccttcctccctcccttccctctttccttccttcctgccttcttcccttccccttcccctcttccttctgtccttccttcctgtgtgtaaaagaaaaattggtgaatagaagaataattgaataactgcctgagtcacttatacatttctcatctcactctggggacacagaagaccgtgttgtactcatctcctcgattttaaaaacagtcattctaaaatcaaggattctagatgtatcacttctaggcgaaatcttgaaagagaatgtgtaagagtttcatgtgctcttcatctctatgatcacaattgaagaaggcaggaggttgagatgctgcatcgccaagatcgtggtgattccattatcattacccttgtaacttgtgagcatccttactgccagcaatcattattagatatggaatctgatataggagttcatatttactgtatgaatatcttggtgtgggagtgttggctcatgcctgtaatcccagtgctttgggaggcagaggcaggaggctcgcttgaacccaggagttcgagacaagccggaagagcatggcgagaccctcgtctctacaaaaatgtaaaaatcagccaagtgtgctggtaggtgcctgtagtctcagctccttaggaggctgaagtgttaggatcgctttcgcccgggatgtaatggctacagggagtcgagatcttgccactgaacttcagcctgggcaacagagcaagactctctctcaaaaataaaatgctttttcctttaggcttaaattctaacactgaaacctccaaagcggaggtattaggaggtggggc

SEQ ID NO: 75258 - DNA, 868 bp, Homo sapiens
taacccccctccatcccccccctcactccctccctccttgtttccatccttcctccctcccttccctctttccttccttcctgccttcttcccttccccttcccctcttccttcygtccttccttcctgtgtgtaaaagaaaaattggtgaatagaagaataattgaataactgcctgagtcacttatacatttctcatctcactctggggacacagaagaccgtgttgtactcatctcctcgattttaaaaacagtcattctaaaatcaaggattctagatgtatcacttctaggcgaaatcttgaaagagaatgtgtaagagtttcatgtgctcttcatctctatgatcacaattgaagaaggcaggaggttgagatgctgcatcgccaagatcgtggtgattccattatcattacccttgtaacttgtgagcatccttactgccagcaatcattattagatatggaatctgatataggagttcatatttactgtatgaatatcttggtgtgggagtgttggctcatgcctgtaatcccagtgctttgggaggcagaggcaggaggctcgcttgaacccaggagttcgagacaagccggaagagcatggcgagaccctcgtctctacaaaaatgtaaaaatcagccaagtgtgctggtaggtgcctgtagtctcagctccttaggaggctgaagtgttaggatcgctttcgcccgggatgtaatggctacagggagtcgagatcttgccactgaacttcagcctgggcaacagagcaagactctctctcaaaaataaaatgctttttcctttaggcttaaattctaacactgaaacctccaaagcggaggtattaggaggtggggc

SEQ ID NO: 75259 - DNA, 868 bp, Homo sapiens
taacccccctccatcccccccctcactccctccctccttgtttccatccttcctccctcccttccctctttccttccttcctgccttcttcccttccccttcccctcttccttctgtycttccttcctgtgtgtaaaagaaaaattggtgaatagaagaataattgaataactgcctgagtcacttatacatttctcatctcactctggggacacagaagaccgtgttgtactcatctcctcgattttaaaaacagtcattctaaaatcaaggattctagatgtatcacttctaggcgaaatcttgaaagagaatgtgtaagagtttcatgtgctcttcatctctatgatcacaattgaagaaggcaggaggttgagatgctgcatcgccaagatcgtggtgattccattatcattacccttgtaacttgtgagcatccttactgccagcaatcattattagatatggaatctgatataggagttcatatttactgtatgaatatcttggtgtgggagtgttggctcatgcctgtaatcccagtgctttgggaggcagaggcaggaggctcgcttgaacccaggagttcgagacaagccggaagagcatggcgagaccctcgtctctacaaaaatgtaaaaatcagccaagtgtgctggtaggtgcctgtagtctcagctccttaggaggctgaagtgttaggatcgctttcgcccgggatgtaatggctacagggagtcgagatcttgccactgaacttcagcctgggcaacagagcaagactctctctcaaaaataaaatgctttttcctttaggcttaaattctaacactgaaacctccaaagcggaggtattaggaggtggggc

SEQ ID NO: 75260 - DNA, 868 bp, Homo sapiens
taacccccctccatcccccccctcactccctccctccttgtttccatccttcctccctcccttccctctttccttccttcctgccttcttcccttccccttcccctcttccttctgtccttccttcctgtgtgtaaaagaaaaattggtgaatagaagaataattgaataactgcctgagtcacttatacatttctcatctcactctggggacacagaagaccgtgttgtactcatctcctcgattttaaaaacagtcattctaaaatcaaggattctagatgtatcacttctaggcgaaatcttgaaagagaatgtgtaagagtttcatgtgctcttcatctctatgatcacaattgaagaaggcaggaggttgagatgctgcatcgccaagatcgtgstgattccattatcattacccttgtaacttgtgagcatccttactgccagcaatcattattagatatggaatctgatataggagttcatatttactgtatgaatatcttggtgtgggagtgttggctcatgcctgtaatcccagtgctttgggaggcagaggcaggaggctcgcttgaacccaggagttcgagacaagccggaagagcatggcgagaccctcgtctctacaaaaatgtaaaaatcagccaagtgtgctggtaggtgcctgtagtctcagctccttaggaggctgaagtgttaggatcgctttcgcccgggatgtaatggctacagggagtcgagatcttgccactgaacttcagcctgggcaacagagcaagactctctctcaaaaataaaatgctttttcctttaggcttaaattctaacactgaaacctccaaagcggaggtattaggaggtggggc

SEQ ID NO: 75261 - DNA, 835 bp, Homo sapiens
gtggagatcaccctgaccaacatggagaaatcccgactctactaaaaatacaaatcagcctgtcatagaggcacatgcctttaatcccagctactcgggaggctgaggcaggagaatcacttgaacctaggaggcagaggttgcggtgagccgagatcgcgccattgcactccagcctgggcaacaaaagctaaattctatatcaaaaaattaaaaaaaaaaaaaaaagaaggctgtttgttgaccatttgagtggccagtcttggtgcttcctggtgggcgaggagagccctaccccattcctacccattccagtagtcatggcataagagtgattctcrctttctgctatagcctccttatccattggctgaaatgattcttttttaatatgtcttataaatgcttccatagcaaaaaaaattgaattgacttttatagggactctttcggggattgttacccatcattccataatttgtttgtactcctagaaaagggaagtatgccgagcacagtggatatttcgtctcaaataataaataaataaccaaatagaaaagaaagaaaaggaagtaaagggaaatatacaaatatacaaggtgttaggagagagttgctaatcgtgattcccccttaattgtccaaacagaccacctctggggatctattcgtaaaagactcgttagaagtgcagactcatgcatttgagaatcactcagggaaatctgaagatgacctgtggtgggggtgtaaatggatacttaaatgtgtcttgtgattgtgtgagagtgtgactgtgtgtttgtgtgtgtgctgtcatctgtggagtggg

SEQ ID NO: 75262 - DNA, 718 bp, Homo sapiens
atcacttgaacctaggaggcagaggttgcggtgagccgagatcgcgccattgcactccagcctgggcaacaaaagctaaattctatatcaaaaaattaaaaaaaaaaaaaagaaggctgtttgttgaccatttgagtggccagtcttggtgcttcctggtgggcgaggagagccctgccccattcctacccattccagtagtcatggcataagagtgattctcactttctgctatagcctccttatccattggctgaaatgattcttttttaatgtgtcttatwaatgcttccatagcaaaaaatattgaattgacttttatagggactctttcggggattgttacccatcattccataatttgtttgtactcctagaaaagggaagtatgccgagcacagtggatatttcgtctcaaataataaataaataaccaaatagaaaagaaagaaaaggaagtaaagggaaatatacaaatatacaaggtgttaggagagagttgctaatcgtgattcccccttaattgtccaaacagaccacctctggggatctattcgtaaaagactcgttagaagtgcagactcatgcatttgagaatcactcagggaaatctgaagatgacctgtggtgggggtgtaaatggatacttaaatgtgtcttgtgattgtgtgagagtgtgactgtgtgtttgtgtgtgtgctgtcatctgtggagtggg

SEQ ID NO: 75263 - DNA, 718 bp, Homo sapiens
atcacttgaacctaggaggcagaggttgcggtgagccgagatcgcgccattgcactccagcctgggcaacaaaagctaaattctatatcaaaaaattaaaaaaaaaaaaaagaaggctgtttgttgaccatttgagtggccagtcttggtgcttcctggtgggcgaggagagccctgccccattcctacccattccagtagtcatggcataagagtgattctcactttctgctatagcctccttatccattggctgaaatgattcttttttaatgtgtcttattaatgcttccatagcaaaaaawattgaattgacttttatagggactctttcggggattgttacccatcattccataatttgtttgtactcctagaaaagggaagtatgccgagcacagtggatatttcgtctcaaataataaataaataaccaaatagaaaagaaagaaaaggaagtaaagggaaatatacaaatatacaaggtgttaggagagagttgctaatcgtgattcccccttaattgtccaaacagaccacctctggggatctattcgtaaaagactcgttagaagtgcagactcatgcatttgagaatcactcagggaaatctgaagatgacctgtggtgggggtgtaaatggatacttaaatgtgtcttgtgattgtgtgagagtgtgactgtgtgtttgtgtgtgtgctgtcatctgtggagtggg

SEQ ID NO: 75264 - DNA, 984 bp, Homo sapiens
tacagcagtgaagaatactgttctcgttggcaatggtggctctcgcctgtaatcccagcacaatgggtgggcaagtcgtgtcaatyatctgaagtcgggggttggagatcatcctgaccaacatggagaaatcccgactctactaaaaataccaatctgcctgtcatagtggcacgtgtctttaatcccagctacttcggaggctgaggcaggggaatcacttgaacctaggaggtagaggttgtggtgagctgagatcgtgtgcgtgcagtctatcctaggcaacaaaagctaaactctatctgaataaagaaaaaaaaaatgtaatggtgtttgttgaccatttgttcagctagtcttggtgcttccttgtgggccaggagagccctgctgcagcccccattcattccagtagacatggcagaagagtgattctcactttctgctatagcctcttcatccattggttgaaatgatttttttatatgtcttataaatgtttccacattaaaaaacgaattgaattttatagtgacgcttttggggattgttacccataatttgtttgaactcctaaaacatggaagtatgccaagcacagtggcttatgcctgtaatcccagcgctttgggtgggcggatgacctgatgtcaggagttcacgaccagcctgaccaatgtgggagaaatcctaactctactaaaaatacaaaaattagccgacgatggtggtgtgtacctgtattcccagctacttgggaggctgagacaggaaaattgcttgaacccaagaggcaaaagttgcagtgagctgagatggtgccatttcactccagactgtatgacagagggagattccatcttaaaaaaataaaaaaaggaattaaagggaaatatataagatgttgtgagagagtttctaattgtgattcctccataattgtccaaacagaccacctctgggggtctattcacaagagactct

SEQ ID NO: 75265 - DNA, 984 bp, Homo sapiens
tacagcagtgaagaatactgttctcgttggcaatggtggctctcgcctgtaatcccagcacaatgggtgggcaagtcgtgtcaatcatctgaagtcgggggttggagatcatcctgaccaacatggagaaatcccgactctactaaaaataccaatctgcctgtcatagtggcacgtgtctttaatcccagctactycggaggctgaggcaggggaatcacttgaacctaggaggtagaggttgtggtgagctgagatcgtgtgcgtgcagtctatcctaggcaacaaaagctaaactctatctgaataaagaaaaaaaaaatgtaatggtgtttgttgaccatttgttcagctagtcttggtgcttccttgtgggccaggagagccctgctgcagcccccattcattccagtagacatggcagaagagtgattctcactttctgctatagcctcttcatccattggttgaaatgatttttttatatgtcttataaatgtttccacattaaaaaacgaattgaattttatagtgacgcttttggggattgttacccataatttgtttgaactcctaaaacatggaagtatgccaagcacagtggcttatgcctgtaatcccagcgctttgggtgggcggatgacctgatgtcaggagttcacgaccagcctgaccaatgtgggagaaatcctaactctactaaaaatacaaaaattagccgacgatggtggtgtgtacctgtattcccagctacttgggaggctgagacaggaaaattgcttgaacccaagaggcaaaagttgcagtgagctgagatggtgccatttcactccagactgtatgacagagggagattccatcttaaaaaaataaaaaaaggaattaaagggaaatatataagatgttgtgagagagtttctaattgtgattcctccataattgtccaaacagaccacctctgggggtctattcacaagagactct

SEQ ID NO: 75266 - DNA, 710 bp, Homo sapiens
aaaccctttggatgcgcctcagaacttcaaatgcatgcaaggactcagtgtggagaaaccttacaaatgtaagaaatgtgaaaaagcatttaataacttatcttcctttcaaatacatgaaagaatgcacagaggagggaagtatcatgcctgtaagggttctgggaatacataccgtttttctggtttctatcatagacataaaatgcctcatgctggcgggaagttttatggatgtaagaaatgtgggaaagcctttattagtttctgtgcctttcgataccatcaaaggactcacactaaagagaaaccctatgcgtgtaaacaatgtgggaaagcctatatttcttacacttcttttcaatatcatcagttgaatcacactggagcgaaaygctatgagtgtaagcagtgtggcaaaggcttcgatttgcccaattccattcgatatcatgaaatgactcacactggggagaaaccccatgaatgtaagcaatgtgggaaaactttcagatgtgcctcaagcctccgaatacatggaaggactcacactggggagaaaccctatgaatgtaaacagtgtggtaaagtctctcgttattggagcggccttcaggtacatgaagtaactcatattggaaaaaagctttatgaatgtaaggaatgtgggaaatcatactatagttctggttcctttctaaatcataaaa

SEQ ID NO: 75267 - DNA, 559 bp, Homo sapiens
tcgaactcctgggckcaagctatcctcccgcctcttgcctccctgcgagctgggattacaggcatgagccaccgcgcccggcctctttttttttttttttttttgagacggagtctcactgttgtccaggctacagtgcagttggcgcaaacttggctctccgcaacctccgcctcctgggttcaagcgattctcctacctcagcctcctgagtagctgggactacaggcacgtgccaccacgcctggctaatttttgtatttttagtagagacggggtttcaccatgttggtcaggctagtatcaaattcctgacctcaggtgatccacccacctcggactcccaaagtgctaggattataggtgtgagccaccggacctggcctaaaatacaaattattaacgaatgaaattgtatcctgacctcccactctcaccttcttcctaaccttggttttctcctctctgtaaaaaaaaaaaaaattcctttttgggctaactttgagatgcttacagatcttatactttctcccttttccttatttcaattctcctttaa

SEQ ID NO: 75268 - DNA, 590 bp, Homo sapiens
gcctccgcctaccctcccccaagtctcgggactcccagcgggggctcacactcaccatttcctggctttcaggtgactcccacgtccaaagcagtcacaacacagacgacagggcgacagaagtatggcggtggcaaccggtccctctcagagcaggaaaaacggggtgccaacctcacccggcgggaggggccaaagactgaggcgaacggcaatgtgacccgcggataaacagttggccgggccccaccccggcgactctgattgggtggagcgccaggccccgccccctgcatcctgagtgacagcagaagwcctgggtaacagggccaagcagagcaggactgaccgcttcaagccacagtccaaggtcaagttccctctctacgccctgctctttgaaaatttgcatttcggccaaacttgctcgtcttaattactagaagtggctctgtcaatggtctgtccctgcttcttcgtcctgcacagtgtcataagtgtgtgcagggagttccagactctatgtttaatagaggtgaaagcaattaaaatattttattccaaaatatatttatttggcaatttcgaat

SEQ ID NO: 75269 - DNA, 590 bp, Homo sapiens
gcctccgcctaccctcccccaagtctcgggactcccagcgggggctcacactcaccatttcctggctttcaggtgactcccacgtccaaagcagtcacaacacagacgacagggcgacagaagtatggcggtggcaaccggtccctctcagagcaggaaaaacggggtgccaacctcacccggcgggaggggccaaagactgaggcgaacggcaatgtgacccgcggataaacagttggccgggccccaccccggcgactctgattgggtggagcgccaggccccgccccctgcatcctgagtgacagcagaagtcctgggtaacagggccaagcagagcaggactgaccgcttcaagccacartccaaggtcaagttccctctctacgccctgctctttgaaaatttgcatttcggccaaacttgctcgtcttaattactagaagtggctctgtcaatggtctgtccctgcttcttcgtcctgcacagtgtcataagtgtgtgcagggagttccagactctatgtttaatagaggtgaaagcaattaaaatattttattccaaaatatatttatttggcaatttcgaat

SEQ ID NO: 75270 - DNA, 956 bp, Homo sapiens
ctttgagtgtatgataggagattgaattctatctaagggctgtggggagccactgaatagctgtgactggagcgggaaagagttaagacaagattctacaaccaagggtttgcccaaggtcaggtcataaaatagtgacagcaggaactagaaactttaaggctagggattttttttcttctaagctacactgtgttttcttcattcttacaaaaaagtgtaaactgagctttttttttttttttttttttttttccagtctcgctctgtcacccaggctggagtgcaatggcgtgatcttggctcactgcaacctccgcctccaggctcaaacaattctcctgcctcagcctcccgagtagctgggactacaggtgcacaacaccacgcctggctaatttttgtatttttagtagagacagggtttcaccacgttggccaggctggtctcgaactctgacctcaggtgatctgcctgccttggcctcccaaagtgtgggactataggcgtaagccaccacgcccagcctgaactgagctttaactctgggctgtttctgctcatgataggctttatggtttttctttttgttttgtttcatttttgcacacctccaccgggtgggaaaatcttttcctactgagcatagcttgagagaagctcacatgtgccaagaaatgctactcaccccaaatactttgtgcccagtaaaagggatagttagggactgaggtccgagagggggacagcattctggagaacacttctaatagatctctgcaaatatgttgaagaaggacctagggtgttctaaacattggggaggggtgctcaggactctgcaactgtctttcctggtgtcactrttcacggcatgcacactcacaacatacacacctgccagcacatacctacatgaccttcgtgcccttcccgtacttctggtgcatcaccc

SEQ ID NO: 75271 - DNA, 1529 bp, Homo sapiens
ccttatagaacctactcaagtctttgtcagcaagcctctctaatgtggcagaggggagaaaaaagaaaggaaaagaaaggaaaacaaattattgctgctttaagactcataggaaaaaaaaaacaggtttccccactagatttcacatggctaacagttttagctctcatttctttcttgcagaaatggaragaaaggttttttttgtttttcctgattttgtgagagtctggagagagaggcaacattttatttgtcgtttgtacattttagctccgtgtgggttccttgttcaactgacggcccaaagagccatcagtgagggggagagtacgcaaaccactttgcctgtgatcattttgcagcaggtctgggcaaaaccacgcttgcaatgtattaatgatttctgcatgtttgcagagcagatggtttttaagggtatatgtgtgctcttggtggcctgccccctgctgaacagtgctgctcaagttccaccaggcatctcagattccagagtaaaaagacctcacaaaacctctccatccaaccagctttccaaggcaaagcttctgttgagttgtctccaggggtcaaatgtcttccatgtaagaacacatttcagaatattcaaccggaattctatcttaagtagacttagaatgtattttccgatatagctgcagtgtcaggggagcagcattctctcttctattcagtacttctcccacccagggtttcaacttcctgcaggtcatcctagggttgacacaatttgagtcgtgtttcctatttctttttttccatagacataattttcattttttgacttatttttgatcctattttccaatctggcctgtcatgttcattccattcgtgtttgtgaaaatgtgctacttgtctagtcctcctagatgacacgctgaaaggtgagcaagtcaaataggaaggcaactgagtgcacacctgaatagaatacggggcaggtctgatcccggcatgagacttttacaaatgatgatggtgttaccctggtggaagatgtctgagttactggcgaatccatatgggcctgcagcaacctcaattcttgcctccacagaagaaagaatttagccgggcacggtcgctcacacctgtaatcccagcactttgggaggcccaagcaggtggatcatgaggtcaggagaccaagaccattctcaccaacgtggtgaaaccccatctctactaaaaatacaaaaattagctggacgtggtggcacatgcctatagtcccaggtactcaggaggctgaggcaggagaattgcttgaacccgggaggcagaggttgcagtgagccgagatcacgtcactgcaccccagcctgaagacagagcaagactccatctaaaaaaaaaaaaaaaaagaagaaagaatttgactgagaggcataaggtagaaaaagagaccaaggaagttttggagcaggagtgtaagtttattttaaaagactttagaacaggaaagaaaggaaagtaggcttgga

SEQ ID NO: 75272 - DNA, 891 bp, Homo sapiens
aaaatctgcattctcttttctgtacctttatatctatgttctatagactttgggatttttcctatttctcagaccattttgaaaacaatagaaacaaaggaccaggctggtcgtggaggctcacgcctgtaatcccagcactttgagaggccgaggagggcagatcacttgaggtcaggagttcaagaccagcctggccaacatggtgtaaacctgtctctactartaatacaaaattagccaggtgtggtggcacatgcctgtagttccagatactcacaaggctgaggcaggagggtcgcttgaacccgggaggtggaggttgcaatgagcagagattgcgccactgtactccagtcaggtgacagagtgagactccatctcaaaaaaaaacaacgaaccagcatagcatctttaggtctaattcaccgtggggtagcaagggaagataaggctcagagatcacagacatacaggtgtctccatttcagatgcactggagtagccggcagtcaggggacctgtcctcctccacaccaccagccaacaaagggcaaccccttgtggcgggctgggcaagcacagcaatcccaggcagctctcaggtcacctgcacgaaataaccaccaaccccagatgcaaggctgcatgtgctatcagaggtggacaggcaacttggacagctgcttcctggtcacatcaggacaacacacagggaaagtcagacctagagatgaccatcctgtaagccatacccatggccacctggactgaagatcccagggcctcacatcaatttctggtccatcttcctcccactccagaaaaaacaggttcaacaatccaagcttgtgatttggagctagtctgactaactgcagccacatggtg

SEQ ID NO: 75273 - DNA, 640 bp, Homo sapiens
actcctgacctcaagtgatctgcccacttcagacccccaaagtgctgggattccaggtgtgagccgctgcggccgaccacatttgatgtttgaagttgtaatctgtcccatcataaacttacctggagctcatgtggaggaacagaaggccaagatccttgctttgggggtgcctcacgaagcatccctgtagacayttggccccagcttcactgcttggaagcatgtccctccctcttgagttggctctgatttgaaatcgggagaaacagagctgctgccaatgggatcttttaggtaactccctccctagcttccgtgtgtctgtgcagtgcccatgagctgctgccaatgggatctttcaggtaccccctccccagcttccctgtggctgtgcggtgcccttgacagatggcttctctgtttccctttgcccagccaggctcccctccttcctattagctacaaaactggataaacttcagaatatgagccaatgagtaggaaggaacttgaagactaaagattttactctctcccctatccatgccccctacctctgactctctctgtgtgaacaggaaactttagggtagatgaggagaatgaattggttatcagagtggaagaccatggccca

SEQ ID NO: 75274 - DNA, 955 bp, Homo sapiens
atctcagctcactgcaacctctgcctcccgggttcaaggaattctcctgcctcagcctcccagtagctgggattacaggtgtgcaccaccacacccagctaatttttgtattttttgtagagatgggatttcaccatgttggccaggctgatctcgaactcctgacctcacgggatccgccccactcagcctcccaaagtgctgagattacaagtgtgagccaccatgccaggccttctttcatgttttctgattacaccccatcctcttctgtttctctttcgtggatgcatatcttttcatatttcatagaggatattatttatagtgttttgtttcattttggtttgagggatcctctgatcctttatagtttctctctctttcctctgagctgcttttgttctgattatttggtctctcactttttaaagtgaggcaataaaaagcgaattgaaagttccctgggcatccccaccctatcaccccacaattgacaatcatcatcatgttgatttccaccttccacattttttcctaaatgttattttaatgcttttcattattttatatgttccattaagctaatgaccatatttgcttataatttcccagttgtttttttggacattgtttttttttttttctggctcttagagaaaagtttgctataaatatmtttctacatgtgacttttatttccatctaaattatttttttggaataaatttgaggagtagaattaccgggtcaaaagcttatgggtgttttcatcagtctttcctgtgtgttgccaaatttctaatggtagtgtatacaggtaccatagcagcagcaacaggagtacaaccctcccagcactctttttttggagacagggtcttgctctgttgcctgggctggagtgcagtggtgtgatcatagctcactgcagctttggccttccaggcttaag

SEQ ID NO: 75275 - DNA, 749 bp, Homo sapiens
gggactacaggtgtccaccatcacactcagctaaataattatttttgtagagatggggtctccctaggttggccaggctgatctcaaactcctggcctcaagtgatccgccttggcctcccaaagtgctgggattacaggcgtgagccactgcacccggcccgaaatttctatatatatgtctgtgcgcatgcttttgagcacagggtatctgttcaaacttaatattccctaattttggagtaagtaaaatctgagtgctgaggaaggtttgcttctggtcagctcccccagaagcagaccctgagataaggatgagtgaaccctctttatttgggaggtgaagcacccctagactggggagggaggagagggaggagaggggccttaccactggggscagctggagcctaatcatgcgggaacaatgcaggcacattcctcagactcagcccccaccaggcgaggggctgaggctttacacacccgttcccttcatctcactggagcccattccttaggtctcctaaatcccccgcacctccaacataggcagaaaaagcagcttttgcaccagaggaagcccagaaacaaagaactgcaggtgctggtgctttgacatccgtgaatgacaaagtgaaagaaatgggcaggccaccaaagcatctgccacggtgtttccagcagggccgaaactccctcggtgtgagtggggccgggtgcgcacagggaagcaagatggatccaagc

SEQ ID NO: 75276 - DNA, 1227 bp, Homo sapiens
accagcatttactcaagggtgaggcatgctgatgacacttcacctactgttaccagtgtgaatctgaagggtctacatcaaatcaaatccttgcctcctcgaatgaaagaattcagctgcgggtcgtaaggcagagggacagactgaggcaagttttaaaggaggagtgagagtttatcaaaaagttttagagcaagaacgaaaggaagcaaagtacacttggaagagggccaagtgccctgtttggtctgtgacttggggttttatacgctggcatggttccgaggtttgcatttcttttcccttccaagggaaaactcccaccaagtctctcccatgacacgtggggattatgggaactacaattcaagatgagatttgagtgaggacacagccaaaccacatcagtcaggctcacatctctgcttcctgttactgtgctccttccctctccagaggggccgaactttaatctttctaaaatgcaaataccattgataagttctgctgctctcatctaaaggcctgaaaagcacatccccaccttgggactcagaggggccagccctaccgggactggctgcccttttacagaagaaggggtggggtgatcctgaggccgcaggcatccttcttgcttggtcttctagaacaggaatgcactgagtttgcaggttgctggcgccccaggactgataagactgcccacgttggccaggcattgggataaaaacagccccaatctggaactcaaggagaattaaggtctcacctgatggagggagctgcctgtagggcccaggcctgcatgggagggaaaagaaatggcctttttggtgtctgcagacatggagaggggctaagcggaggcacagatctaggcttgaggagtttgccaagtaaataaatgatctggctgtaattgagaaaaaccatgttaacccaaaagcgaccaaggcagctgtcaatccacagaggtttatttcgccaaggttgagaacgagcccacgaaaacaaccaccaagccacagaaacatctgtgagctgtgctttttccaaagggggtctggggcacggcaatatttaaaaaggcaagggcaagcaggagggaaaagacgggggagggasgcagtgaggcagatggtcgcattcttgtgaggctctgagtctcagtaaatctacattttacacgtgaagaaaggaagcacaggaaaagtcaattatgca

SEQ ID NO: 75277 - DNA, 662 bp, Homo sapiens
ctctctactctgttttattggtctatatttttgtttttatgccaatactgcactaattgggttaacatatagctttgtaatatattttgaaatctggttgtgtgatgcctccagctttattattttggctgagtattgctttggctattctgtgtctattgtggttcagaaaaaaattttagtttttttttgcattggtatattgttggagatttcattgaatctatagactgctttgggtagtacagtcatttttaacaatatgaattatactaacccatgatcttggatgtctttttattatttgtgccctcttcaatttctttcttcattgttttgtagtttttcttgtcaaggtctttcactttcttggttaaatttattcctagttattttttctttctttctttttccttttttttgaaatgggagaatacatttataaactatttatctgacaaagcactaatatccagaatataaaacaaactcagtgacttaagagaaacaaagaaacagatatccaattaaaaastgggtaagtaatctctatagataatataatggtgtttgtttttagttctccttttactacatgtcaatcttatatgtaatacaaatttaatagaaccatattgaacactggaactctgattaatata

SEQ ID NO: 75278 - DNA, 1112 bp, Homo sapiens
ttactgatgctttaaagaaactgaagttagttcagcactaccaaagtgaagcttatatgtaagtgtgtttcaagaagtattggagaggtgattcataaaagttttgtctagattgtcctggacataagagaaaaataaggtagatggttgcctctgctagtggaatcattttaaaagtattgtattaaacagagactagccacatatatagacagtaagcaactaaacaagcaaatatataagcacatttcatgaaacctgccgtgaaggaaataggttcctctaacagagggtagtagactggaggaagaattgaaggatcacaaggatattattcaaagaattgagcctggcrttgtggaaatggggaaactgtcatagagaacaagtaaaaatgctttcaggtggagtggtggacataatttaagaactgctagaatgttgctagagttgcaggatgacaagtgactaggagagtggcataggttggaattttatatgttaatataattgagaaagttttttgaatgtactcacaaatggaaaaataacttggttacttttatttaaagataactaagtaacatatttatcatttatgtaagaatagatatatttatcattcaactttgtcttactaagtatatattttcacatctctaatttatataattgttatccttagaagctattcacagtaagcctaaaatatgtcctgcttctataaatatatcatactgaattagtttatttacagtagtgacctggtaatagcaacagataggacatttcttattcattaattggtttataattcttgtatgctatgtttatttctccatgtttttctgacttaagcagacgttaaagtttatgatataagcaactaaaacaaaacaaaaacagaacttaaagtactggagctagaaaatggataagaaccatttttttgtgatcatgttgaaaaaagtccttgtcttttggggatacagactgaaatacttaaaaatgaaatgataattatgtttaagagctttttaagattattagcaggtcaggactggccttgattcgataacttttgtaactgaatgatgtggtttcattattcc

SEQ ID NO: 75279 - DNA, 1444 bp, Homo sapiens
atcccagctacttgggatgccgaggcgggaggattgcttgaacccaagaggtggagtttgcagtgagctgagattgtgccacactgcactccagcttgggtgagagtgagactccatctcaaaaaaaaaaaaaaaaaagagagaatcccactttcttgctgttgtgatggtggtaagggaacgggcctggctctggcccctgatgcaggaacatggagctgatccaggacacctcccgcccgccactggagtacgtgaagggggtcccgctcatcaagtactttgcagaggcactggggcccctgcagagcttccargcccgacctgatgacctgctcatcaacacctaccccaagtctggtaagtgaggagggccacccaccctctcccaggcggcagtccccaccttggtcagcaaggtcgtgccctcagcctgctcacctcctatctccctccctctccaggcaccacctgggtgagccagatactggacatgatctaccagggcggcgacctagagaagtgtaaccgggctcccatctacgtacgggtgcccttccttgaggtcaatgatccaggggaaccctcaggtgcatggctgggtcctgggggtaagggaagtggaggaagacagggctggggcttcagctcaccagaccttccctgacccactactcagggctggagactctgaaagacacacctgcccccacggctcatcaagtcacacctgcccctggctctgctccctcagactctgttggatcagaaggtcaaggtgaggccgggctcaatggttcacacctgtcatcccagtttgagactgaggagggaggatcccttgaaggcgagagatggagaccagcctgggcaacattgctgtagagatgacatcccatctctacaaaaataaaattaacaacctggtatggtggcatagactgttcccagttacttaggaggctcagcggggaggactgtttatgcaaataggaagctgcaatgagccctgatgatcctgctgctgcactccagcctgggcaacacagcaaaaccatctctacgaaaaaaaaagttcccactgactggcaaggaaagccaggaaggggggctcaggtgccctctcagccatgtacctgttcttctggaagggcctcctcgcttctgccaggctcatcacatcttttttttttttgagacagagtcttgctctgtcaccctggctggagtgcagtggcatgatctcagctcactgcaacctccgcctccccagttcaagtgattctcctgcctcagcctcctgagtagctgggattacaggcgtgtgctaccacacccggctaatttttgtattctttttagtagagacggggtttcaccatgttggtcaagtggatctcaaactcttgaccttgtgatcctcctgcctcgacctcacaaagtg

SEQ ID NO: 75280 - DNA, 1191 bp, Homo sapiens
ggcctcgtttccttcatgtccaatgcaggggttccagtcacatgcattgggcaccattacatgtccaagctgtgccaggatctagaaaaatggctggactcaggccaaggggccttcctgtctggcagtgaaaataagaggagataccaagggccctgagtctggaggggaagtcatgagcacagggcagtgccagggcccgggagctgccacagaggagcccacctggtgacagacacctgtaggcacatccgtgatgcccagtgcccaacacagggaactggacaaacgtttcatgcacgactcttttttcccttcttggctaccttgaggaccttgattataatagttatcctttttttctttttctttttttgagactcttgctctgtcgtccaggttggaatgcagtggcaaaatcttggctcactgcaatcttcacctctcaggttcaagtgactctccttcctcagcctccctagtagctgggattaccggtgtgcaccactaggctcagctaatttttgtatttttactacagatggggtttcaccatgttggccaggctgatcttgaactgctgacctcaggtgatctgcccacctgggcctcccaaagtcttgggattacaggtgtgagccactgagcccagccrgattataatagccttttcatgcaccaggggctttatactcattatctcatttcattcatatgagttgaagtcagcttaccccccatttcacagatgaggaaaccaaggcccagagaggttaggaattcgtccaaggtcacacagctaggaagtaggattcaaacccagacagccaggctgtaacacctaggctcttctcaggctcatgcccttcccaggggtctgggaagccctgacctgcagcctgtcaccttcgtttaccccccagcctccaggatattatgtgtgcaccggcgtgggatcctggaactggcaggaattgtgggttgtgttagtccctagactcccatcgcctatatgaaatatggttccttttgtggcttgggaggccatggccagccctgcgatgccattgactggtgagtgcatgcctgggaccaggctacaaaatccctcacactctggggtagtcaaggcttatgaggaagtacccaaaactgaagctggggtttggtccagggagatcccagtgtgca

SEQ ID NO: 75281 - DNA, 710 bp, Homo sapiens
tgcatcattcacaatttatatcttttttgtttgtacaaaaatgaacacaagttattctcttttatctgtattgtgattggtttggtgagagggaattaggccacttgagagtttgtgtgtgtttacaattttctggccaggcacggtggctcatgcctgtaatcccagcactttgggaggccaaggcgggcggatcacttgagctcaggagttcgagaccaaattgggcaacatggtgaaaccctatctctacraaaaatacaaaaattagctgagtgccgtggcttgcgcctgtcctcccagctacttggggggctgaggcagtaggatcgctcaagcccaggaggtggaggttgcagtgagccaagatcacgtcactgcactccaggaagggcaacagagcaagactccttctaaaaaaaaaaaaaaaaaagaaagaaagaaaagaaaattaactttggtatttcaggttgtatttaaatggagacttaacatgaactatgttcataacacttgaccaaattaagtgtagatcgtctctttaataaagagatcatctggaactgcaatttctaactcatacatcattgctacaaaccttatttgtttactatttctcttccaaggaccatcagtcatcctttaaaattcatttcaagctctgaaaagatattttttgttacatgggcaatttacttttagtacagtaa

SEQ ID NO: 75282 - DNA, 2111 bp, Homo sapiens
ctcacttctccatggcctccatggtgttctccagcagctctccagatcctgtggggggcactggagtgggcctctggggcttggggtctaggggcctggcccaacctcatcacccacattccctctctgggctccatcctccctctggcctcacctccccagccagcccaggytgcgccagcatcttcttcctcgtccacaccctgccctgccacttcgctctccttctctcttggtccctgccccgtttctagcatgcccccttggacctacccctctgtgctgtccactttggcacctgttctcacccctacccggctcacctcctcggtgggcccccaggcggatgcggaaggtgggagccctgggcgtgtgcagcagatgaggccggcgcaggaagaagatggagagcatggcatagctgcccagggcagggagggcatagtacagcaaaaggctcatgaccgtactcccacagaagctcctgcagccacacgctcagccgtccgcgggactgtgctgcctgcctagccagtgtgggccggctctactactggccactgccacgcccctgggacctgctgagcctgccgctgggctggcttggagccaggctgcagggttcggctgaagctggggtagtgtcaggaggtgaggcaagtagccctggctctcatatccccaggcccttcccagcccccagcagccccgtcctgggctacatgaggggagtaaaaaccacccaggactgtcaggacctctccctctcactggtacttgtagccagcgcatccaacatgcctaccccttgccatttcagaggatccaggggtgtgtagggtgctcctgagtcaccccgaatcacccccagccagttagacaggaagccattagcgagaggacaggacagtgactaaggggaaaactgacccccttctttctaggagtctggagctctccagagccccgtccccagccctgggcagctgggagtgaagggcaccaggcccctgaaagcccaagtcaagtctgtcctcagagccgcacggggcagggcgggggcgtcgcgaacacagacagagccagggtcagccatagacacatctctatatttatatattagacgggtcagggaggtggcaggggcgccgggctctccacgccccccagctccacttctgctcaccacacacagaagcagcgagggcacgcgaagtgacagctttgacagggaggggattcggcccggcctggctcctcagggatgctagcccttgagactaaggaatgttccttcagggaaactagggtggggtttgaatgagatgaggggggcaggcatggccctgagtccctactcagcgccccccaccctccacctctgcccttcagcaggttggggcagccagaacccttccattccagaactgccagagactgggacgctggggaaggtaagggcgcagcagcagcagcgggagattgaactggggccacctgaggtcccgaggccccgtggggagggcgggtggggaggagaaggccttggcctgcctgaagctggaggcctcagcaaaggagagaggtggccaggcccatgctccaccccggcctgggctgccaaggtccgggctgggcacagtgtccattttctaacagtctggcgggagaggggcaggcaggaggcaggtcctaaagagagaagcaggcagaagaggagtcgttagcaccccccgggcagacccactggagccctgacctcaacatctctcatttcaccctcacagctggataggctgggtctcagtttccttatctgtaaatggagataataatagtacctagcttgaggtactgctgtaagattaaaggaattaatacatgtaaacctcttagaacaatgcttagggctttatgctttcattattagaactgtctcggccgggcacagtggctcacgcctataatcccagcactttgagaagctgaggtggtggatcgcttgagcccaggagtttgagactggcctgggcaacatagcaagaccccagctccacaaaaaaaaaaaaaaaaaattagccggttgcaatggctcgtccagctagctggga

SEQ ID NO: 75283 - DNA, 1109 bp, Homo sapiens
acatggtcctaatacatgggccaagtttccctttatgcctggattattcagtctcccttgctaaacagaaaactgtactataattcattatattacttaatgacaatttaaaataactgttttcctatcgcaagaacaaaaaaccaaacaccgcatattctcactcatagctgggaattgaacaatgagatcacatggacacaggaaggggaatatcacactctggactgtggtggggtggggggaggggggagggatagcattgggagatatacctaatgctagatgacgagttagtgagtgcagcgcaccagcatggcacatgtatacatatgtaactaacctgcacaatgtgcacatgtaccctaaaacttaaagtataataaaaaaaataaataactgttttcttaggaatcttcactgattaacaatgtaatgggtcttaccatcatgcaagtacaagtatgtgccccatgacctttcagtcaataatggactacataaatgacagtatgcacataagagaatggagctggagaattcctatcacctagtacttactatacttgttattttagtgcatactcctacttattaaaaaagttaactgtgaaacagcctcaggtaggtccttcagtaggtgttccagaaagaggcattgctacataggagatgacagctccatacatgttactgccccttaagaccttccagggggacaagatgtggaggtggaagacagggatattggtgatcctgactctatgyaggcctatgctaatgtgtgtcttagtcgctaataaagtttaaaaagtaaacaaattttaaaaatagaaaaaagcttatagaataaagatatttaaaaggaaaatgtttttgtacagctgtacaatgtgatttaagctaagtgttattacaaaagagctaaaaagttaaaagttcacaagttacagtaagctaagattattgaagaaaattgttttataaatttagtgtagcctaagtatacagttttataaagtctacagtcgtgtgcagctgcagcaatgtcctaaacattcatgttcactcaccactcactcgctcaaagcagctttcagtcctgcaag

SEQ ID NO: 75284 - DNA, 1060 bp, Homo sapiens
gttactttctatggcaaaattaagttaaggctcattgagataggggaattatgttggattatctagatgagcccaatgtaatagcaaggattcttgcaagtaaaacaggtaagcaggggagtcagagaagaatgtgttaagagcaggagttggagtgatatgattgctggctggaaggcatgagccaaggaagacagacggcttctagaagctggaaaaggcaaggaaacattcttcccagagcctccagaaggaaaacagaaggaatgcagccctgccaatcaccttgattttagccctaatacaatacattttggacttccaacttctaggaccttaagatactaaatctgtattgttttatgccacaaaatgttgaggattttttttacagcagtaataggaaactgatgtaggcagagtgaaggttaaattttggttcctatgatcccatctctgtaatccccccattggatatgggagcatgagaaaggtgagaaggcagtgggataccaccttatggaaggaggtggaattagagctaagtagggctgtataggtaatttaaatatctttattaattgagtctttgcatgtataaagtgagtgatatgtagctgttttcatggagactgaaaaggagggattgattactaagaaaacagaaaakcccagtattacttggtctagactgtttcaattagatcgcagaaaagaggtaatgggaaataaaattaagtatttaagggccatgttttagaacttcttcaagtacctgctgagatgaagacttgattctgatgatagaaagccatcacaggcttgtgaacagggtactgccatgacacaaacaaatagaatgtaatagagggagacagaagtttgttgcttcctaccaggtagtgccccaaattatagtcttatcaacatatttctggtgtgattataggaggaaaaaatcccactggctttcatgttttaataaagacttttagagcagttttaggttcacagcacaatcaagcagaaaatagagagcttctctatacccctgacctcc

SEQ ID NO: 75285 - DNA, 1060 bp, Homo sapiens
gttactttctatggcaaaattaagttaaggctcattgagataggggaattatgttggattatctagatgagcccaatgtaatagcaaggattcttgcaagtaaaacaggtaagcaggggagtcagagaagaatgtgttaagagcaggagttggagtgatatgattgctggctggaaggcatgagccaaggaagacagacggcttctagaagctggaaaaggcaaggaaacattcttcccagagcctccagaaggaaaacagaaggaatgcagccctgccaatcaccttgattttagccctaatacaatacattttggacttccaacttctaggaccttaagatactaaatctgtattgttttatgccacaaaatgttgaggattttttttacagcagtaataggaaactgatgtaggcagagtgaaggttaaattttggttcctatgatcccatctctgtaatccccccattggatatgggagcatgagaaaggtgagaaggcagtgggataccaccttatggaaggaggtggaattagagctaagtagggctgtataggtaatttaaatatctttattaattgagtctttgcatgtataaagtgagtgatatgtagctgttttcatggagactgaaaaggagggattgattactaagaaaacagaaaatcccagtattacttggtctagactgtttcaattagatcgcagaaaagaggtaatgggaaataaaattaagtatttaagggccatgttttagaacttcttcaagtacctgctgagatgaagacttgattctgatgatagaargccatcacaggcttgtgaacagggtactgccatgacacaaacaaatagaatgtaatagagggagacagaagtttgttgcttcctaccaggtagtgccccaaattatagtcttatcaacatatttctggtgtgattataggaggaaaaaatcccactggctttcatgttttaataaagacttttagagcagttttaggttcacagcacaatcaagcagaaaatagagagcttctctatacccctgacctcc

SEQ ID NO: 75286 - DNA, 581 bp, Homo sapiens
tctatactaacatggagtggactttgtcagttgggtatttttctgtagcaaacttttgtggacttattgaatctttaggtggaagacttgggttgaggttatcagacaccttaaacttagagaagtctcttcatcctactaaccttaccttagtttagtttccatcataaccttcatgttcaaggtctttgcccactttgacatatactccatcaccctaggggatttacttttctaaaacaaatctcagtcaagatccatytatagtcatttatatgaatccccactaccctctttagcatgacataccagcttttcatattttaagccctactaaatccccatcccatgtcatgttcccagcactctaagcatacctttcttcatcaccgaatgcctccttggaactgaagacatttgcccacgctacactcattgtctgtatcatatgccttttcatggtcgtccattcctctctcctagcttttccttattttagtaggaataacctccacctggaagcctctgctgactgttccacccacctccacgggccagatgtctctaaaaacatgctccca

SEQ ID NO: 75287 - DNA, 1460 bp, Homo sapiens
acattcttcatccatcccaagacctgcaagttaattggaatgccgtgtttatgatttaccttaagtggctatggcagaataagagtctaaaagtctgtgctataggtgaagaaggtccacaaaggaagaggccatgcagccttgtggaatatgagccccgatgagaggagcagaaaagcctaggccaggttaccacctcattatctctgaggcgagtctaaaagacagctgtcagatctttttgggaaattatatgcaatatacaataaattcgtattttaaattgaattataagtctataaatatataaaatatgcataagaataatactaagagttaatactaaagatactgccatgtcacgaactaggttaattgtttatattcactttgtttcacaagaaccctgtgaagcaggtgctattatgctgctcattttacagtcaggaaatgagggcacagaggtggcaactgcccaaggtcactgcaaagcctactctataaaccactgcattatggtgctttgcttgccaccaaggtgctgctctacatcgattatagaaataggtgaggggacttgaggggamgtgtgggtagagaaatgccgtattaaaatgatgaacagaagcacagcacaaacaaaagaaaaagagtgagactgtaaggtggccctcggttacagaacatccccatatgaaaaatacaagtaagagcatttcctgtgtcaactggccatatcacaagcacggagccttccagtgccttggttgcctcatctgggaggagatggctacagcagctcaaagttcttaatggagagagaacatacaaactacctagctcaattcctggcacaagcaggtacctggtaaaccaatcaagcctgaatctgaagaggtggttttgtgattctgtcaagtactggaagatagagaggaaaaaagatgtgcattgaatggaaggttgcactaaataattctttttttgctcttccacatcttgtcactctgtacttgtccagagcatcaagtgaatgtaccaggtaaattccatggatgtgaaatcataggtgctgttggaatggacacttgtcaataactcctgaattagatgatcagtagcttcattttggagttttgtcttttctacaacaacacactgcttgggggatatgacaaagtcctatgtccattcctaaaaactgtagttcataatagtcatgagtctttataggatatagatagatttgagaaaaagctcactgggttactgtaatctaatcccttcagggtggggatgagcaactctcacaccccattcctgctttgagactcccaatcctagtctattgggttactgaagggtggtcagggacacttgacatcacccagaataaaactaggaacataatgacagagttcttcataaatctaaaatattccatttaaatcagtatcttt

SEQ ID NO: 75288 - DNA, 1293 bp, Homo sapiens
gtgagccagaaggcagatggttttccctggagttgggctgctctatggccctggcactcctccaactgccccggccaaactctgcctcgtgccacaggttgatggcctgcccgcctgctggcgtctgtcagtgtgctcttccgccggcgtgctcctctctacgtcctctcgacatccagctgcttgtgtcttctcccaccgatctgctcctcttcatgtccagcagcttgtgtctctaccttgctagggtctcgggtttttataggcccaggatgggggcgtggcgggccagggtgggcttggaaaatgcaacatttgggcagcaaaacagaaataccggtcctcacctaggtctgtagtggtagagccctagccagggactatgccttcctctacccagcacttcccttcccccrttccgtatcatttaaagggaccacgttcttccctacccagcactcctgtatcagttacatttaaaagaacacccttctgaagaaactcttcattaaataatagacagaagataatatgtggtcgtgggtagtggggagggggaagcaaaaacacagtctcgggataggatatagtaatttggatccattggttaaaaattcctaaagaagtgaacaactacttaggggcagagtttcttctcttttctcctcctcttcttcctcctcctccttttcctttcctcctctttcttttcttctctctgtttctctctcaggaaataaagtcaacatactgagttgctgagcagacctggccctaggcagaatcataaagtagggaagattatgtgcatcatttttactaaatactttagcttttctgtgctatccatccatctcagtacccattattcccctgctccacattgtaccctgaacttaattctgccatttgtatccattgttgttgaaaaactactgctataacacctaccagttcctcaggaccactctaatttatgatattagctcatatacaaatattataaagtcatctctactagtggcacgttcatttttagataatctattataaacaatacatgaaatgaataaatatctaaaattgaactgaaggaagcattggtgcagactgggacagaacagttaggacaaatttattgccaaagttgtttattattgacactatacatatatccactcctctcaatcacacagaaatgttgtctactcagaacttgattcatgaaaataatgtagcttaaacctgtacaactgtctcatagaactgatatttattgtttcctttgaataa

SEQ ID NO: 75289 - DNA, 598 bp, Homo sapiens
atctatgtatgagaacagataatttcatacgcaaagagaggtacagagagcattgcacttttaaaaaaaaatgtgtccaactgaacaacaaagagcagttctctgaattctgtaaattttggctaggtgaggtaggtggattgctgattggtgagatgaaacaggcaaggtgaacagaggcaatgttttggatggccttgtaagcaatgccaaagtgataataaaycactgatcatttctaagaagaggagaaatatgaccagattatcagttatgtatattgtatgcttatttatcaatgtgctataaattgtggaggagaaaccttaagtgttgtttactggcttactaaagacccaatatttcactgtgaaaagggttgagagagttaaggaattgtcaaacaaagagagttgtaggacacaaatttattattgttattacattaacaatggaaaaaatgcacatgtctataaactgaaagaaaatagctgcagttaaggaagagattgaaaataaacttgagagatggaagagtcactgaatgcaggagaaattaaggtcaggaatacagatgtagaaagtagtagaaatcatt

SEQ ID NO: 75290 - DNA, 1241 bp, Homo sapiens
accatctctatgatttcccagaaggacaggggtacattagaatgaaacatctgcccagaagagtctctaattacaagaagtgtaacacaaaaaacctatttcccgaattaattcctgaaagttgaactaatactaaatgctaaatactgaaatactcaaaatactaaaaaatactaaaatccaaggtgaaaatagactgccagtgaataaacagacttgtgataaggagatccaaaaccagattgttcctttggagacaaacagatgtcagcttcttttgtttgtttcatttctctaggccaatgtgctgactgcttattattttcagtatgataaagttttattggaaagtagcctcacctatctgtttaggtgttgtctgtggttgctttgacactgtgactgaaactgtggccgtcaaagccatggcaaagctaaggagaaacgtcttacagcattagcctttagttccaaagtccatgttcaaattcatccactattcttttttaaaaaatagatctgtcccataacaaatacatacaaacaaacacacccccacctgcacacagcctgaaaactgagatgtaatcgtttaataatgataatggaatactgcaaaatttttcctaatttttctctgtgacaccacaaatatgcattgtaccactcgtgttcagtttatgtaatgtcaatgcccatttctgcttattgactcattttatcatacaaaactgacacaagcttctgattaatctgtctccaaaggatcaaaatgctttaataaatacattgttcctttaggtctgggaagaaatgaaactgttagcttaatgtactgtgacattgaatgaaaacctctggttgcatttaactggaaagccagctagataaatccggaggacccgttaagtaaatgacaccacactttcttaatggccaattggggcctaccttcctgaagcaaataaataagaaagatttgaaatggaatttggsggtttcgttcgttggttaaattctcaaaggggtggtgtaccttggatagaaattatgacaaaaatccgtggcttaaggtaatcctaatagggagagcagagagagaagaacaaaacaatctcggttttttatgggaagaggtgaagactcacaagatgggagagagcccttcatctagcggttctcgaacgtggtgtgccccagaatcatctggggatcttgttaaaaatgtgtgttcctggtct

SEQ ID NO: 75291 - DNA, 1368 bp, Homo sapiens
actcaatgccagtgcaaaggctatgtagttcattatttcccatggtatcctacaaactacttcgttttgctctcttagtccctttcatacttgcttcaactcttcttccttccccatcttgcctgaagctgcattgctcaaatcttttcttctctctgcctttcattccactttccttatctctcttcagctcccaatcactctttttgctaactatattcaaaataaatgcctcatggtttaatactttgttgaaataaaattcccatggtgactaaaaagttgtaccagaagaacacttcatacaaactaaaattttgtatgaaacaagcttttggtaggaatggatgactaaaagacttacatttgatcttccaaattgccttctgttaatagtgtcaaaatctatatttgttcttcaaaggtagcaacagtaggcaaaacaaaaacaaacaaaaaactatatttgttagtccttttcttggttccttaataggcctgtctcatccagatagcaatagcgatgacgactttcctattattaaactcttgcactgtggcaggcactctgtgaargccttacctcatttatgtgagaacttatgaggtagttccattctacctacaaggaaactgaggcttgtagagattacacaacttgctgcagatggtgaaccttggatccgaaatcaaagcaaagcctgtgttgatagacaaacataatagagagtgggcaatgaaataattcccaatgaacagaagaaaagcctggtcaaagactgagttattttaaaccatgtttcaatgtgtccaagaactaccccctacccacctagaatttctattttccataaagcatgtcattactggtgtaatgtatttaacaccactgaaaccattcctataacctataaagtctttggcagtaaaagtatcatttccacatatcttgagtccagtcatggaaataagtggtaccaagctcagtgaagagattttctttatgtacttactattactatatttaaaacgtgatactaaatcgtattccttgggtggacatctatttattttacattatttagttatatcttggcttagagatagagggttaaataacatatttgccggttatttataggtttgactgcctataaaagaaactccaaataactgtgactgaaagacagaagtttatccctttctcatttaaaaaagtctgatgaaggaagctcagagctgttatggtttcagagttatctggcaacttagccacttctaaattttcattttacctttcccataatggagttctcattctcctcatctgaggtggtgtattagacccgtaacctagggtgtaacaaa

SEQ ID NO: 75292 - DNA, 1624 bp, Homo sapiens
ccttctcaagactcagagcattagcataataaaggttttgaaggggaggaggtcaggagaaaagataaaatatttaaattacaagtaatacagctattagttttgaagtcatagactgtagaaaataagatgatatatacatataattgatattgctcactgaaccaatttactaaaattaacaacagtgaaaattaccagcctttgaaagatatgctgcatcaagactttctatactcattagttgaaatgatctccctgtagtctctggagttgtaacacaccaattgataaacaggcactcttaatacttgaagcatgagcatccctgatgattacagacaaccactgtctccagttttgcctgtgggatattccagtaaaggtcaagtccataaaatggaaacatggttggtatgaaaataagcttctgaaaataatttctgtcatactgaaaaaaataacaaaccatcaattccaagctttagaactttctaatttttttggcaactgcaactttagctcttctttatgtaacactttctgcccttaacattctattagttttgtgccttcaagtaaacacaattcacccaccctgtcctataattacctaatgctgaataatcaggtttgtatacactttgggatttcatgattttttctaacacacctagaacacaaaatggacagatccattatgattatcagcattttcttttttagttatctaatagtttcgatcattttctaacatcctcagaaagtcatttttactgtctttccctgtgtcatgaagacacttaaaaccaaggatacattggacttcaccttttttgttgtcattactgggcatgacaggcttctgctgagttctcttaagttgagctactctttgatttgtgagcaaaggtttaaaaggctaaaaagggggaaattggttcaatatttcaagcacaatgaaacatttcttttgtcactttatttccctgctgtattaatttgtggttactcaccttctcctcggatccccaagggaaccccaaatctgactctctatgatctgacatatgaacccaaacatttctcccaataaattacatctcctgtgtaataaaacaaaattggctgctttggggtatagcagaatatttcaggcaccatttggccacagtttggttcgttgctcatatacattctgatgatggggatctctgtggcctaggttggtctgggaagaggaatgttgagttcactcactggaccaaacaatgcaggaatgttttttccctgtccattcacttaaacaatgtgccattctgtaccttataagcacttaatttattccaactctttggcctgacctgtaatccccttctccttacccatctgacccatctgtgtttcatttcccactcatcagcatccaaagagctaggcccagggcctgtttggaaccattagacagagattggcactcttccctcttcctgmgccacatcctccactggaaaaaaaatgaccatcagatcagagaacagagcctgctttgtcccctgcaacagggatctggaagcattttcaatcatttgcactctatacccactcaaacgcattaatgtga

SEQ ID NO: 75293 - DNA, 1320 bp, Homo sapiens
tatgtgtatatatatatacacacacacattttacatttggcttaggccctgagctcattcaacaaaaactggtatgcccaaaagagtaatagagtataactagcataatatgactgctcaatgaaatcagctgtgtaggttgccaaaggaacagcatcgttttatggaaagagttctgattataaagcagatgcaagaataaccccagagtgacaaggcatggtggctcatgcctgtaatcccagcacttcgggaggccaaggcaggcagatcacttgagtttaggaattggagacctgcctgcctggccaatgtggagaaaccttgtctcgactaaaagtacaaaaattatctgggcatggtggtgcacgcctgtagtcccagatatttgggaggctgaggcacgagattctcttgaacccaggagctggaggtttcagtgagctgagatcgcaacactgcactccagcctgaatgacagagtgagaccctgtctcaaaaactacaataatattattactaataaaataatcccagggaagtcctaggaacacaggaaatagacatctaacaaggtgtgggctggtcatgaggtatcaagggctaagtctgctcaaggtaattcaattccattaaaatgtacctgtcacatcctccactaaagtattattctagattatgcagaagacaccaaggctagtgatgcagggggcttgctgtcatgaaatctatgatcttggtagctggatggaggagagagttggtaggaggaaatatattaggtggaatatatttctaggcagctagaattagaatcaaaatttcaatgtagtcaaaaagcacacctctctgaaagtagaactcaaactatctcaacctctctgaaacctagggagacctcygggtttccttcttactatgccttctttatctcatctttatggaatccatttcctccccttaagagcaccttcactactgagcactccttgttgttaataccacctcgctctaattgttcatgcattccagctcagctattaagtatggttatacctagttgtatgtttccatggtgtgtttaattttacatatttctgcagtggctgcacattcttgagaagatgcatgtacttttctaccttttgcataagatggtaagttccttcaaggacaaaaactttatcctcttccttagaaggccccacatcttctcataaagcatttgacactttaggtatgcataaatctgctattcttatgttaatccacgcttattacagaagcacaaatttgagttctttttcatcctctggatcc

SEQ ID NO: 75294 - DNA, 1085 bp, Homo sapiens
tgcacattacttaaaagtgttgttttattactaatctacctgacatgctaagtttgaaaaacctgttatatattcaactgctgacattgagacgaatattaaatatacaagcctgtaggtctgggaagaggtctgggctagatacataaattttggaggtctagctttttagagtccttaaagccatgagactggatgagctcataggggtaaatagaagaggactgaggactaacctcaggaacactaagagactggatgaagaggaggaaccagcaaatgagactaaggagtcaccagtaaagaagagaaccaaatgattgagctgtccatggaaaactagtgaagacagcatactgaggagaaaagaatgatcaaccatgtccaatgctgtttacaagctgagataaaataaagactgagaacagaccattcgatttagcaaggtggaggtcactggcaatggcaggtataaatatatgccattttaaaatctgtatgattcaattttatctcatttcacaagttaatacatgcaacacttggcatgcatacaatgttaatttttataaactacatcaatataatatgcaagttatagcaatattttacaattgagaaaacaagttgttttcaatttttttttaaatatttttaatttttttatttttgagacagggtctcactctgtcacccaggctgaagtgcagtggtgcaatgacagctcactgtagcgtcgccttcctgggctcaagcaatcttccagcctgagcctcctgagtagctaggattacaggtgcacaccaccatgcccagctaattcatttttttttattctgacagggtctcattatgttaccctggctggtgtcaaactcctgggctcaagcaggcctcccaaagtgctgggattacaggtatgggtcaccatgtctggcctcaattttttaagcgtattaaaactttccaacatttrtccaaagttagattgtgatatccgacttcatctgaatttttttttttttgagatggagtatcactgtgtcgcccaggctggagtgcagtggcacgatcttggctcactg

SEQ ID NO: 75295 - DNA, 643 bp, Homo sapiens
tgtattccatgaagctacctagaaaaaatgacacttgttcatctcctctccctctcaagtcctgtctttcctctgtccctcccctctggctcagtcctgtttgtccttaaaagctcagctctgccctcagcttttccaggtgccttccctgaacctttgagctagactcagtgatgtcctctgcccctccgaacctcatgcacactcctgtcgctgggcttgttacattacaacggaatgcctctttgtgtatcttttcccccacctcagctgtaaggatcttcagagaaggaattgggttttgtcagttttgtctccccagcacataacacagttcctaacatgtaataatactaacagctaatttctggtatcatttacaaaataccacataccatattaactactgtgcatggattaactcacaaatcctcacagcagccattgattattattcccatctcacagaggagcagcaggattcagagccttaaggaatttgcccagagttacacagttggtaggggcagagccaggtgacaggcagtctgacccctgtgctgtggactccagtgttatgttgcactcagtatatgtccragccacatttctctctttttctttctgtcagagcgtcatgatg

SEQ ID NO: 75296 - DNA, 947 bp, Homo sapiens
ctgtttcaaaatatctcatgtaacttataaatttgagtctcccctgcctggtattccatcacgcgtggtcctgccatcctgagatgtcagcagagctggggttggtgttggaaacacaggcgttcttcactttccgaatgagcagtggcttcctagagaaggctcatcctggaaagtcagggtggggctgcaggggagctctctggacttacactcgggggtcctcagccatctctgccttcaggtggcaccaacaggatcaaatgttaattttttctcatggctcaatgascactttttcccaggctacttggctttcttgtggcttcccacgtttcttatctgcatctgcagtagacacaagtttatatctatactttagaagcagacaatggaaggaataaaaccacattcctcatttattaaagggaataaaattaaatgtcttactataaaaaaaaataaataaatttgcgtacctactatatatccacaaaaatcaaaaataaaaaatggtttaaaataaaacaaatttgaaattaaaagactacttttaaatgtgacatttattgtcagttttacctcaataaagttgctaaaaaattataactgattaataacagctctacaaatcataatgtgtcatatccagcaaaaatactaatcagaaattcatacttttaaaagagcataataaaatgagaaagggactaaaaattaatgagctaagaatctgctgaagaagttagaaaaataaataatataaaccccaaaagaaaaatcacaaaggataggttatatattcaaaggaagtagaaggaaaaaatataaggtctgctaatattaagttttaggaaagcagtgagaagcaagaattcttgtacattacttccgaaagtgttatttggaataaccattcaggaagaaaactagctgaagtgaagtta

SEQ ID NO: 75297 - DNA, 857 bp, Homo sapiens
tgccaagtaggtctctttgggttctcatgacaacacatctaggaatactcctctggctcacagactgggtgacataaaaagctgccaattttatgcagaaccttgagtacaaaagggctctgcagcagatccagaatgtaatataatcaatcacacaattaggtcaggtagtctgaaagacctgatggtgctattgtcatcagtggtagaaaagatgcagtgtagaatttatcccaagccatagaggargtatcataatgacctaccaagtcattaaattgaggaaatctagctgcatccattataaagtagaaatggtacaatcaggataaaacatgagcagtaagtagtagagatgatgagttaagttttatgagcagataggcccccatgtgactcacaatagtttcttcagcactcccctgtcatttcacatctatagccatatgcagctatgactcgctgaaaaaggaggaaagaggtcagcttagtacatggttgaaatacagtagtaaccttgaaatacagtagctcaaaaataatctcccagtaggcagaactttacatggtgtaccaggtcatcttttttatatggaagaaaaagttggctgaggtgagaatatatatagactcaagggcagcaaccactgactttgctgatttttctgggttctgaaagggaaagtaatatacaagtgaagataagaagctccaggagagagttatgtgaagggtagattaacatatgatggggaggagcatactaatactcatcagaaaacactcaccatggaagaggaacagaaaaatcaatcagacaaaataaactggtcaattgatgttagagtcttttctga

SEQ ID NO: 75298 - DNA, 638 bp, Homo sapiens
agacttatttcttcttggacacacctacggtgcggccacagcggccagtggtcttggtgtgctggcctcggacacgaaggccccagaagtgactcagccctctatgggcccgaatattcttcagtcgctccaggtcttcacggagctcgttgtccagaccgttggccaggacctggttatattttccatcctttacatccttctgtctgttcaaaaaccagtcggggatcttgtactggcgtggattctgcataatggtgaccacacgttccacctcatcctcaatgagctctcccgccctcttggtgaggtcaatgtctgctttcctcaataccacatgagcatatcttcggcccacacccttaatggcagtgatggcaaaggctattttccaccgcccatcgatgttggtgttgagtactcgcaaaatatgctggaacttttcagggatcactagagacatggcagcagcacaagcggcggcgtgtaggcctcctgtggaagaatcttttcaataattttttaatctcatctaatggttagacaatattcaaaatctcctaattgtccccagaagtctttttagctgtgctttggggtttttttttttttgttctcccccsaccccatattatatg

SEQ ID NO: 75299 - DNA, 629 bp, Homo sapiens
ttttatttatatatatttccgttctgggtcacttaacctatataggctcataactatgatacctttattgtggattattcatttcttcctgatttttaaactcaattttgccacaaattttgttattttcgatgttattcggtcaactsagttttcttttctatttttttctccttctttcttcccccctcttttccatactctttttcttccttcttttcttcttcttcttccctctctgtcttacaaagtttacatatgcaatcattctcatttcctgttcttctaattttctgtttttaaccctataattttgaaagtaagatttgctgaatttttttcatctcatataaaagtcttttatttcaatatgagtgtttaagtcattgttacgtagtgctataaatgccgtaattttcttgttattttatttcgtgctttcagttttttatgtttctctttctatgttacttctttcctatgtactttttttcctagtgtaattgcttttcaaagaaaaattttgcaaattaattatttgaagagatgttaatggatgctctggcaaaaaaaatcacaacactttctatgactacacaagacagggaaatatttgggcattgttttgg

SEQ ID NO: 75300 - DNA, 612 bp, Homo sapiens
ccctggccaaagcagaacaagctgagcaccaaaatattggatggctgcccattgaataaaatagaaggccatgactgcatactgatatcaataaagaagtgaatggaggagaatgaatgttcattcttatagcaggatgcccactaacatatgtagaagcaatgatggatataaaaaaaaaatcaccctccagccactctcctagtagcggatgactcatagactctgaattttgacaactgtcccaaccaagtctctttatcctttctgatcctacttaggaacccacattgcacttatttgttgtatctcattatcaccttcaatctggaatagttgcttgttctctcctagctgtcatgtctctgactttcttaaggagaacaagattttcattctctaggatgaccctcaacctaggttcgccctatgtttcatgctgatgagactctggtcatggattcttggcascgatatgcagaacagattctggcttttcacggtgtctcacatcaagagaaatataaggtccattcatcgtacctaatcatggtggtgtcttccaagtttctccaccctaaattgactattttttctctttgtatttcccta

SEQ ID NO: 75301 - DNA, 2907 bp, Homo sapiens
tcaaatgtgcaattcaatgatttattgtgcaatcatctgcataaaccagttttagaatatttctataccccaataagatccctaatgcctgttcacaatagttagtattaatcgaatgcttacttattgactcattgttctgagtgctttatttgtagtaactttcttkgcagcaatactctgagaggttttgttattatctcccccattttactaatgcagaaaatgagttgtgggaaggttagataactgcccaaggtcactcaggccctgggtgatcttagtccagttgtctgtcccagatttgaactcagaacgtctaacctcaaagtttgtgtcctttcctacttctctcttctacttccacatcaggaaagaaactgagcaactgtttgtctatttgcatgctggtttgggggagtggccttgtcccagttctctttcttattccatatttttacatgccacaaagacacggtaaccctctttaagtaatctgctgttatgaagaggtggttgacaatgtcaaattgcatcttcagaggtgtcatctttttaagcaagggataggggtgtgtgcaaaagaggaaggaggggagagtcatgctcctgttaatagtgaatgctggaggctgtactttttcatatactccatggatccagtgtaccatagaacaatgcagttgatgcaattgagaagaaggacggggccactgtccctatatgcatgccgtctagggatgagatttgggctggaagactctgagtacaatgccctggaaaggagatggaacccatgtgaggctcaggacaatctacctgtctggctggttcttatcccctctgagtatcagaggagcagacgcctgcaaatgttgtcctctgggatccagacaaaaggtattttttataaatacttgatgtctttaatagactacaagatagtctgggctctatcgaacaagaatgagaaattataatgagacaattgcctaagatgaaaagacaacaaaatgaaatttaaaggcaaatggttggaataagaaaaaaatggcaaggaaaaccaaaggttccattgtagaatcaaaatcgaagtgggatgatgtagagagccacagtgatattaaggaaaggcaaatgtgatgaaagcagtggagaaaagtattgaagacagagaacagaagccaaaactgaagaatcaaatgtatttctgaacaataaaacagcaatgatagatagaattactaattaaacatcacacacacacacatttttttctacacattttctgcaaattaagacattaccacattacattagagaaaaatatgaaataactccaacacctagaagaaccagagcaaaaatttcccttataaacacaaattctataactatccaataaaaactgggcaaattaaacccaaagtaatacaaagttagcgggttttagatttctcctgtgtaatgtcaaacagcccaaaataagagaatccaaaacaccgttgaaggaaaactattgtaacacaatagttaccactgccactttttctatgtgcaggcaataaaaagatttccagatatctgaaatatatatttcccggggtatatttcttaaaaaaaaattagttgaaaaaattcattctatgtgaaatgtagaacaaaactaagaatgtaagactagaaaattctgtgaaaacaaaaaataaagctggtggtgacaaaacagttaaaacatggaattaattcaaaaatatttcttaataatatcaaagccaacactgatttagtgcttactatcttcctgcactgtgctaagtattttacacatacctttatttagaagacttcatgcagatgtcaaaaactattcaacatggccaggcgtggggctcacacctataatcctagcacttgcggaggccaaagcaagaagatcacttgaggtcaggagttcaaggccagcctgggcaacatagcaagatcctgcttctaaaaagttatttattaaataaaagatttaaaatataaaaacaggaatgtaataaaaacaatctaagctttaaatcttcagattgtattatgaaaaccaaccactgaggaaagagtgaaagaagttctagaagttcttagttcttcattttaatattgaaaagacaatgatatgcaaaagaaactgttttaattttcatttcctttgatgatttgaggcatattaggctgcccacaaagtaaaaaataaaattaaaatataaggtaaatgaaaagttacaaagcatgttatgacaaaaatagtaggcataaaagaaattatcaatatgctaaactttttaatgtaacaataggagaaacataagcaaacaccttcaaataaaacaaagcaagaatccaaataggcaattgaaaaaacaatactcattgacaattaacacgaaaaaaatgtgaacttcataagtaacttttacaagtgcaaattaaaacagcaatggcataccatgttaaagccatcaaactggcaaaatgcaaaagaacaataatccctgctgttagctaggattgagggagagggccctttaatatactgccagtagaagagtaaattggtaagttggtactcttttggaggggaatttggcaacatacatcaaaagctttctaaatgcaaataccttttgactcaagaattgtttttccaaaagacatactcagaggtggccacaaagatttaactactctgatgggaagagagatcttcatatatgggacttctcccttgaaatggaggataatacacaagccacaaatagaaagagaacaacagtggattattaaaaggcagggccttcctgtctattggatgccctgctcgggtataacacaggaaccatgggctcccaagggaccctg

SEQ ID NO: 75302 - DNA, 2907 bp, Homo sapiens
tcaaatgtgcaattcaatgatttattgtgcaatcatctgcataaaccagttttagaatatttctataccccaataagatccctaatgcctgttcacaatagttagtattaatcgaatgcttacttattgactcattgttctgagtgctttatttgtagtaactttcttggcagcaatactctgagaggttytgttattatctcccccattttactaatgcagaaaatgagttgtgggaaggttagataactgcccaaggtcactcaggccctgggtgatcttagtccagttgtctgtcccagatttgaactcagaacgtctaacctcaaagtttgtgtcctttcctacttctctcttctacttccacatcaggaaagaaactgagcaactgtttgtctatttgcatgctggtttgggggagtggccttgtcccagttctctttcttattccatatttttacatgccacaaagacacggtaaccctctttaagtaatctgctgttatgaagaggtggttgacaatgtcaaattgcatcttcagaggtgtcatctttttaagcaagggataggggtgtgtgcaaaagaggaaggaggggagagtcatgctcctgttaatagtgaatgctggaggctgtactttttcatatactccatggatccagtgtaccatagaacaatgcagttgatgcaattgagaagaaggacggggccactgtccctatatgcatgccgtctagggatgagatttgggctggaagactctgagtacaatgccctggaaaggagatggaacccatgtgaggctcaggacaatctacctgtctggctggttcttatcccctctgagtatcagaggagcagacgcctgcaaatgttgtcctctgggatccagacaaaaggtattttttataaatacttgatgtctttaatagactacaagatagtctgggctctatcgaacaagaatgagaaattataatgagacaattgcctaagatgaaaagacaacaaaatgaaatttaaaggcaaatggttggaataagaaaaaaatggcaaggaaaaccaaaggttccattgtagaatcaaaatcgaagtgggatgatgtagagagccacagtgatattaaggaaaggcaaatgtgatgaaagcagtggagaaaagtattgaagacagagaacagaagccaaaactgaagaatcaaatgtatttctgaacaataaaacagcaatgatagatagaattactaattaaacatcacacacacacacatttttttctacacattttctgcaaattaagacattaccacattacattagagaaaaatatgaaataactccaacacctagaagaaccagagcaaaaatttcccttataaacacaaattctataactatccaataaaaactgggcaaattaaacccaaagtaatacaaagttagcgggttttagatttctcctgtgtaatgtcaaacagcccaaaataagagaatccaaaacaccgttgaaggaaaactattgtaacacaatagttaccactgccactttttctatgtgcaggcaataaaaagatttccagatatctgaaatatatatttcccggggtatatttcttaaaaaaaaattagttgaaaaaattcattctatgtgaaatgtagaacaaaactaagaatgtaagactagaaaattctgtgaaaacaaaaaataaagctggtggtgacaaaacagttaaaacatggaattaattcaaaaatatttcttaataatatcaaagccaacactgatttagtgcttactatcttcctgcactgtgctaagtattttacacatacctttatttagaagacttcatgcagatgtcaaaaactattcaacatggccaggcgtggggctcacacctataatcctagcacttgcggaggccaaagcaagaagatcacttgaggtcaggagttcaaggccagcctgggcaacatagcaagatcctgcttctaaaaagttatttattaaataaaagatttaaaatataaaaacaggaatgtaataaaaacaatctaagctttaaatcttcagattgtattatgaaaaccaaccactgaggaaagagtgaaagaagttctagaagttcttagttcttcattttaatattgaaaagacaatgatatgcaaaagaaactgttttaattttcatttcctttgatgatttgaggcatattaggctgcccacaaagtaaaaaataaaattaaaatataaggtaaatgaaaagttacaaagcatgttatgacaaaaatagtaggcataaaagaaattatcaatatgctaaactttttaatgtaacaataggagaaacataagcaaacaccttcaaataaaacaaagcaagaatccaaataggcaattgaaaaaacaatactcattgacaattaacacgaaaaaaatgtgaacttcataagtaacttttacaagtgcaaattaaaacagcaatggcataccatgttaaagccatcaaactggcaaaatgcaaaagaacaataatccctgctgttagctaggattgagggagagggccctttaatatactgccagtagaagagtaaattggtaagttggtactcttttggaggggaatttggcaacatacatcaaaagctttctaaatgcaaataccttttgactcaagaattgtttttccaaaagacatactcagaggtggccacaaagatttaactactctgatgggaagagagatcttcatatatgggacttctcccttgaaatggaggataatacacaagccacaaatagaaagagaacaacagtggattattaaaaggcagggccttcctgtctattggatgccctgctcgggtataacacaggaaccatgggctcccaagggaccctg

SEQ ID NO: 75303 - DNA, 2907 bp, Homo sapiens
tcaaatgtgcaattcaatgatttattgtgcaatcatctgcataaaccagttttagaatatttctataccccaataagatccctaatgcctgttcacaatagttagtattaatcgaatgcttacttattgactcattgttctgagtgctttatttgtagtaactttcttggcagcaatactctgagaggttttgttattatctcccccattttactaatgcagaaaatgagttgtgggaaggttagataactgcccaaggtcrctcaggccctgggtgatcttagtccagttgtctgtcccagatttgaactcagaacgtctaacctcaaagtttgtgtcctttcctacttctctcttctacttccacatcaggaaagaaactgagcaactgtttgtctatttgcatgctggtttgggggagtggccttgtcccagttctctttcttattccatatttttacatgccacaaagacacggtaaccctctttaagtaatctgctgttatgaagaggtggttgacaatgtcaaattgcatcttcagaggtgtcatctttttaagcaagggataggggtgtgtgcaaaagaggaaggaggggagagtcatgctcctgttaatagtgaatgctggaggctgtactttttcatatactccatggatccagtgtaccatagaacaatgcagttgatgcaattgagaagaaggacggggccactgtccctatatgcatgccgtctagggatgagatttgggctggaagactctgagtacaatgccctggaaaggagatggaacccatgtgaggctcaggacaatctacctgtctggctggttcttatcccctctgagtatcagaggagcagacgcctgcaaatgttgtcctctgggatccagacaaaaggtattttttataaatacttgatgtctttaatagactacaagatagtctgggctctatcgaacaagaatgagaaattataatgagacaattgcctaagatgaaaagacaacaaaatgaaatttaaaggcaaatggttggaataagaaaaaaatggcaaggaaaaccaaaggttccattgtagaatcaaaatcgaagtgggatgatgtagagagccacagtgatattaaggaaaggcaaatgtgatgaaagcagtggagaaaagtattgaagacagagaacagaagccaaaactgaagaatcaaatgtatttctgaacaataaaacagcaatgatagatagaattactaattaaacatcacacacacacacatttttttctacacattttctgcaaattaagacattaccacattacattagagaaaaatatgaaataactccaacacctagaagaaccagagcaaaaatttcccttataaacacaaattctataactatccaataaaaactgggcaaattaaacccaaagtaatacaaagttagcgggttttagatttctcctgtgtaatgtcaaacagcccaaaataagagaatccaaaacaccgttgaaggaaaactattgtaacacaatagttaccactgccactttttctatgtgcaggcaataaaaagatttccagatatctgaaatatatatttcccggggtatatttcttaaaaaaaaattagttgaaaaaattcattctatgtgaaatgtagaacaaaactaagaatgtaagactagaaaattctgtgaaaacaaaaaataaagctggtggtgacaaaacagttaaaacatggaattaattcaaaaatatttcttaataatatcaaagccaacactgatttagtgcttactatcttcctgcactgtgctaagtattttacacatacctttatttagaagacttcatgcagatgtcaaaaactattcaacatggccaggcgtggggctcacacctataatcctagcacttgcggaggccaaagcaagaagatcacttgaggtcaggagttcaaggccagcctgggcaacatagcaagatcctgcttctaaaaagttatttattaaataaaagatttaaaatataaaaacaggaatgtaataaaaacaatctaagctttaaatcttcagattgtattatgaaaaccaaccactgaggaaagagtgaaagaagttctagaagttcttagttcttcattttaatattgaaaagacaatgatatgcaaaagaaactgttttaattttcatttcctttgatgatttgaggcatattaggctgcccacaaagtaaaaaataaaattaaaatataaggtaaatgaaaagttacaaagcatgttatgacaaaaatagtaggcataaaagaaattatcaatatgctaaactttttaatgtaacaataggagaaacataagcaaacaccttcaaataaaacaaagcaagaatccaaataggcaattgaaaaaacaatactcattgacaattaacacgaaaaaaatgtgaacttcataagtaacttttacaagtgcaaattaaaacagcaatggcataccatgttaaagccatcaaactggcaaaatgcaaaagaacaataatccctgctgttagctaggattgagggagagggccctttaatatactgccagtagaagagtaaattggtaagttggtactcttttggaggggaatttggcaacatacatcaaaagctttctaaatgcaaataccttttgactcaagaattgtttttccaaaagacatactcagaggtggccacaaagatttaactactctgatgggaagagagatcttcatatatgggacttctcccttgaaatggaggataatacacaagccacaaatagaaagagaacaacagtggattattaaaaggcagggccttcctgtctattggatgccctgctcgggtataacacaggaaccatgggctcccaagggaccctg

SEQ ID NO: 75304 - DNA, 2907 bp, Homo sapiens
tcaaatgtgcaattcaatgatttattgtgcaatcatctgcataaaccagttttagaatatttctataccccaataagatccctaatgcctgttcacaatagttagtattaatcgaatgcttacttattgactcattgttctgagtgctttatttgtagtaactttcttggcagcaatactctgagaggttttgttattatctcccccattttactaatgcagaaaatgagttgtgggaaggttagataactgcccaaggtcactcaggccctgggtgatcttagtccagttgtctgtcycagatttgaactcagaacgtctaacctcaaagtttgtgtcctttcctacttctctcttctacttccacatcaggaaagaaactgagcaactgtttgtctatttgcatgctggtttgggggagtggccttgtcccagttctctttcttattccatatttttacatgccacaaagacacggtaaccctctttaagtaatctgctgttatgaagaggtggttgacaatgtcaaattgcatcttcagaggtgtcatctttttaagcaagggataggggtgtgtgcaaaagaggaaggaggggagagtcatgctcctgttaatagtgaatgctggaggctgtactttttcatatactccatggatccagtgtaccatagaacaatgcagttgatgcaattgagaagaaggacggggccactgtccctatatgcatgccgtctagggatgagatttgggctggaagactctgagtacaatgccctggaaaggagatggaacccatgtgaggctcaggacaatctacctgtctggctggttcttatcccctctgagtatcagaggagcagacgcctgcaaatgttgtcctctgggatccagacaaaaggtattttttataaatacttgatgtctttaatagactacaagatagtctgggctctatcgaacaagaatgagaaattataatgagacaattgcctaagatgaaaagacaacaaaatgaaatttaaaggcaaatggttggaataagaaaaaaatggcaaggaaaaccaaaggttccattgtagaatcaaaatcgaagtgggatgatgtagagagccacagtgatattaaggaaaggcaaatgtgatgaaagcagtggagaaaagtattgaagacagagaacagaagccaaaactgaagaatcaaatgtatttctgaacaataaaacagcaatgatagatagaattactaattaaacatcacacacacacacatttttttctacacattttctgcaaattaagacattaccacattacattagagaaaaatatgaaataactccaacacctagaagaaccagagcaaaaatttcccttataaacacaaattctataactatccaataaaaactgggcaaattaaacccaaagtaatacaaagttagcgggttttagatttctcctgtgtaatgtcaaacagcccaaaataagagaatccaaaacaccgttgaaggaaaactattgtaacacaatagttaccactgccactttttctatgtgcaggcaataaaaagatttccagatatctgaaatatatatttcccggggtatatttcttaaaaaaaaattagttgaaaaaattcattctatgtgaaatgtagaacaaaactaagaatgtaagactagaaaattctgtgaaaacaaaaaataaagctggtggtgacaaaacagttaaaacatggaattaattcaaaaatatttcttaataatatcaaagccaacactgatttagtgcttactatcttcctgcactgtgctaagtattttacacatacctttatttagaagacttcatgcagatgtcaaaaactattcaacatggccaggcgtggggctcacacctataatcctagcacttgcggaggccaaagcaagaagatcacttgaggtcaggagttcaaggccagcctgggcaacatagcaagatcctgcttctaaaaagttatttattaaataaaagatttaaaatataaaaacaggaatgtaataaaaacaatctaagctttaaatcttcagattgtattatgaaaaccaaccactgaggaaagagtgaaagaagttctagaagttcttagttcttcattttaatattgaaaagacaatgatatgcaaaagaaactgttttaattttcatttcctttgatgatttgaggcatattaggctgcccacaaagtaaaaaataaaattaaaatataaggtaaatgaaaagttacaaagcatgttatgacaaaaatagtaggcataaaagaaattatcaatatgctaaactttttaatgtaacaataggagaaacataagcaaacaccttcaaataaaacaaagcaagaatccaaataggcaattgaaaaaacaatactcattgacaattaacacgaaaaaaatgtgaacttcataagtaacttttacaagtgcaaattaaaacagcaatggcataccatgttaaagccatcaaactggcaaaatgcaaaagaacaataatccctgctgttagctaggattgagggagagggccctttaatatactgccagtagaagagtaaattggtaagttggtactcttttggaggggaatttggcaacatacatcaaaagctttctaaatgcaaataccttttgactcaagaattgtttttccaaaagacatactcagaggtggccacaaagatttaactactctgatgggaagagagatcttcatatatgggacttctcccttgaaatggaggataatacacaagccacaaatagaaagagaacaacagtggattattaaaaggcagggccttcctgtctattggatgccctgctcgggtataacacaggaaccatgggctcccaagggaccctg

SEQ ID NO: 75305 - DNA, 2907 bp, Homo sapiens
tcaaatgtgcaattcaatgatttattgtgcaatcatctgcataaaccagttttagaatatttctataccccaataagatccctaatgcctgttcacaatagttagtattaatcgaatgcttacttattgactcattgttctgagtgctttatttgtagtaactttcttggcagcaatactctgagaggttttgttattatctcccccattttactaatgcagaaaatgagttgtgggaaggttagataactgcccaaggtcactcaggccctgggtgatcttagtccagttgtctgtcccagatttgaactcagaacgtctaacctcaaagtttgtgtcctttcctacttctctcttctacttccacatcaggaaagaaactgagcaactgtttgtctrtttgcatgctggtttgggggagtggccttgtcccagttctctttcttattccatatttttacatgccacaaagacacggtaaccctctttaagtaatctgctgttatgaagaggtggttgacaatgtcaaattgcatcttcagaggtgtcatctttttaagcaagggataggggtgtgtgcaaaagaggaaggaggggagagtcatgctcctgttaatagtgaatgctggaggctgtactttttcatatactccatggatccagtgtaccatagaacaatgcagttgatgcaattgagaagaaggacggggccactgtccctatatgcatgccgtctagggatgagatttgggctggaagactctgagtacaatgccctggaaaggagatggaacccatgtgaggctcaggacaatctacctgtctggctggttcttatcccctctgagtatcagaggagcagacgcctgcaaatgttgtcctctgggatccagacaaaaggtattttttataaatacttgatgtctttaatagactacaagatagtctgggctctatcgaacaagaatgagaaattataatgagacaattgcctaagatgaaaagacaacaaaatgaaatttaaaggcaaatggttggaataagaaaaaaatggcaaggaaaaccaaaggttccattgtagaatcaaaatcgaagtgggatgatgtagagagccacagtgatattaaggaaaggcaaatgtgatgaaagcagtggagaaaagtattgaagacagagaacagaagccaaaactgaagaatcaaatgtatttctgaacaataaaacagcaatgatagatagaattactaattaaacatcacacacacacacatttttttctacacattttctgcaaattaagacattaccacattacattagagaaaaatatgaaataactccaacacctagaagaaccagagcaaaaatttcccttataaacacaaattctataactatccaataaaaactgggcaaattaaacccaaagtaatacaaagttagcgggttttagatttctcctgtgtaatgtcaaacagcccaaaataagagaatccaaaacaccgttgaaggaaaactattgtaacacaatagttaccactgccactttttctatgtgcaggcaataaaaagatttccagatatctgaaatatatatttcccggggtatatttcttaaaaaaaaattagttgaaaaaattcattctatgtgaaatgtagaacaaaactaagaatgtaagactagaaaattctgtgaaaacaaaaaataaagctggtggtgacaaaacagttaaaacatggaattaattcaaaaatatttcttaataatatcaaagccaacactgatttagtgcttactatcttcctgcactgtgctaagtattttacacatacctttatttagaagacttcatgcagatgtcaaaaactattcaacatggccaggcgtggggctcacacctataatcctagcacttgcggaggccaaagcaagaagatcacttgaggtcaggagttcaaggccagcctgggcaacatagcaagatcctgcttctaaaaagttatttattaaataaaagatttaaaatataaaaacaggaatgtaataaaaacaatctaagctttaaatcttcagattgtattatgaaaaccaaccactgaggaaagagtgaaagaagttctagaagttcttagttcttcattttaatattgaaaagacaatgatatgcaaaagaaactgttttaattttcatttcctttgatgatttgaggcatattaggctgcccacaaagtaaaaaataaaattaaaatataaggtaaatgaaaagttacaaagcatgttatgacaaaaatagtaggcataaaagaaattatcaatatgctaaactttttaatgtaacaataggagaaacataagcaaacaccttcaaataaaacaaagcaagaatccaaataggcaattgaaaaaacaatactcattgacaattaacacgaaaaaaatgtgaacttcataagtaacttttacaagtgcaaattaaaacagcaatggcataccatgttaaagccatcaaactggcaaaatgcaaaagaacaataatccctgctgttagctaggattgagggagagggccctttaatatactgccagtagaagagtaaattggtaagttggtactcttttggaggggaatttggcaacatacatcaaaagctttctaaatgcaaataccttttgactcaagaattgtttttccaaaagacatactcagaggtggccacaaagatttaactactctgatgggaagagagatcttcatatatgggacttctcccttgaaatggaggataatacacaagccacaaatagaaagagaacaacagtggattattaaaaggcagggccttcctgtctattggatgccctgctcgggtataacacaggaaccatgggctcccaagggaccctg

SEQ ID NO: 75306 - DNA, 2907 bp, Homo sapiens
tcaaatgtgcaattcaatgatttattgtgcaatcatctgcataaaccagttttagaatatttctataccccaataagatccctaatgcctgttcacaatagttagtattaatcgaatgcttacttattgactcattgttctgagtgctttatttgtagtaactttcttggcagcaatactctgagaggttttgttattatctcccccattttactaatgcagaaaatgagttgtgggaaggttagataactgcccaaggtcactcaggccctgggtgatcttagtccagttgtctgtcccagatttgaactcagaacgtctaacctcaaagtttgtgtcctttcctacttctctcttctacttccacatcaggaaagaaactgagcaactgtttgtctatttgcatgctggtttgggggagtggccttgtcccagttctctttcttattccatatttttacatgccacaaagacacggtaaccctctttaagtaatctgctgttatgaagaggtggttgacaatgtcaaattgcatcttcagaggtgtcatctttttaagcaagggataggggtgtgtgcaaaasaggaaggaggggagagtcatgctcctgttaatagtgaatgctggaggctgtactttttcatatactccatggatccagtgtaccatagaacaatgcagttgatgcaattgagaagaaggacggggccactgtccctatatgcatgccgtctagggatgagatttgggctggaagactctgagtacaatgccctggaaaggagatggaacccatgtgaggctcaggacaatctacctgtctggctggttcttatcccctctgagtatcagaggagcagacgcctgcaaatgttgtcctctgggatccagacaaaaggtattttttataaatacttgatgtctttaatagactacaagatagtctgggctctatcgaacaagaatgagaaattataatgagacaattgcctaagatgaaaagacaacaaaatgaaatttaaaggcaaatggttggaataagaaaaaaatggcaaggaaaaccaaaggttccattgtagaatcaaaatcgaagtgggatgatgtagagagccacagtgatattaaggaaaggcaaatgtgatgaaagcagtggagaaaagtattgaagacagagaacagaagccaaaactgaagaatcaaatgtatttctgaacaataaaacagcaatgatagatagaattactaattaaacatcacacacacacacatttttttctacacattttctgcaaattaagacattaccacattacattagagaaaaatatgaaataactccaacacctagaagaaccagagcaaaaatttcccttataaacacaaattctataactatccaataaaaactgggcaaattaaacccaaagtaatacaaagttagcgggttttagatttctcctgtgtaatgtcaaacagcccaaaataagagaatccaaaacaccgttgaaggaaaactattgtaacacaatagttaccactgccactttttctatgtgcaggcaataaaaagatttccagatatctgaaatatatatttcccggggtatatttcttaaaaaaaaattagttgaaaaaattcattctatgtgaaatgtagaacaaaactaagaatgtaagactagaaaattctgtgaaaacaaaaaataaagctggtggtgacaaaacagttaaaacatggaattaattcaaaaatatttcttaataatatcaaagccaacactgatttagtgcttactatcttcctgcactgtgctaagtattttacacatacctttatttagaagacttcatgcagatgtcaaaaactattcaacatggccaggcgtggggctcacacctataatcctagcacttgcggaggccaaagcaagaagatcacttgaggtcaggagttcaaggccagcctgggcaacatagcaagatcctgcttctaaaaagttatttattaaataaaagatttaaaatataaaaacaggaatgtaataaaaacaatctaagctttaaatcttcagattgtattatgaaaaccaaccactgaggaaagagtgaaagaagttctagaagttcttagttcttcattttaatattgaaaagacaatgatatgcaaaagaaactgttttaattttcatttcctttgatgatttgaggcatattaggctgcccacaaagtaaaaaataaaattaaaatataaggtaaatgaaaagttacaaagcatgttatgacaaaaatagtaggcataaaagaaattatcaatatgctaaactttttaatgtaacaataggagaaacataagcaaacaccttcaaataaaacaaagcaagaatccaaataggcaattgaaaaaacaatactcattgacaattaacacgaaaaaaatgtgaacttcataagtaacttttacaagtgcaaattaaaacagcaatggcataccatgttaaagccatcaaactggcaaaatgcaaaagaacaataatccctgctgttagctaggattgagggagagggccctttaatatactgccagtagaagagtaaattggtaagttggtactcttttggaggggaatttggcaacatacatcaaaagctttctaaatgcaaataccttttgactcaagaattgtttttccaaaagacatactcagaggtggccacaaagatttaactactctgatgggaagagagatcttcatatatgggacttctcccttgaaatggaggataatacacaagccacaaatagaaagagaacaacagtggattattaaaaggcagggccttcctgtctattggatgccctgctcgggtataacacaggaaccatgggctcccaagggaccctg

SEQ ID NO: 75307 - DNA, 2907 bp, Homo sapiens
tcaaatgtgcaattcaatgatttattgtgcaatcatctgcataaaccagttttagaatatttctataccccaataagatccctaatgcctgttcacaatagttagtattaatcgaatgcttacttattgactcattgttctgagtgctttatttgtagtaactttcttggcagcaatactctgagaggttttgttattatctcccccattttactaatgcagaaaatgagttgtgggaaggttagataactgcccaaggtcactcaggccctgggtgatcttagtccagttgtctgtcccagatttgaactcagaacgtctaacctcaaagtttgtgtcctttcctacttctctcttctacttccacatcaggaaagaaactgagcaactgtttgtctatttgcatgctggtttgggggagtggccttgtcccagttctctttcttattccatatttttacatgccacaaagacacggtaaccctctttaagtaatctgctgttatgaagaggtggttgacaatgtcaaattgcatcttcagaggtgtcatctttttaagcaagggataggggtgtgtgcaaaagaggaaggaggggagagtcatgctcctgttaatagtgaatgctggaggctgtactttttcatatactccatggatccagtgtaccatagaacaatgcagttgatgcaattgagaagaaggacggggccactgtccctatatgcatgccgtctagggatgagatttgggctggaagactctgagtacaatgccctggaaaggagatggaacccatgtgaggctcaggacaatctacctgtctggctggttcttatcccctctgagtatcagaggagcagacgcctgcaaatgttgtcctctgggatccagacaaaaggtattttttataaatacttgatgtctttaatagactacaagatagtctgggctctatcgaacaagaatgagaaattataatgagacaattgcctaagatgaaaagacaacaaaatgaaatttaaaggcaaatggttggaataagaaaaaaatggcaaggaaaaccaaaggttccattgtagaatcaaaatcgaagtgggatgatgtagagagccacagtgatattaaggaaaggcaaatgtgatgaaagcagtggagaaaagtattgaagacagagaacagaagccaaaactgaagaatcaaatgtatttctgaacaataaaacagcaatgatagatagaattactaattaaacatcacacacacacacatttttttctacacattttctgcaaattaagacattaccacattacattagagaaaaatatgaaataactccaacacctagaagaaccagagcaaaaatttcccttataaacacaaattctataactatccaataaaaactgggcaaattaaacccraagtaatacaaagttagcgggttttagatttctcctgtgtaatgtcaaacagcccaaaataagagaatccaaaacaccgttgaaggaaaactattgtaacacaatagttaccactgccactttttctatgtgcaggcaataaaaagatttccagatatctgaaatatatatttcccggggtatatttcttaaaaaaaaattagttgaaaaaattcattctatgtgaaatgtagaacaaaactaagaatgtaagactagaaaattctgtgaaaacaaaaaataaagctggtggtgacaaaacagttaaaacatggaattaattcaaaaatatttcttaataatatcaaagccaacactgatttagtgcttactatcttcctgcactgtgctaagtattttacacatacctttatttagaagacttcatgcagatgtcaaaaactattcaacatggccaggcgtggggctcacacctataatcctagcacttgcggaggccaaagcaagaagatcacttgaggtcaggagttcaaggccagcctgggcaacatagcaagatcctgcttctaaaaagttatttattaaataaaagatttaaaatataaaaacaggaatgtaataaaaacaatctaagctttaaatcttcagattgtattatgaaaaccaaccactgaggaaagagtgaaagaagttctagaagttcttagttcttcattttaatattgaaaagacaatgatatgcaaaagaaactgttttaattttcatttcctttgatgatttgaggcatattaggctgcccacaaagtaaaaaataaaattaaaatataaggtaaatgaaaagttacaaagcatgttatgacaaaaatagtaggcataaaagaaattatcaatatgctaaactttttaatgtaacaataggagaaacataagcaaacaccttcaaataaaacaaagcaagaatccaaataggcaattgaaaaaacaatactcattgacaattaacacgaaaaaaatgtgaacttcataagtaacttttacaagtgcaaattaaaacagcaatggcataccatgttaaagccatcaaactggcaaaatgcaaaagaacaataatccctgctgttagctaggattgagggagagggccctttaatatactgccagtagaagagtaaattggtaagttggtactcttttggaggggaatttggcaacatacatcaaaagctttctaaatgcaaataccttttgactcaagaattgtttttccaaaagacatactcagaggtggccacaaagatttaactactctgatgggaagagagatcttcatatatgggacttctcccttgaaatggaggataatacacaagccacaaatagaaagagaacaacagtggattattaaaaggcagggccttcctgtctattggatgccctgctcgggtataacacaggaaccatgggctcccaagggaccctg

SEQ ID NO: 75308 - DNA, 2907 bp, Homo sapiens
tcaaatgtgcaattcaatgatttattgtgcaatcatctgcataaaccagttttagaatatttctataccccaataagatccctaatgcctgttcacaatagttagtattaatcgaatgcttacttattgactcattgttctgagtgctttatttgtagtaactttcttggcagcaatactctgagaggttttgttattatctcccccattttactaatgcagaaaatgagttgtgggaaggttagataactgcccaaggtcactcaggccctgggtgatcttagtccagttgtctgtcccagatttgaactcagaacgtctaacctcaaagtttgtgtcctttcctacttctctcttctacttccacatcaggaaagaaactgagcaactgtttgtctatttgcatgctggtttgggggagtggccttgtcccagttctctttcttattccatatttttacatgccacaaagacacggtaaccctctttaagtaatctgctgttatgaagaggtggttgacaatgtcaaattgcatcttcagaggtgtcatctttttaagcaagggataggggtgtgtgcaaaagaggaaggaggggagagtcatgctcctgttaatagtgaatgctggaggctgtactttttcatatactccatggatccagtgtaccatagaacaatgcagttgatgcaattgagaagaaggacggggccactgtccctatatgcatgccgtctagggatgagatttgggctggaagactctgagtacaatgccctggaaaggagatggaacccatgtgaggctcaggacaatctacctgtctggctggttcttatcccctctgagtatcagaggagcagacgcctgcaaatgttgtcctctgggatccagacaaaaggtattttttataaatacttgatgtctttaatagactacaagatagtctgggctctatcgaacaagaatgagaaattataatgagacaattgcctaagatgaaaagacaacaaaatgaaatttaaaggcaaatggttggaataagaaaaaaatggcaaggaaaaccaaaggttccattgtagaatcaaaatcgaagtgggatgatgtagagagccacagtgatattaaggaaaggcaaatgtgatgaaagcagtggagaaaagtattgaagacagagaacagaagccaaaactgaagaatcaaatgtatttctgaacaataaaacagcaatgatagatagaattactaattaaacatcacacacacacacatttttttctacacattttctgcaaattaagacattaccacattacattagagaaaaatatgaaataactccaacacctagaagaaccagagcaaaaatttcccttataaacacaaattctataactatccaataaaaactgggcaaattaaacccaaagtaatacaaagttagygggttttagatttctcctgtgtaatgtcaaacagcccaaaataagagaatccaaaacaccgttgaaggaaaactattgtaacacaatagttaccactgccactttttctatgtgcaggcaataaaaagatttccagatatctgaaatatatatttcccggggtatatttcttaaaaaaaaattagttgaaaaaattcattctatgtgaaatgtagaacaaaactaagaatgtaagactagaaaattctgtgaaaacaaaaaataaagctggtggtgacaaaacagttaaaacatggaattaattcaaaaatatttcttaataatatcaaagccaacactgatttagtgcttactatcttcctgcactgtgctaagtattttacacatacctttatttagaagacttcatgcagatgtcaaaaactattcaacatggccaggcgtggggctcacacctataatcctagcacttgcggaggccaaagcaagaagatcacttgaggtcaggagttcaaggccagcctgggcaacatagcaagatcctgcttctaaaaagttatttattaaataaaagatttaaaatataaaaacaggaatgtaataaaaacaatctaagctttaaatcttcagattgtattatgaaaaccaaccactgaggaaagagtgaaagaagttctagaagttcttagttcttcattttaatattgaaaagacaatgatatgcaaaagaaactgttttaattttcatttcctttgatgatttgaggcatattaggctgcccacaaagtaaaaaataaaattaaaatataaggtaaatgaaaagttacaaagcatgttatgacaaaaatagtaggcataaaagaaattatcaatatgctaaactttttaatgtaacaataggagaaacataagcaaacaccttcaaataaaacaaagcaagaatccaaataggcaattgaaaaaacaatactcattgacaattaacacgaaaaaaatgtgaacttcataagtaacttttacaagtgcaaattaaaacagcaatggcataccatgttaaagccatcaaactggcaaaatgcaaaagaacaataatccctgctgttagctaggattgagggagagggccctttaatatactgccagtagaagagtaaattggtaagttggtactcttttggaggggaatttggcaacatacatcaaaagctttctaaatgcaaataccttttgactcaagaattgtttttccaaaagacatactcagaggtggccacaaagatttaactactctgatgggaagagagatcttcatatatgggacttctcccttgaaatggaggataatacacaagccacaaatagaaagagaacaacagtggattattaaaaggcagggccttcctgtctattggatgccctgctcgggtataacacaggaaccatgggctcccaagggaccctg

SEQ ID NO: 75309 - DNA, 564 bp, Homo sapiens
aaaatatactgagctatgtggcagttaataatcaggctatgggtcagaaggaggcagtggtagtgtggtcactccaggaagatgaaattgtgcaaaggatgaggtataaggctaaagaagatgtgtttgagggactgtaaattcagtcagtggagtgtactgtacgtttctggagaagtagggggaagtgttggagatgtagctagtcaggcttagcagaatatttggtatgtccttgtcgctatgctaagaagcttggcttttatccctgagtgtccattcaaagataataatctggttactgggaagttaccaaattagatttacatatgaaaaggtgcattttggcagcagcttggaaaatgaactggagagaaaggcagacaagactgatggcagggaggwcagttagcattctagataaaagataataaggccatccctagggaatggatcacaaaggggcctgatagctattaagaagattaaattgataggatttggaaagtggcgactgtgaaatgtatctctcagatctcctgcactgtaagtaaattaatcagt

SEQ ID NO: 75310 - DNA, 642 bp, Homo sapiens
atgcaaattcattcactttctgtggaagttctcaacttcaagatatagctctctttttttctgacacatcaattaacaccactctccaaaatttgcttaaatctttcataccttaatgtctcatcccctgcttcttttcaccccttatgggttaatattattttttggccttattactattttaacagtatattggaaactaaggtggtctccataatatgtaaagggaatactgaaaaacaattttgggttaactgtcctcaaattttttcaatagactttatttttagagtagttttacctttacagcaatagtgaacgtaaaatacagatagctctcatttactccctgtcccccacatacacacaacttcctccactatcaacatcctgcaccaaaayggtacatttgctatctttgacgaacctacactgacacatcgttatcactttaagcccataatttacattagagattactcgtggtgtagtactttctatagatttggaaaaatttataatgacacatatctacattatagtatcataccagatatattcactgtcctaaaagtcccctgcactctgcctattcatccctccctccccactaacccctggtaagcactgatcttttttact

SEQ ID NO: 75311 - DNA, 642 bp, Homo sapiens
atgcaaattcattcactttctgtggaagttctcaacttcaagatatagctctctttttttctgacacatcaattaacaccactctccaaaatttgcttaaatctttcataccttaatgtctcatcccctgcttcttttcaccccttatgggttaatattattttttggccttattactattttaacagtatattggaaactaaggtggtctccataatatgtaaagggaatactgaaaaacaattttgggttaactgtcctcaaattttttcaatagactttatttttagagtagttttacctttacagcaatagtgaacgtaaaatacagatagctctcatttactccctgtcccccacatacacacaacttcctccactatcaacatcctgcaccaaaacggtacattygctatctttgacgaacctacactgacacatcgttatcactttaagcccataatttacattagagattactcgtggtgtagtactttctatagatttggaaaaatttataatgacacatatctacattatagtatcataccagatatattcactgtcctaaaagtcccctgcactctgcctattcatccctccctccccactaacccctggtaagcactgatcttttttact

SEQ ID NO: 75312 - DNA, 1828 bp, Homo sapiens
agacgttggagtgacagacctgtggccacgtggttagcggctggcaccgggactcattcttaccctttgctttttccctctcattcgaagctttctgttgtgaaataaaatatacacaggaagaaagcataaatgtgcagcctagctttttactggtactggttcattttagaatgtaggtccatcttaggtttcaggttgactgtaggcttgctgtctgtccagaggcacctcctccatggaatccgtcacccccgcgcactgtgcacacacatccctctctgttgttcccctagatggaacttactagattgtgtttatatttaacagcttctgtctagattgtagatcttaaagagctctgataaacttacttttatttaatcaccaaaagaaacacagatactctctttcatttgagtccagaaagctgaggcctctgtagctgtgagcctcagcaggggtgggccctatgttaagaaaacatatttttttttgagacagagttttgctcttttcgcccaggctggagtacagtggtgcaatcttggctcactgcaatctctgcctcccaagttcaaggcgattcttgtgcctcagcctcctgagtagctgagattacaggcgcccaccaccacgcctggctaatttttgtatttttagtagagatagggtttcaccatgttggtcaagcttgtcttgaactcctgacctcaggtgatccacccgcctcggcctcccacagtgttgggattacagacgtgagccaccgtgcccagccagagaaaatcttatatttgacttgaaaatctgaacttaaaaggcaaccaaccagagaacctgaggggtaacggaaggacagcaaaacacagaggcctggcccccgtaggggaatcgggtgtaactcggaagaaatgctgacggagctcttaccatgtggcacgcgcaggagcatgctggcctgttttactcagccccggccctggccacagagaggacgggaccttccccaagtgaagtgggttcttcagttgtggaaaaggccttgccacccactgccaagcattcccttagctccccacagggcacggagagccaggacctgctccaggagggagaaaaatgtgagtgactcctgccctcacggtggttaggatccgattggagatgaaatttgacatgtgtgacctgactgagcaacagctttctttttaaaaatggccccgtttcccagattctgaagtacagtattttatacttgttatggaaaatcagagacatagaaaagtagaaagaaggccgagtgctgtggttcacacctgtaaggaggccgaggcaggtggatcactggaggtcaggagttcaagaccaacctggccaacatggtgaaaccccgtctctactaaaaatacaaaaattagccaggcacggtggcaggcacctgtagtccctgctactcaggaggctgaggcaggagaattgcttgaacccgggaggcggaggttgcagtgagctgagattgcgccactgcactccagcctgggtgacagagcgagactctgtctcaaaaaataaaaaacagaaaagtagaaagaagaaaaaagtcacagattatttcttcaacaagagattcaattgccattaccctttggakatatatatatatatatatatatatatatatatatatatatataaacatgctttattatttatgtacataatcaaatctcccttaatattatgtttttagctatttttaatagtttaagtatactttataaacctcttttgagaagcagctgttgtttagagaaaacttctatgc

SEQ ID NO: 75313 - DNA, 683 bp, Homo sapiens
ggagcatccaggctcggggccctttctgcactgtcagatcatatgcctgatcagagagctcaggctctccccaacccttttgtttgaccctgagtccccgaaacttttgacttttccttaggccttatgtggaggagccacgccacgtgaaggtgcagaagggctcagagccgctgggcatctccatcgtgagtggagagaagggcggcatctacgtctccaaggtgaccgtggggagcatcgctcaccaggctggcctcgagtatggggatcagttactggaggtgagagggagctgccctcctgcatggcgcccatggaaacctgcacttcttccccctctcctcctcctagggaacagcastgctcccaagtccccagggcctcctccctgtccacagccccgacccccccactgagcccatcctggtgtttccccagttcaacggcataaacctgcggagcgccacggagcagcaggcgcggctcatcatcgggcagcagtgtgataccatcaccatcctggcccagtacaacccccacgtgcaccagctcagcagccactcccggtccaggtgagtgcgggcctcccagggccgtctgggctgggggtggagaggtgggtgcagcagcactctgctcattttagggagacccagggtgccagccgtaagttctgggga

SEQ ID NO: 75314 - DNA, 1080 bp, Homo sapiens
gcattaaaattatgttttataaattgcacccaacattttctaggcattttgttgcagaaagcccttcaggttgtcttgtctgccctggtgccagaagagaagcctcatgaacatcagcagcatctgactttttacaaaggaatctgagctaggagagtaaaatagtaggatttgctagagctacatacacagtgtaaggatgctcagtctccaaattgttcagtttgtggaaatagcttctaataaacaaaaggatcttactttgtatctgtggtcctttttttgtttctcattgagaatagctttaagtgtttgagcaattttccatcttgcatcggggaaggtaggattctttagggtgagaacttttcagcagtcaggacaagaagcttaccttggttgatcctggttaattgaaagkgacagacaaagcctctcagacttccccccctcatctcaggctggatgctggtgagcttattcagcactggttacagcaagtcctgttccattgaccaaccagctctcttgccacatgggccatctgtccattaatatggggtgtgaccatttatggaaatgactacaaaccctcatcctactcacagcctcaacatctattgtatcttggtggccaagtaggaataagtagcaaagttaatttcattgtgactgtattcttttttttggtcctccctgtcttcactttattcatataagtaaagaaaactcctattaaaggcaaaacaaacaaaaaacaggcagccaaggagtttgagagtaatgtagtttcataaacagcaccttcagatatgtatgatctcccgtgatttgcgggtataccacaaacagttttttcttaaaagtatgggacacacagtttgatgtcaaattactgagaggaagatcaaaccctgcagatttcagatttcagatttcccttgatagtggctgttttactctgacatgcctaaaattaacatatgtcacatttaaaaatgtattacacatattcacgtaagcttaagaaagggtatcatgaaacaaggaaattgaaacacacgtcagtgatagaagtta

SEQ ID NO: 75315 - DNA, 1600 bp, Homo sapiens
gataagggaaggacctctgaaagtcatagctcacagccgtaagtgcttataatgctctgggcacggtgctaggtacagcaaagtgctacagaactggagagtgagtactggaatcatatccatttcatgaagaggaaacgaggcagtcttagtgaaatcactggctcagcttcacacagtgaggaccagagctggaattcagacccaggagtttggaatacaaagcccaccccttagccacatcactccacagtggtgttaaatcaataagtcgttgttcatctgtttatgttagggktggggaaactgaggccctgcatgtgagcggtttccagcaggagcacttagaagcgaaaggctcaaacagtcaaaaccttggagtgtcaggagatgctgaggacaaggtttcctagtatgggcctttgcctgcctgtgtgtgataagcccttgaccatgtaaacagcagtgtcctggggaaacaggaagggcagacaggggccctggcatgctggctggcggggggcagattagctgatggctgggaaggagaggctcaatgtctgggctgtgcttcccacccaggggaagctgctgacagggaataggaaggcaggggcctcttccaggggtgggacaggcctggccccccgctcctctaccaattgtgcaactggggcagggctgccctgctttttgttcctgaaactagggctgatttaaagtgaaatcttccattccatgagcaaatattgagcacttactatgtgccagatgagggacagctgcagataggatccccctcccccagcctattgtttagcgagggtgctgccctctcccggggatggggacatagcacattagggggcacctcctggcgggagccctggaggaaatgattttcaatgaaccctaaaatgtgagtgggcagagggaatagccacacccaggctcagagcctggtaggcatgtcatttttaaggtgggaaggaacttgattggtttggctttttgttttcaggtgaaattcacataacgtaaaccatttttaaatgtacaattgagtggcaattcatacagccacaaggttgtgcaaccattaccctgtttagttccactgcctcctgcttctcacccagacctcggtggtttcctgctccgaatgctgggattccaccattccaacagcagaggcaggtttggccgtgtcatcacgacacaccctttgctcacataaaatgatatcatattcacaaaaaccatttggaggtagatatgatttgcccattctacaggtggggatactgaagaaaagtggagagatttgcctaaagtcacacagtcatgggcagagccagccttggcatgcaggcgtcagaggctcatgtctcaggcactgtggctcccaaatatagatcttcagaccagctgggcacctggtcaataatttagacttgggtctggggcctaggcatctggattccctttaaggcctcccctccctgcccaggacagggaggtaccttgccccaggccttgcctgactcaggtcccaggcacagggttctggggacacagccagcctcaaggtgggactttt

SEQ ID NO: 75316 - DNA, 807 bp, Homo sapiens
gcagaaaacagccccacatttccaacttgctccacagcagtaaagattcatctttggcccggggagggtagcaaaagagaggagggaaggggaaaaaaaggaaaaagaaagaaaaaggaaggaagaaagaaagagccagcaacaatcaaaacaacctttttctccctgtgtaatctgggcggcttccaggaggataatgtctttccaccgtggatcgccccctccctcccaggctgttttcacaggaagtaaaccctggagcattttcaatgtgcccctccaggcagaacaatgaggcccttgaagcctcggaacccgcgcttcctccagttatccggagccgcgccgmtgaggggagccatctctggggagggggcaggggggaggggcgagtctgcagggcgttgcggagccgcacgagggaagcccattagtcaaataataggtttggatccgactgttttgccaaggtacccggcatttacccgctccccgattgggggcggggagctgggaggaggcagcgaggatccaattacggctgctactgcccggtcgccgggaggtggcggcgggcgggccgggccgggctgggccgggcggggccgggaggagcggggatcggggatcggggatcggggatcgggagcgcaagcctcgggccggccggcctggaaacaccgcgccccggccccagccccggccctgcgccccgcgcgggctcctccctccccaccggctcagctgcctcattgtttattgtggagcctgcctctcccctgcccgcccgccctcccgctcctttct

SEQ ID NO: 75317 - DNA, 1164 bp, Homo sapiens
gtccagccaattccctctctgtgtgggattgggcatgtccttcccctgcctgggtctcagtgtcaccccctacagggaggggactttggccacctgtgtcctggatttggtcagacttcaccactcaccagatagttacacaggactctttccccacctataaagtgggactcataagagcattgctgaggrctgcatgaggcaatgtatgttaaggcgcagtccctggcatgtcatgaatacgccgtagatgctggtttcaaaaaaatcaccagaacgaagacccaccacggaaacagggcggggttggagtctggaagatgtgtgctcccagcctggctccacctctcagtggccagaagcctccggagacctttcaaccctgggcctcactctgctcttgtgcaaaatgggaacagcagagccccctttggagaggagaaggtcggtcaggaagaaagaggatgagtctggtgaaggagagtgtgttgcccacagcaggtcagtaaccagggctataatcccccaagcccctcccaagggcgaaaccccagtctgccacatggaaggatgtgccccaggcctcaccaaggcagcccctaatctcaggccagacccagcgcctgctcctgctcagagttaggggctggggctagagagatggatcaaaggcggagaaaattagcatgacagtgaacccaagaagggaggccaggattaattcactctcctctccctgctgtcccttctgcagcccagggagcctgccagggttgcaggaagggtcaccttttaccccaatcccctaccacacacctgaggcccagttcttacagaagacggcagggcagggacctgccatgagaagcggatccgctgtgcacacattccagagccgtagtcttgaagggataggaatgaaggcacctgggcagaagggacatctgcagaggctggagcctggacatgggtccagggggtgcactgtgagtccacagaccccaccatgtcgtgtcaggcacactggagcccgtgtgaacgcgtgggtgtgtatccgtcattctgggaatgggacttgttggtgcttggttgtcagtctgaggcccaaagcccacacgtgccctatgtgtgcatctgcggcagggtgggtgtggtgcctgcaga

SEQ ID NO: 75318 - DNA, 1164 bp, Homo sapiens
gtccagccaattccctctctgtgtgggattgggcatgtccttcccctgcctgggtctcagtgtcaccccctacagggaggggactttggccacctgtgtcctggatttggtcagacttcaccactcaccagatagttacacaggactctttccccacctataaagtgggactcataagagcattgctgaggactgcatgaggcaatgtatgttaaggcgcagtccctggcatgtcatgaatacgccgtagatgctggtttcaaaaaaatcaccagaacgaagacccaccacggaaacagggcggggttggagkctggaagatgtgtgctcccagcctggctccacctctcagtggccagaagcctccggagacctttcaaccctgggcctcactctgctcttgtgcaaaatgggaacagcagagccccctttggagaggagaaggtcggtcaggaagaaagaggatgagtctggtgaaggagagtgtgttgcccacagcaggtcagtaaccagggctataatcccccaagcccctcccaagggcgaaaccccagtctgccacatggaaggatgtgccccaggcctcaccaaggcagcccctaatctcaggccagacccagcgcctgctcctgctcagagttaggggctggggctagagagatggatcaaaggcggagaaaattagcatgacagtgaacccaagaagggaggccaggattaattcactctcctctccctgctgtcccttctgcagcccagggagcctgccagggttgcaggaagggtcaccttttaccccaatcccctaccacacacctgaggcccagttcttacagaagacggcagggcagggacctgccatgagaagcggatccgctgtgcacacattccagagccgtagtcttgaagggataggaatgaaggcacctgggcagaagggacatctgcagaggctggagcctggacatgggtccagggggtgcactgtgagtccacagaccccaccatgtcgtgtcaggcacactggagcccgtgtgaacgcgtgggtgtgtatccgtcattctgggaatgggacttgttggtgcttggttgtcagtctgaggcccaaagcccacacgtgccctatgtgtgcatctgcggcagggtgggtgtggtgcctgcaga

SEQ ID NO: 75319 - DNA, 1090 bp, Homo sapiens
ctaatggcagtcactgagtgcctggcatggcagctcagtgtgatggcttacaatgggaacaccttccagaaggaaataaagggttctggggaagcagggacccggcaggtaaatagcaacagccaggatccacgagtgccatcccttctcacctggctctcgctatgtgtgtacatacatactcacacacatacaaatgcacaatgcacatatggcacaaacaaatacgtctatatttacacaatatagacacagcatgatacacaatgtcgatgtacacctgtgcttcaggattcacacacatcacaagcaaatgcacagacccatgcccaccatccatttgcacacctgcaactcatacatgatgatgccttttccaggataaaaatacccatttacttgtgttgaccctattagtcctgcagcagaatgtaccagaataaacattccactataacatcgaagctctttagatctgtagagtaaggaggagactgtagagggctcccctccccatcctcacttgctcacttgcagatggggaacctgaggctcagagaacttagggccatgccactgctagcctgtgactttggtcaaggcagtgttctcgttgtgctcctggatgatccctttactgcctgcaactttcctcctcccttctctgctctggtcacaggatctagcaagtcccatggttccccggcccctcacttgaccctcagctcctcatgtggggcaagaaagaggttaagccctaacttgagaagcaggagcatcctgtgctggggctggcacagatgagtggtcgycacagcagctgcgtcctctgaaaagacagcaaagcctggctgttcacaccaggaagggggttgtccaggggctggtttttccatggacatctcaagcccagggcttatggattacagtcttttgaagaatatttgatagccgagaatgaaatgatcaactccacaaaatgactgcaaaatcaaaattaatgtttaattgaatatgtgcataacatcacatcatgtcaacttgttaaattcaactcactccagctcctatgaagttaggtgtaaatgat

SEQ ID NO: 75320 - DNA, 697 bp, Homo sapiens
aatgcgtgattcttcagtttttagtttgctgacttttctaaaggggaccaattcattttctgtcttttaaattattatttacaatagatttaaccatatttggtgggattcaatacattgcaattccttgttctgaagctcatattgcctcatttagagtctcatgtactccactgtctttaacagttagatctttagcagttgtaagaaggttcaggctcatcttgcacattttctgctttgtaaatggatttagccatttccttaagaaggargtaacattgtgaaataacttggaaaagaagcattttaagaccacaagatatttggatgctagagattctcatgatattgtgttggttgttgcttctaggccttttgagtggccaggctagaaaacataacggttaattcatacatattaaaacatacacatatacagttatcatacatatatacgtatatatgataaattcaagttcatactgataagtcaaatttagaactatggagttttttttcttaatctcttctatattacttctatatctcctttcttccacactaagaaacctactttttaaggacacaggggatggctgaatcagactatcccgtaattattcatttactttatctctcattacacacacactcatctgagaataactgtactaatattatccctgtcaacata

SEQ ID NO: 75321 - DNA, 909 bp, Homo sapiens
tcttcttcagggctgtcagctcagcagtatatttttataattgacaatttccaacaggttacttggtgggatttctatttctagcattagtgttaggaaaagtgaaggaattctcatcttaagttaaatgttatttaacccctggacaactgtatgtagtctttgattatcagtggtaaacggtactagaatttctaatgctgttgttttgatattggacacttttacattatggatagtttggggaggggtgtatatcagctaattaaactcttagaaaagttttaatttcctaataagagcttaatgagacagatataagcataaaactagccagactcctttacaatttcagaatattcaaaaagggatacaaaaatgtaaggggtaggaaaaccaaggagggagtgtataacaaataatttggaaaatccttgatgtttcagttgcacaggtgaaactttcaggcactgtgagggttaatactgagtgtcaacttgattggattgaaggatacaaagtattgatcctgggtgtatctgtgagggtgttgccaaaggagattaacatgtgagtcagtgggctgggaaaggcagacccacccttaatctgggtgtgcaccacctaatcagctgccagcatggcagaatataaagcagacagaaaaacatgaaaagactagactggcttagcctcccagcctacatctttctccagtgttggatgcttcctgccctcaaacactggactccaacttcttcagctttgggaccaggaatggcttccttgctcctcagcttgcagacagcctattgtgggaccttgtgatcgtgtaagttaatactctttaataaactcccctttatatrtgtatatatatatatatatacacacacacacacacacaca

SEQ ID NO: 75322 - DNA, 909 bp, Homo sapiens
tcttcttcagggctgtcagctcagcagtatatttttataattgacaatttccaacaggttacttggtgggatttctatttctagcattagtgttaggaaaagtgaaggaattctcatcttaagttaaatgttatttaacccctggacaactgtatgtagtctttgattatcagtggtaaacggtactagaatttctaatgctgttgttttgatattggacacttttacattatggatagtttggggaggggtgtatatcagctaattaaactcttagaaaagttttaatttcctaataagagcttaatgagacagatataagcataaaactagccagactcctttacaatttcagaatattcaaaaagggatacaaaaatgtaaggggtaggaaaaccaaggagggagtgtataacaaataatttggaaaatccttgatgtttcagttgcacaggtgaaactttcaggcactgtgagggttaatactgagtgtcaacttgattggattgaaggatacaaagtattgatcctgggtgtatctgtgagggtgttgccaaaggagattaacatgtgagtcagtgggctgggaaaggcagacccacccttaatctgggtgtgcaccacctaatcagctgccagcatggcagaatataaagcagacagaaaaacatgaaaagactagactggcttagcctcccagcctacatctttctccagtgttggatgcttcctgccctcaaacactggactccaacttcttcagctttgggaccaggaatggcttccttgctcctcagcttgcagacagcctattgtgggaccttgtgatcgtgtaagttaatactctttaataaactcccctttatatatgtrtatatatatatatatacacacacacacacacacaca

SEQ ID NO: 75323 - DNA, 909 bp, Homo sapiens
tcttcttcagggctgtcagctcagcagtatatttttataattgacaatttccaacaggttacttggtgggatttctatttctagcattagtgttaggaaaagtgaaggaattctcatcttaagttaaatgttatttaacccctggacaactgtatgtagtctttgattatcagtggtaaacggtactagaatttctaatgctgttgttttgatattggacacttttacattatggatagtttggggaggggtgtatatcagctaattaaactcttagaaaagttttaatttcctaataagagcttaatgagacagatataagcataaaactagccagactcctttacaatttcagaatattcaaaaagggatacaaaaatgtaaggggtaggaaaaccaaggagggagtgtataacaaataatttggaaaatccttgatgtttcagttgcacaggtgaaactttcaggcactgtgagggttaatactgagtgtcaacttgattggattgaaggatacaaagtattgatcctgggtgtatctgtgagggtgttgccaaaggagattaacatgtgagtcagtgggctgggaaaggcagacccacccttaatctgggtgtgcaccacctaatcagctgccagcatggcagaatataaagcagacagaaaaacatgaaaagactagactggcttagcctcccagcctacatctttctccagtgttggatgcttcctgccctcaaacactggactccaacttcttcagctttgggaccaggaatggcttccttgctcctcagcttgcagacagcctattgtgggaccttgtgatcgtgtaagttaatactctttaataaactcccctttatatatgtatatatatatatayatacacacacacacacacacaca

SEQ ID NO: 75324 - DNA, 909 bp, Homo sapiens
tcttcttcagggctgtcagctcagcagtatatttttataattgacaatttccaacaggttacttggtgggatttctatttctagcattagtgttaggaaaagtgaaggaattctcatcttaagttaaatgttatttaacccctggacaactgtatgtagtctttgattatcagtggtaaacggtactagaatttctaatgctgttgttttgatattggacacttttacattatggatagtttggggaggggtgtatatcagctaattaaactcttagaaaagttttaatttcctaataagagcttaatgagacagatataagcataaaactagccagactcctttacaatttcagaatattcaaaaagggatacaaaaatgtaaggggtaggaaaaccaaggagggagtgtataacaaataatttggaaaatccttgatgtttcagttgcacaggtgaaactttcaggcactgtgagggttaatactgagtgtcaacttgattggattgaaggatacaaagtattgatcctgggtgtatctgtgagggtgttgccaaaggagattaacatgtgagtcagtgggctgggaaaggcagacccacccttaatctgggtgtgcaccacctaatcagctgccagcatggcagaatataaagcagacagaaaaacatgaaaagactagactggcttagcctcccagcctacatctttctccagtgttggatgcttcctgccctcaaacactggactccaacttcttcagctttgggaccaggaatggcttccttgctcctcagcttgcagacagcctattgtgggaccttgtgatcgtgtaagttaatactctttaataaactcccctttatatatgtatatatatatatatayacacacacacacacacacaca

SEQ ID NO: 75325 - DNA, 1595 bp, Homo sapiens
tgtaaacagtgctgcaatgaacagagtgcagatatctctttgatacactgatgtcctttgttgggggtatactcccagcattgagattgctggatcatatagtagctcaatttttaattttttgaggaactcccaaaatgtttttgaattctgtactcaaaatggccagtgaaacagttatggtgcctttatttgcaaaaatcacaatctatcggactgctgaacagcaagagatcaatgtatggttcatcacttggcaggtgccattggcatgtgattttgtatatgaaatgggatttatggtaaacaacatgtttggagggttcttgattaaatttaccccacagactcaaaaatgttggtatgagttcagtaaatgtgtaaacacgaataactagtaaagcatttgacatcaagcagttgcttattttggtataagcatttgacctccaaaagtatattgaaagttccagccattaaccagcttgggggaaataacagaatctaatacattgtgatttgctgaacagaatctaatacattgtgatttgatgaaatacatgtgtacatgcttcactatgtacacagtgaagtgcataggaagtttaagacaacagatttttgttgtgttgttgttgttaaatgatagataaaaatagccgtttgtcctcaaaattaattttatgtttttaaaattgaaccattaactttcttagtgttttgtttgtgaactttgtatattacacacagcttgtcaatacaactatcattatcaactttagaaaagtaagagatatgatatagagcagggatccccaacccccagccacagaccagtaccagtcctcccgctgtgcacctggtccatggcctgttaggaacctggccgcacagcaggagatgagtagctggcaagcacacataactgccttagctctgcctcctgtcagatcatcakcagcagcattagactctcataggtgtgcaaaccctattgtaaactgtgcatgcaagggatctaggtttcaagctccttatgagaatctcatgtctgatgatctgagatggaacagtttcatcctgaaaccatcccctatcccaccacaagtttcatggaaaaaattgtcttccacaaaactgtccctgttgccaaaacggttggggactgctgatatagagaatgaacaacaatgttaaaattagtaatgtgcctcctgtcacttttcctgagtttatacttttactgttttggcaaacacaagtggatctctttgtcattcaagtttgtttgccccatgctttcaggtacttccctagactgcccatattcaaatctaattccctctgcttaaatacatataaagacatacatgagacaaaatagagaattgaaggaagtgagagctatggagggtgcttgtatattatcccaattgtctactgctgggttacaaacaacccaacactcagttgctagaacagtaataacaatcatttattttgttgcaaatctgcagtttggagatgtttctgaagagatgtttatctcagctttgtgaggcctcagctgggatttctcagccacagctggagga

SEQ ID NO: 75326 - DNA, 600 bp, Homo sapiens
aggctcaggtgtttgtgataaagccccaaaccctatcatagatctggcccagtgataaagccccagaccctaccatagatctggtccartaatgataccagggggctaacctctaagcagacacatcttccacagcttttaccatgggcacacaagcatggaactctgcagctaggaaggctgccatggcttcccacatatcacccaaatgaatggtgatgggtcctagcttttgtctggatcagtacaactcatgggtggagccaaagtgtcttagtcagccaatgctaccataaaaaagttatagactggtggcttaaacaaacaacatttttattttctcacaattctggaggttgaaatttggaagtttggaaattggaggacataccttggagtgttcttgatggagacaattcttgatgccagttaagattggactccgctccgtgagtgtttttgaaaagtaacgtaagtattcacagcaatcaagagttcagctcagaaataactagacggacaggaaacaactttttttgcaatcattctgtcccattgccttgactcaggcctgtcactagagtggtacacaatggcagg

SEQ ID NO: 75327 - DNA, 648 bp, Homo sapiens
attcttagctcacagtctgagagccatagtttgctgaccccatgccagcattcagaaaacctttgcctccactccacaatagccacaaggcaggcttctcaggccatagaccttgtccccagaagaataccctttccyctctaatatctcattttctctcttcagctacaaaatgaaaaaaaaaaatctttgctaagtgtccctactgtgctgaatcttgcaaggaaaatagactacccctttggcattttcaaccctggtaaggggcaaagaacaaaccgatggaaagttgatggccagagcctgcagaatcacgctggctcccaccctccacacacatccatcagaacctggctgcctcctcactagggcatctgcacactctgttgttttcttcccagtgctgcaagattctctccccaatctagatcccatggcaactgcttgaagctaacctttcaagcaacgggctccattaaagttagaaaagtataaattgatcaatagagggaaacacagcctgataaagccccttttgtgagatttttattatggctttttttatcagaaccgtgttaatggatgagttctgaaataaattaacattcctatcctaatgcaaatttaaaaagggatatcagcaaggca

SEQ ID NO: 75328 - DNA, 527 bp, Homo sapiens
tgtgagaacacttttcaactcagataagaacttcagaataaatacaactataaatttataagaaaagaacaaaggattaaaacctatttctctctctctctcacatgcacacacatgcacatacacaactggttagtaaacatgtaaaaatgcttaagctcatgaataattagagagatgtgaattaaaaaaataaaatgtcatttgtacttattggataagaaaaattgaaagcctcacaaatgatggtaaggatgtaggaacacagggatttctaatctagcatgagttcaaataggtacaaccacttgggagaacaatttgtctctgctaaggaaggtgcagaagtatatttcctactaattagcaatttcacttcagggcatttacactaacaaacacgtgcacaaagatgcatgcacmggcatgttcattgcaataaacaacaacgacaataaagcaataactaattttacccaatagggaaatggataagtaaactatggtatttcacaattaagttaaaa

SEQ ID NO: 75329 - DNA, 882 bp, Homo sapiens
ccatgttcagggaaactgtagagctcctaatcagctgtatcaggcatacatatggctaattctgaatgcccagctctgtgttcccttctcccttttctcctctctttctatgctatatatgaaaaaaatagaagaataaatagcagaaccaaaaagtggtataagagtttggaggaaagagacttatgtaaactggagaaccaaaaatatataaatatattggaggtaatatttgagtagggccaggccaggggttgatagaaaggaggagttagtaaattaaaggcaaggaaaacagaaagagcaaaggcaaagggaggtggccacagctcaaattcagcagaccgtgagatcaagcagactggaacaaacgtttcatgctgaggagcacaggcagatgagataggacagataaagtggagtgtgattctggaggatctgaatacatggatggcaagcttatatttactcttagagggtctaagataagtctggatatccggtattcccaacttgttcttttttaggastgccttaactattatcaatcctttgtgcctccacataaaatttagaatcatcttgtcaaattctctttgggattgtacctgtaatagcattggttctatagattaatttaaggggaactgacatctttacacttttagctaacaatgaatatggtatatcttctcatttacttacttttctttttttttaagacaaggtcttgctctgttgcccaggctggagtacagtggtatgagctcagctcactgcagcctcaacctcccaggctcaaatgatccttccacctcagcttcccaactagctgggaccacaggcacatgccttcatgcttggctgattttgtttattttt

SEQ ID NO: 75330 - DNA, 904 bp, Homo sapiens
ttcataatattacttatgatgtttcaaataattcaaagacaaccccaaaagctctcacaataaaataattgtgtaaacaatgaagtactgatacaacgagatgctatgcagtcattaaaaacaataactgtggccgggcgcggtggctcacgcctgtaatcccagcagtttgggaggctgaggtgggcagatcatggggtcaggagatcgagaccatcctggctaacayggtgaaaccccgtctctactaaaaatacaaaaaatacaaaaaaaaaaaaaaattagccaggcgtggtggcaggtgcctgtagtcccagctactcaggaagctgaggcaggagaatggcgtgaacccgggaggcggagcttgcagtgagccgagattgcgcccctgcactccagcctgggttacagagcaagactctgtctcaaaaaaaaaaaaaaaaataataataataagtgcgatggtcactgaaatgtgtatatttggaaagaatgcagagagacagagagtatgtaggcaatggtttcaattgaatgtctccaagctaatgagggttaaaagtgatttcagagagatgcacctagtttatgggatttcctttcctgtaaagttaagtgtgtaataaaaatgtaagtgtatatagacatatatcatataaaagaggtggtggagagtaatttcttctttctccttacttcccgggagagccatgaggatgaattaagtggtttgaaattttcggatcaaaatatgagactctagaatgagcaaatggtttaggttcttccttggagacatttaagaatatccatctgtcaagtgttaggatgtttttgaattaatataatgacattagaaaatgctcttcattagtgctggttttgattttaaaatgactct

SEQ ID NO: 75331 - DNA, 904 bp, Homo sapiens
ttcataatattacttatgatgtttcaaataattcaaagacaaccccaaaagctctcacaataaaataattgtgtaaacaatgaagtactgatacaacgagatgctatgcagtcattaaaaacaataactgtggccgggcgcggtggctcacgcctgtaatcccagcagtttgggaggctgaggtgggcagatcatggggtcaggagatcgagaccatcctggctaacacggtgaaaccccgtctctactaaaaatacaaaaaatacaaaaaaaaaaaaaaattagccaggcgtggtggcrggtgcctgtagtcccagctactcaggaagctgaggcaggagaatggcgtgaacccgggaggcggagcttgcagtgagccgagattgcgcccctgcactccagcctgggttacagagcaagactctgtctcaaaaaaaaaaaaaaaaataataataataagtgcgatggtcactgaaatgtgtatatttggaaagaatgcagagagacagagagtatgtaggcaatggtttcaattgaatgtctccaagctaatgagggttaaaagtgatttcagagagatgcacctagtttatgggatttcctttcctgtaaagttaagtgtgtaataaaaatgtaagtgtatatagacatatatcatataaaagaggtggtggagagtaatttcttctttctccttacttcccgggagagccatgaggatgaattaagtggtttgaaattttcggatcaaaatatgagactctagaatgagcaaatggtttaggttcttccttggagacatttaagaatatccatctgtcaagtgttaggatgtttttgaattaatataatgacattagaaaatgctcttcattagtgctggttttgattttaaaatgactct

SEQ ID NO: 75332 - DNA, 904 bp, Homo sapiens
ttcataatattacttatgatgtttcaaataattcaaagacaaccccaaaagctctcacaataaaataattgtgtaaacaatgaagtactgatacaacgagatgctatgcagtcattaaaaacaataactgtggccgggcgcggtggctcacgcctgtaatcccagcagtttgggaggctgaggtgggcagatcatggggtcaggagatcgagaccatcctggctaacacggtgaaaccccgtctctactaaaaatacaaaaaatacaaaaaaaaaaaaaaattagccaggcgtggtggcaggtgcctgtagtcccagctactcaggaagctgaggcaggagaatggcgtgaacccgggaggcggagcttgcagtgagccgagattgcgcccctgcactccagcctgggttacagagcragactctgtctcaaaaaaaaaaaaaaaaataataataataagtgcgatggtcactgaaatgtgtatatttggaaagaatgcagagagacagagagtatgtaggcaatggtttcaattgaatgtctccaagctaatgagggttaaaagtgatttcagagagatgcacctagtttatgggatttcctttcctgtaaagttaagtgtgtaataaaaatgtaagtgtatatagacatatatcatataaaagaggtggtggagagtaatttcttctttctccttacttcccgggagagccatgaggatgaattaagtggtttgaaattttcggatcaaaatatgagactctagaatgagcaaatggtttaggttcttccttggagacatttaagaatatccatctgtcaagtgttaggatgtttttgaattaatataatgacattagaaaatgctcttcattagtgctggttttgattttaaaatgactct

SEQ ID NO: 75333 - DNA, 904 bp, Homo sapiens
ttcataatattacttatgatgtttcaaataattcaaagacaaccccaaaagctctcacaataaaataattgtgtaaacaatgaagtactgatacaacgagatgctatgcagtcattaaaaacaataactgtggccgggcgcggtggctcacgcctgtaatcccagcagtttgggaggctgaggtgggcagatcatggggtcaggagatcgagaccatcctggctaacacggtgaaaccccgtctctactaaaaatacaaaaaatacaaaaaaaaaaaaaaattagccaggcgtggtggcaggtgcctgtagtcccagctactcaggaagctgaggcaggagaatggcgtgaacccgggaggcggagcttgcagtgagccgagattgcgcccctgcactccagcctgggttacagagcaagactctgtctcaaaaaaaaaaaaaawaataataataataagtgcgatggtcactgaaatgtgtatatttggaaagaatgcagagagacagagagtatgtaggcaatggtttcaattgaatgtctccaagctaatgagggttaaaagtgatttcagagagatgcacctagtttatgggatttcctttcctgtaaagttaagtgtgtaataaaaatgtaagtgtatatagacatatatcatataaaagaggtggtggagagtaatttcttctttctccttacttcccgggagagccatgaggatgaattaagtggtttgaaattttcggatcaaaatatgagactctagaatgagcaaatggtttaggttcttccttggagacatttaagaatatccatctgtcaagtgttaggatgtttttgaattaatataatgacattagaaaatgctcttcattagtgctggttttgattttaaaatgactct

SEQ ID NO: 75334 - DNA, 629 bp, Homo sapiens
tgcatgatacattcccagtatttactatacatcatgtgtgagggtcttaaagaactcacttttttttttttttttttttttttttttgagacggggtctcgctgtgtctcccaggttggagtgcggtggcgcaatctcggctcactgcaagctccgcctcccgggttcacgccattctcctgcctcagcctcccaagtagctgggactacaggcgcctgccaacacgcccrgctaattttttgtatttttagtagaaacggggtttcaccgtgttagccaagatggaagaactcacttttcatgtttccagattattattttgaaatctaaatattgaaattttttatatttttaaatttctgactattttttgatgctattgtaaattgttttgttggtttccttctcaaattgtgcattgttagtgtataaagtacgatttttacgtgttgattttgtattctgcaactttgctagtcatttattctgaaggtatttttcatggagtatttagggttttctacatatattctacatatttctacatcattttgtctgcaaacaaagacacttttctttttttagaaaaatatttccattattgtgttgagtaaaagtggcaggagca

SEQ ID NO: 75335 - DNA, 1412 bp, Homo sapiens
ggtagaccctgtgccagacaggggcttagagcaggagaggccttgggggaggtggatgcagccatgttgggggaggagaaccacacagccaggacctgtgggttggaaagtcactcgttttctggaaacaagaagttcagttccattaactcctccatgtgcttcacaaatacctactgagttcctgtcaccaggtggggcagccttggagaaggtggtgtgtgagaaccggggagaagtgggtggagcatgctggctagggaaacagggtctttgagaattgctgtaggtcatggggccttgggaaggttctggtcagagctaggaatgagccaagtctcttcttttctgaaatgaaggggtgaagtgtaatgcatcgccagtgttttctgcactaagattctctactcctttgagtctggggcatgctgggaaagccatcaggaatcatccaaggccaagtgtcctgaggctgtaggccctcaagcttgtgtcaagagcaaagcagggctatctgacacgaggaagggaggagacagaaaccccagagtgatggtggggtctgggtgccttccaggtgggcagccggggtgagggtgccggcccagcattcagaggagcctccccacaacaggtccactaacccatctgattaccggatcctgcttgggtatgaccagcaaagccatcccacagagcacagcaagcagatgacagtgaataagatcatggtgcacgctgactataacgagttgcaccgcatggggagtgacatcaccctgctgcagctgcaccrtcatgtggaattcagctcccacatcctccccgcctgccttccggaaccaaccacgtggctggcccctgacagctcctgctggatatctggttggggaatggtcaccgaggatggtgagcagtgcagggcaggcaatgcaggtgaaggtgcgggaggccgcttcggggctctgccagtcctccctagtgtcacaattccccctggcatgggtcaagcggcctgagcttctcccacttttggaggcaggtacttgggctctttgactctgagccattcaggattccctggttctgaatgtttctgactccaccctgattacaagggcctgctgccatctgacctcctccagggcctcaccaaactctactggagcttccacagctgtggaaggtgccgggcatcagtagcaagtaagagcaggcctgcgggtgcggtggctcacgcctgtaatcccagcactttgggagcctgaggtgggtggatcacgaggtcagaagatcgagaccatcctggccaacatggtgaaaccacatctctactaaaaaaagaaaaaaaaatatatatatatatatatattttatacacacacacacacacacacacacacacacacaca

SEQ ID NO: 75336 - DNA, 1412 bp, Homo sapiens
ggtagaccctgtgccagacaggggcttagagcaggagaggccttgggggaggtggatgcagccatgttgggggaggagaaccacacagccaggacctgtgggttggaaagtcactcgttttctggaaacaagaagttcagttccattaactcctccatgtgcttcacaaatacctactgagttcctgtcaccaggtggggcagccttggagaaggtggtgtgtgagaaccggggagaagtgggtggagcatgctggctagggaaacagggtctttgagaattgctgtaggtcatggggccttgggaaggttctggtcagagctaggaatgagccaagtctcttcttttctgaaatgaaggggtgaagtgtaatgcatcgccagtgttttctgcactaagattctctactcctttgagtctggggcatgctgggaaagccatcaggaatcatccaaggccaagtgtcctgaggctgtaggccctcaagcttgtgtcaagagcaaagcagggctatctgacacgaggaagggaggagacagaaaccccagagtgatggtggggtctgggtgccttccaggtgggcagccggggtgagggtgccggcccagcattcagaggagcctccccacaacaggtccactaacccatctgattaccggatcctgcttgggtatgaccagcaaagccatcccacagagcacagcaagcagatgacagtgaataagatcatggtgcacgctgactataacgagttgcaccgcatggggagtgacatcaccctgctgcagctgcaccatcatgtggaattcagctcccacatcctccccgcctgccttccggaaccaaccacgtggctggcccctgacagctcctgctggatatctggttggggaatggtcaccgaggatggtgagcagtgcagggcaggcaatgcaggtgaaggtgcgggaggccgcttcggggctctgccagtcctccctagtgtcacaattccccctggcatgggtcaagcggcctgagcttctcccacttttggaggcaggtacttgggctctttgactctgagccattcaggattccctggttctgaatgtttctgactccaccctgattacaagggcctgctgccatctgacctcctccagggcctcaccaaactctactggagcttccacagctgtggaaggtgcygggcatcagtagcaagtaagagcaggcctgcgggtgcggtggctcacgcctgtaatcccagcactttgggagcctgaggtgggtggatcacgaggtcagaagatcgagaccatcctggccaacatggtgaaaccacatctctactaaaaaaagaaaaaaaaatatatatatatatatatattttatacacacacacacacacacacacacacacacacaca

SEQ ID NO: 75337 - DNA, 832 bp, Homo sapiens
aatagaaacgcctgctccctgccttctgcaggcccttttctcctgcgccctcactaggctctgtccctgggacgcgctgcagggtgaggtgtgcggaggccagtcccggccggctgcacagagggaagcctctaaatgtttgtagaactcggagagctgaaggagaattacagtactgtgtttaaagggggaacgaacaacagcccttccgtctttttcatttggcccgtgacctttcagggagtcccgctccaggtcattgagcgatggggcacatagacccgatttaaaacagtgctatagtatataaatcagctcgcttccrtctgctgcaacaaaggttccacttttccccaaatgagtgctcgaaatatttctttgacgagggacagctgatagagcaggagggtgcagccatccaaagtctggctgctgttctgaggaggcctagccctgtgagtggcgccgcgccccatgggactcacctgccggccccctcgcccacaccgctggtcataggaggccatgcctgaacgcctagtccctgtgtcccctccccacccctcacagcaggcttcattcatgctgaaccctgagggtccctgagccttggtctttgtgtagctgggaccccagcccagaacagcggaatgggaatctctggagtggtggggctgggcagggtcttggctaatgccctgggtggtggttgccatgtgaagcggacaaccttgcaggcatggcaaccagcaccactagaacattctcacaagcgagtccaggcctgtcttggagtggggtcaggctggtagaagagcatgcccaactacag

SEQ ID NO: 75338 - DNA, 1529 bp, Homo sapiens
ttaaaaagttttatttgtaatagatatctatgtattacagattatttgcaagtaatatttagagtatttcttaggcagtaatttatttttttgcataatctccttaaagacactcttatttaatttgttttatcactttccttgcagtgtttgaacgtcactcagttattaaaatactatggtcatggtgccaactctcccatctcaactgatttatttacatacctttgccctgcattgttatatcaaatcgacagcagactttgtattgagcattttgacaaacttttagttgaagatataaataaggataaaaacctggttcctgaagatgaggcaaatataggggcatcaggtaagagagattttaagttttttctccttaaaatagtacctgtacttactttttaaactatagttgaattagaaaagaatcctaaattattgactttcttttgttgtcagactttaaatatattttaatcaggtttagatatgcatatttaaaagaaactgggggaagacgggggcacaatgtgttttatttatctcttctggtatattacaaagggatattttgctatggacggagaactagattaaaaatgaaatatagatttgtgataagttgattatttttgatgagcaaatataaataatgggaccccctaaataaagttatttgttcttctaattacttaacatttatcagggtgcctctgttgaaaagcaaagatgattaaaattttaaagacataaaaagggaagctactgtgtgtaaactccaggaatgtctgggaaatgcctaacaaacttgacatgtgaactttattatgggtatttctagagagcttcaactagggtaaaaccaaaactatttttaaatttctcttaggctcttttttcatcgtacccacttggctccaccttggtgttcacaggtacctcccacttaatatttcaaaacttatactccasacaaaatttgtaccccttaatggatcccaaatatcattaatttcattcttttgataaaatctagaactctttgactttctttttctcttttttttcttttcctttttttcccattctataatcaggtatgaagtccagttaaagctatctcttcagtatcttctaacttcatccactctgtcataacaattctggattttcttggttattggattgttgaaataacttcataaccttccctgcctgtgttcttgtccccttgcaagacattcttagcacttaaactagatttacctttctaaaatgcaaagagattctgacacagaattttttctttatagtgatagctaacattttgttaatacatactttttaaatcttatttacttaaacacatatcgcagacactgttctaagctgaattcatttactcctcacaacacttttatgagataggtaatgttactcttcccagtaacttttctgatatctcagagctaataagtggtagtactgggatttagtcctgtaaccattttgctatcttatgt

SEQ ID NO: 75339 - DNA, 1529 bp, Homo sapiens
ttaaaaagttttatttgtaatagatatctatgtattacagattatttgcaagtaatatttagagtatttcttaggcagtaatttatttttttgcataatctccttaaagacactcttatttaatttgttttatcactttccttgcagtgtttgaacgtcactcagttattaaaatactatggtcatggtgccaactctcccatctcaactgatttatttacatacctttgccctgcattgttatatcaaatcgacagcagactttgtattgagcattttgacaaacttttagttgaagatataaataaggataaaaacctggttcctgaagatgaggcaaatataggggcatcaggtaagagagattttaagttttttctccttaaaatagtacctgtacttactttttaaactatagttgaattagaaaagaatcctaaattattgactttcttttgttgtcagactttaaatatattttaatcaggtttagatatgcatatttaaaagaaactgggggaagacgggggcacaatgtgttttatttatctcttctggtatattacaaagggatattttgctatggacggagaactagattaaaaatgaaatatagatttgtgataagttgattatttttgatgagcaaatataaataatgggaccccctaaataaagttatttgttcttctaattacttaacatttatcagggtgcctctgttgaaaagcaaagatgattaaaattttaaagacataaaaagggaagctactgtgtgtaaactccaggaatgtctgggaaatgcctaacaaacttgacatgtgaactttattatgggtatttctagagagcttcaactagggtaaaaccaaaactatttttaaatttctcttaggctcttttttcatcgtacccacttggctccaccttggtgttcacaggtacctcccacttaatatttcaaaacttatactccacacaaaatttgtaccccttaatggatcccaaatatcattaatttcattcttttgataaaatctagaactctttgactttctttttctcttttttttcttttcctttttttcccattctataatcaggtatgaagtccagttaaagctatctcttcagtatcttctaacttcatccactctgtcrtaacaattctggattttcttggttattggattgttgaaataacttcataaccttccctgcctgtgttcttgtccccttgcaagacattcttagcacttaaactagatttacctttctaaaatgcaaagagattctgacacagaattttttctttatagtgatagctaacattttgttaatacatactttttaaatcttatttacttaaacacatatcgcagacactgttctaagctgaattcatttactcctcacaacacttttatgagataggtaatgttactcttcccagtaacttttctgatatctcagagctaataagtggtagtactgggatttagtcctgtaaccattttgctatcttatgt

SEQ ID NO: 75340 - DNA, 1027 bp, Homo sapiens
caagccctgtggctgcacagtgagcagaaccttagaaaggcctgcaagcgttgcctgcagagctggtaattaccctgttgcccgggctggagtgcaatggtgcgattatggctcactgcagccttgaacttcctggctcaagtgatcttcccacctcagcctcccaagcagctgaaactacagacacctgccaccatccccatctaattttttaatttttttagagatgggtctcaccatgtctcccaggttggtcctgaactcctgggctcaagtgatcctcmtgccttagactcccaaagtgttgggattatgggtatgagccaccatgcccagcctgggagctgattattgatgacttttcagagagggtcactggggattttttttgtgtacctggaaaaacactttctagttttctgaagaagtatttgtggatttcttttgagatttttattatccctcaagttaataagtgaaggatgatgaaggctcctttaattgactcttattttctaccagacactctgctgagtccctcctaacactaacactcacttcaacagttattagccccatggtgcagatgaggaaactgacacttggatagatgtgaagccatttgcttaaggccacccagctggacatggtgacatgagaccttaaacctggaacttcttttttgtttttttttcttttttttttctttgtttttcttttctttttttctttttttttttttttttgagacggagtctcatctcactctgtcacctaggctggagtgcagtggcgagatcttggctcactgcaacctccgtctcccaggttcaagcgattctcctgcctcagcctcctgagtagctgggactacaggcatgcaccacaatgtctggctaatttttgtattttttagtagagatggggtttcaccacattggccaggcttgtcttgaactcctgacctcgtgatccacccaccttggcctcccaaagtgctgggattacaggcgtgagccaccgcaga

SEQ ID NO: 75341 - DNA, 1027 bp, Homo sapiens
caagccctgtggctgcacagtgagcagaaccttagaaaggcctgcaagcgttgcctgcagagctggtaattaccctgttgcccgggctggagtgcaatggtgcgattatggctcactgcagccttgaacttcctggctcaagtgatcttcccacctcagcctcccaagcagctgaaactacagacacctgccaccatccccatctaattttttaatttttttagagatgggtctcaccatgtctcccaggttggtcctgaactcctgggctcaagtgatcctcctgccttagactcccaaagtgttgggattatgggtatgagccaccatgcccagcctgggagctgattattgatgacttttcagagagggtcactggggattttttttgtgtacctggaaaaacactttctagttttctgaagaagtatttgtggatttcttttgagatttttattatccctsaagttaataagtgaaggatgatgaaggctcctttaattgactcttattttctaccagacactctgctgagtccctcctaacactaacactcacttcaacagttattagccccatggtgcagatgaggaaactgacacttggatagatgtgaagccatttgcttaaggccacccagctggacatggtgacatgagaccttaaacctggaacttcttttttgtttttttttcttttttttttctttgtttttcttttctttttttctttttttttttttttttgagacggagtctcatctcactctgtcacctaggctggagtgcagtggcgagatcttggctcactgcaacctccgtctcccaggttcaagcgattctcctgcctcagcctcctgagtagctgggactacaggcatgcaccacaatgtctggctaatttttgtattttttagtagagatggggtttcaccacattggccaggcttgtcttgaactcctgacctcgtgatccacccaccttggcctcccaaagtgctgggattacaggcgtgagccaccgcaga

SEQ ID NO: 75342 - DNA, 1027 bp, Homo sapiens
caagccctgtggctgcacagtgagcagaaccttagaaaggcctgcaagcgttgcctgcagagctggtaattaccctgttgcccgggctggagtgcaatggtgcgattatggctcactgcagccttgaacttcctggctcaagtgatcttcccacctcagcctcccaagcagctgaaactacagacacctgccaccatccccatctaattttttaatttttttagagatgggtctcaccatgtctcccaggttggtcctgaactcctgggctcaagtgatcctcctgccttagactcccaaagtgttgggattatgggtatgagccaccatgcccagcctgggagctgattattgatgacttttcagagagggtcactggggattttttttgtgtacctggaaaaacactttctagttttctgaagaagtatttgtggatttcttttgagatttttattatccctcaagttaataagtgaaggatgatgaaggctcctttaattgactcttattttctaccagacactctgctgagtccctcctaacactaacactcacttcaacagttattagccccatggtgcagatgaggaaactgacacttggatagatgtgaagccatttgcttaaggccacccagctggacatggtgacatgagaccttaaacctggaacttcttttttgtttttttttcttttttttttctttgtttttcttttctttttttctttttttttttttttttgagacrgagtctcatctcactctgtcacctaggctggagtgcagtggcgagatcttggctcactgcaacctccgtctcccaggttcaagcgattctcctgcctcagcctcctgagtagctgggactacaggcatgcaccacaatgtctggctaatttttgtattttttagtagagatggggtttcaccacattggccaggcttgtcttgaactcctgacctcgtgatccacccaccttggcctcccaaagtgctgggattacaggcgtgagccaccgcaga

SEQ ID NO: 75343 - DNA, 1531 bp, Homo sapiens
tgggccaataggtggaccacagactgggctggaaacaagacagcaagcttccccttattgtgccactgcaatcattgagcaccatctttttctcctagagaggtaagggtttgggaaggaagagacagaggtgaacaggctttgagattcttagcttccaagggtttttcagagccccacaaggtttgagtgggacacaacaaggaccaccccatacatatataccttgaccttgggtggttacttgagataaatgagccaaagactgcagagactttaaattgttctgaaatgtaaattttttcggctacactgctgaaattcacagagatttgcattttagaacttacctccaatcttggaataaaataatttttcatctttgttgaattttagacttcaggagcaagcagatgaggtagtttctttttgtctctctcctctctttttcttttttgtttgccttgcagttcctaagtgaatgtggtacttaggagcaatataaaaaggaggatgaatcaactataaaatataccttttaagttttacaactctttttattttgtttttgattagaatacacacttaggtagtcktggactttaagctcgtttgctggaagcaggtggaaagtgaaggaatgtgccgtgcccgagatccatgtttcccacaagtccataagtcctttgtggtttgtgtgcctgccctccttgtgtttttcactcagccagcttgtatttactgagcgctcgctcgccctgtgccaggcctctgccaagcctactggttctgccctggagaagttcacagttccagccatctgggaacatccagtgacagtgcagcccaagcaggaagatggttaaggcacagaggagacagcattgaccttcacctgggtggatccaggactgcctgcttgtaaaggaggaggaggcaggagtccatccagaagaaaaggagggaggagagaaggttcttttgggcattagcagtggcagaccaggtgtgagagagcaggagaggtttgggaatgagggataagttaagtgtaggcagagaccttagcagatgacagagggaatagttggagttaaagctggagagcttgcagaagcccagattgtgaagggccttgtgtgcagtgttgggaagctctttatataggggaacaaaactttgagttttggaacctagtgacaataaggaggatgggttgaaggaatgagagcctacagacaatgtcttagcccacagcctctaggaagcagggcctgagacaaagactaaagtaccaatattttgctgcagaaggagttgcaaatccagggcagcaaggatgaaggaaaagggaagtgcagggtaacagacgttgtgtctgaccatgctggctcctgctcaccaggggcccagagacacagcagcacattgggctctctggactctccccaaaggcctgcaaggaggagctctaccttggaatagtggaatagtctggaggagagaaaggaggtgggttttattcgccctg

SEQ ID NO: 75344 - DNA, 1531 bp, Homo sapiens
tgggccaataggtggaccacagactgggctggaaacaagacagcaagcttccccttattgtgccactgcaatcattgagcaccatctttttctcctagagaggtaagggtttgggaaggaagagacagaggtgaacaggctttgagattcttagcttccaagggtttttcagagccccacaaggtttgagtgggacacaacaaggaccaccccatacatatataccttgaccttgggtggttacttgagataaatgagccaaagactgcagagactttaaattgttctgaaatgtaaattttttcggctacactgctgaaattcacagagatttgcattttagaacttacctccaatcttggaataaaataatttttcatctttgttgaattttagacttcaggagcaagcagatgaggtagtttctttttgtctctctcctctctttttcttttttgtttgccttgcagttcctaagtgaatgtggtacttaggagcaatataaaaaggaggatgaatcaactataaaatataccttttaagttttacaactctttttattttgtttttgattagaatacacacttaggtagtcttggactttaagctcgtttgctggaagcaggtggaaagtgaaggaatgtgccgtgcccgagatccatgtttcccacaagtccataagtcctttgtggtttgtgtgcctgccctccttgtgtttttcactcagccagcttgtatttactgagcgctcgctcgccctgtgccaggcctctgccaagcctactggttctgccctggagaagttcacagttccagccatctgggaacatccagtgacagtgcagcccaagcaggaagatggttaaggcacagagragacagcattgaccttcacctgggtggatccaggactgcctgcttgtaaaggaggaggaggcaggagtccatccagaagaaaaggagggaggagagaaggttcttttgggcattagcagtggcagaccaggtgtgagagagcaggagaggtttgggaatgagggataagttaagtgtaggcagagaccttagcagatgacagagggaatagttggagttaaagctggagagcttgcagaagcccagattgtgaagggccttgtgtgcagtgttgggaagctctttatataggggaacaaaactttgagttttggaacctagtgacaataaggaggatgggttgaaggaatgagagcctacagacaatgtcttagcccacagcctctaggaagcagggcctgagacaaagactaaagtaccaatattttgctgcagaaggagttgcaaatccagggcagcaaggatgaaggaaaagggaagtgcagggtaacagacgttgtgtctgaccatgctggctcctgctcaccaggggcccagagacacagcagcacattgggctctctggactctccccaaaggcctgcaaggaggagctctaccttggaatagtggaatagtctggaggagagaaaggaggtgggttttattcgccctg

SEQ ID NO: 75345 - DNA, 1531 bp, Homo sapiens
tgggccaataggtggaccacagactgggctggaaacaagacagcaagcttccccttattgtgccactgcaatcattgagcaccatctttttctcctagagaggtaagggtttgggaaggaagagacagaggtgaacaggctttgagattcttagcttccaagggtttttcagagccccacaaggtttgagtgggacacaacaaggaccaccccatacatatataccttgaccttgggtggttacttgagataaatgagccaaagactgcagagactttaaattgttctgaaatgtaaattttttcggctacactgctgaaattcacagagatttgcattttagaacttacctccaatcttggaataaaataatttttcatctttgttgaattttagacttcaggagcaagcagatgaggtagtttctttttgtctctctcctctctttttcttttttgtttgccttgcagttcctaagtgaatgtggtacttaggagcaatataaaaaggaggatgaatcaactataaaatataccttttaagttttacaactctttttattttgtttttgattagaatacacacttaggtagtcttggactttaagctcgtttgctggaagcaggtggaaagtgaaggaatgtgccgtgcccgagatccatgtttcccacaagtccataagtcctttgtggtttgtgtgcctgccctccttgtgtttttcactcagccagcttgtatttactgagcgctcgctcgccctgtgccaggcctctgccaagcctactggttctgccctggagaagttcacagttccagccatctgggaacatccagtgacagtgcagcccaagcaggaagatggttaaggcacagaggagacagcawtgaccttcacctgggtggatccaggactgcctgcttgtaaaggaggaggaggcaggagtccatccagaagaaaaggagggaggagagaaggttcttttgggcattagcagtggcagaccaggtgtgagagagcaggagaggtttgggaatgagggataagttaagtgtaggcagagaccttagcagatgacagagggaatagttggagttaaagctggagagcttgcagaagcccagattgtgaagggccttgtgtgcagtgttgggaagctctttatataggggaacaaaactttgagttttggaacctagtgacaataaggaggatgggttgaaggaatgagagcctacagacaatgtcttagcccacagcctctaggaagcagggcctgagacaaagactaaagtaccaatattttgctgcagaaggagttgcaaatccagggcagcaaggatgaaggaaaagggaagtgcagggtaacagacgttgtgtctgaccatgctggctcctgctcaccaggggcccagagacacagcagcacattgggctctctggactctccccaaaggcctgcaaggaggagctctaccttggaatagtggaatagtctggaggagagaaaggaggtgggttttattcgccctg

SEQ ID NO: 75346 - DNA, 743 bp, Homo sapiens
aagtatctgctatagttttgagatgtgtctagtattgtacttgttatctataccagttttggggaaattaataagagtattagagggttctgtctttttttttttttttttttttgagatggartcttactctcagctcactgcaacctccgcctcccaggttcaagcgattcttctgcttcagcctcctgagtagctgggattataggcgtgcactaccatacctagctaatgtttgtatttttagtagagacagggtctcactgtcttggccaggctggtcttgaactcctgaccctgtgatccacccgccttggcctcccaaagtgctgggattacaggcgtgagccaccatgcctggccttagagagttctgttttttttttttgtttgtttgtttgtttgaaatggagttttgctcttgttgcccaggctggagtgcaatggcgcgatctcggctcactgcaacctccgcctcccaggttcaagcaattctcctgcctcagcctcccaagtagctgggattacaggcatgcaccaccacattaatcttgtatttttagtagagacggggtttctccatgttgaggctggtttcgaactcctgatctcagatgatccacctgcctccacctcccaaagtgctgggattacagacttgagccaccgcacctggctgagagttctgtcttaaatgttcttcagtatagcaagtatgtgagtgtctaacttatgtttagccc

SEQ ID NO: 75347 - DNA, 637 bp, Homo sapiens
tgaaattattttagagccagtgtggcagggctgtgggactatccttggcttcatatgatcgactggttccagaaccactgaaattgtgtgacacatctatgatcagtgtcaagactagggagggcagaagagaattgccaagtgaagtggcacctggatctgatgtactatctgcagtagcccttcctccctccccagctctcttattaagggtcaaagacttctccccatccctctgagaagtttcttcagccttctgctccattttggactttttggtagccactggagccaggggcttcacagtactcaaactgctggattgagattctgggatctgagctacaactgtttggggggaagccctggcagcctacctgtgtatttccggtggctcccgtttgatcttagcacttgattccatgacttcctttgcaactcggccactgtaagtagtgtaataaaaacaagcagcaagaaatgagactgtgttgtaggacagctcctctccaagatcttaggtgctttccctgaatcaggaaatggcatctgtgrcccaccctttccctgatgttttggtcatggagaaaggcttgcttggtggggtagacttctaaactgtcatgacagcctatct

SEQ ID NO: 75348 - DNA, 1301 bp, Homo sapiens
tgcatggaggctcctgcagagcaaggactgacatcggatggatgtaagtgctgggttcagactgtcttgagacccagggaaagaggtttatwttaggcccttacaccctgagggagcaggggagctcagctcctccatccctaccatgaatcagtggactaaggacaactctctacaggtccccatttccctacaaccctcagatactctctcaagcctctctgctctccttaacccctcccgcaaggcacagaattacacaactttcagaggctatcagttatacattcagcatggaatctcagaaaccacactggccctggagtcaaacaggtctgagctcgaggctggctttgccactgacctggggcaagttacttaacttgtctgagactttatttactcatctggataacagatattatcattagggatactcatctcattttgttaaggatgagatggaataacatacgtgaagctcttagcttagtgcctggcacgactcagtgagcagtatacatcagctggaagaattaggtttgtgtgcagcgcagagcctggcaagcagtaggaactccataaatgtttacttctcctctttcccatgttcttatctctctctagttccttctcattttaaccttcaccacatccacatattctcttactctcctcaagcacattctgacctaactaaaaaaccaatgaacaggatacaattcgcctttttttcttcatataccaccactctaggggatgaagagatcttggagtaactggccctccttttttttttttttttttaaagacaagagtcttgctctgtctcccaggctggagtgcagtggtgtgatcttggctcactgcaacctccacctcccgggttcgagtgattctcatgtctcagcctcccaagtagctgggactacaggcacatgccaccatttccgcgaatttttgtatttttagtggagacggggttttgccatgttgcccaggctggtcatgaactcctgggctgaaacaatccgcctgccttagcctcccaaagtgctgggattacaggcatgagccagtgcacacagccagccttcctttttaaggataaaagtttggaccaaacaaagaaacaccatcattacctctctactttggtggggatgccagagagtacatctccacaaagagcaaagggtagatgaagggaagttatagaaactgcaggtgtctgcaagctgggaggctgggcaaatggacgtaagaaatacaacactataagccattaactcactcatgca

SEQ ID NO: 75349 - DNA, 1301 bp, Homo sapiens
tgcatggaggctcctgcagagcaaggactgacatcggatggatgtaagtgctgggttcagactgtcttgagacccagggaaagaggtttatattaggcccttacaccctgagggagcaggggagctcagctcctccatccctaccatgaatcagtggactaaggacaactctctacaggtccccatttccctacaaccctcagwtactctctcaagcctctctgctctccttaacccctcccgcaaggcacagaattacacaactttcagaggctatcagttatacattcagcatggaatctcagaaaccacactggccctggagtcaaacaggtctgagctcgaggctggctttgccactgacctggggcaagttacttaacttgtctgagactttatttactcatctggataacagatattatcattagggatactcatctcattttgttaaggatgagatggaataacatacgtgaagctcttagcttagtgcctggcacgactcagtgagcagtatacatcagctggaagaattaggtttgtgtgcagcgcagagcctggcaagcagtaggaactccataaatgtttacttctcctctttcccatgttcttatctctctctagttccttctcattttaaccttcaccacatccacatattctcttactctcctcaagcacattctgacctaactaaaaaaccaatgaacaggatacaattcgcctttttttcttcatataccaccactctaggggatgaagagatcttggagtaactggccctccttttttttttttttttttaaagacaagagtcttgctctgtctcccaggctggagtgcagtggtgtgatcttggctcactgcaacctccacctcccgggttcgagtgattctcatgtctcagcctcccaagtagctgggactacaggcacatgccaccatttccgcgaatttttgtatttttagtggagacggggttttgccatgttgcccaggctggtcatgaactcctgggctgaaacaatccgcctgccttagcctcccaaagtgctgggattacaggcatgagccagtgcacacagccagccttcctttttaaggataaaagtttggaccaaacaaagaaacaccatcattacctctctactttggtggggatgccagagagtacatctccacaaagagcaaagggtagatgaagggaagttatagaaactgcaggtgtctgcaagctgggaggctgggcaaatggacgtaagaaatacaacactataagccattaactcactcatgca

SEQ ID NO: 75350 - DNA, 1301 bp, Homo sapiens
tgcatggaggctcctgcagagcaaggactgacatcggatggatgtaagtgctgggttcagactgtcttgagacccagggaaagaggtttatattaggcccttacaccctgagggagcaggggagctcagctcctccatccctaccatgaatcagtggactaaggacaactctctacaggtccccatttccctacaaccctcagatactstctcaagcctctctgctctccttaacccctcccgcaaggcacagaattacacaactttcagaggctatcagttatacattcagcatggaatctcagaaaccacactggccctggagtcaaacaggtctgagctcgaggctggctttgccactgacctggggcaagttacttaacttgtctgagactttatttactcatctggataacagatattatcattagggatactcatctcattttgttaaggatgagatggaataacatacgtgaagctcttagcttagtgcctggcacgactcagtgagcagtatacatcagctggaagaattaggtttgtgtgcagcgcagagcctggcaagcagtaggaactccataaatgtttacttctcctctttcccatgttcttatctctctctagttccttctcattttaaccttcaccacatccacatattctcttactctcctcaagcacattctgacctaactaaaaaaccaatgaacaggatacaattcgcctttttttcttcatataccaccactctaggggatgaagagatcttggagtaactggccctccttttttttttttttttttaaagacaagagtcttgctctgtctcccaggctggagtgcagtggtgtgatcttggctcactgcaacctccacctcccgggttcgagtgattctcatgtctcagcctcccaagtagctgggactacaggcacatgccaccatttccgcgaatttttgtatttttagtggagacggggttttgccatgttgcccaggctggtcatgaactcctgggctgaaacaatccgcctgccttagcctcccaaagtgctgggattacaggcatgagccagtgcacacagccagccttcctttttaaggataaaagtttggaccaaacaaagaaacaccatcattacctctctactttggtggggatgccagagagtacatctccacaaagagcaaagggtagatgaagggaagttatagaaactgcaggtgtctgcaagctgggaggctgggcaaatggacgtaagaaatacaacactataagccattaactcactcatgca

SEQ ID NO: 75351 - DNA, 234 bp, Homo sapiens
ccaytcctcccccacctcagcccctggactgcaacccaccaggccgtgttcgggggtggtcagagccctggtctcagccagacctgaggtctgatgtggcttcatccctgagtctctaaacgccctggccttactgggcctcagttaattcacctgtgaaaggggaggcttggaccagagggcccctcagggtatgtgttttgtggaggggaggtgggcgtgtggggtaggggt

SEQ ID NO: 75352 - DNA, 669 bp, Homo sapiens
gggacagagtgtgccctggcccaggcccagcctcgtccctacccttctcgctcactgctccctcagagcagacaatgagccccaggttgtccctgagctcccagtctcatagttcacagtcaggracactgagtgggagtgggtggggcctacccaaggacccagtggtcggggatggagcatggataacacagcagctcacccggccacgggtgctcagctctcccggccacagcccctcccaggctcctggagtcttcatattagagtagaaagcctcttgcacttcacatctgagaccaaggagcctctccccacccacaagtgtgggtgtcttccacactgtgactgtgacttagttatgccctggcatgatcgttgtcaaccttcatgttttttggttttggctttggttttagtttagaagaacttacgttttctggactaaaacataggcagggaagaaatacataaacccatagaaaggctgctttagttgaagtgggttgagagctcggcttctaccccgtcaagaaattcacagcgaaaggaacacatgcattttgctcactggcagaaagagcctgcaccaaagacaacccgcagggccagcaaccccaacatcatacagggtggagcagcagttcccaaagcgggtgcaactggaca

SEQ ID NO: 75353 - DNA, 641 bp, Homo sapiens
gtatcctattgggtaggtagtgggtgatgtaatgttgagaattttgggctgagtaatatgactagattcttgttttattttaattaattaattaatttatattaaaatagaaacagggtctcactaggttgccaggctggtcttgaactcctaggctcaagtgatcctctcaccttggccacccaaagtgctgcgattacaggcatgagtcaccatacctagccatgatccgtattttatttatttatctttgtttttatttttatttaaattttattttattttgggacagagattgcagtggcgcgatcttggctccctgcagcctctgcctcttggmaagcgattcttctgcctcagccatccaagtagctggaattacaggcacataccatcacaactggctaatttttgtatttttagtagagacagggtttcaccatgttggccaggctggtctcaaactcctgacttcaagtgatcctcccacctaggcctcccaaagtgctgggattacaggtgtgagccaccgcaccccgccaggattcatgttttagacaaatcattctgacagtgtggagggggtgcaaatttgaggcaggaggacccactgggaagggaaggggctctaggatggatcc

SEQ ID NO: 75354 - DNA, 828 bp, Homo sapiens
aaacaggctggtcctgcccctgctacaccactgcactagcagactgataacccaatgcagtcaaccccgggagtaactcagacaaatttatttgctgaaataatgtatgctttgggcagtcccaaccatgctaaatctggtgagcctgctatcacaccagtaaagaggagcacatatggtgaggcattaactgtggagtacctgctcctccttccaaccgcaggcaccaggtaaaagagaattctccaccaactctaggaacctgacaacctcttggatgggcagtgaagaaatgctaattgggttgtttaacccaatcagttccttgatgtggtggggaagaaccctggatttggggtttgatcaaaattcagcttggacccggtgcggtggctcacacctgtaatcccagcactttgggaggccaaggtgggcagatcacttgaggtcaagagttcaagaccagcctggccaacatggtgaaatccygtctctactaaaaatacaaaaattagctgggcatgaaggccagctactcgggaggctgaggtaggagcatcacttgaactgaggaggcggaggttgcggtgagccaagatcacgccattgcactccagcctgggaaacagagcaagactttgtctccaaaaacaaaacaaaacaaaaaaacaacaaaaaagcagctctgctacttagcaactccaatccctagtgcctcactgtctaacggggacatatctaaaaaggctgctattatgatacataaaagaatggataaacaaacggtggcacatccatataatggatgctactcagcattaaacacaa

SEQ ID NO: 75355 - DNA, 828 bp, Homo sapiens
aaacaggctggtcctgcccctgctacaccactgcactagcagactgataacccaatgcagtcaaccccgggagtaactcagacaaatttatttgctgaaataatgtatgctttgggcagtcccaaccatgctaaatctggtgagcctgctatcacaccagtaaagaggagcacatatggtgaggcattaactgtggagtacctgctcctccttccaaccgcaggcaccaggtaaaagagaattctccaccaactctaggaacctgacaacctcttggatgggcagtgaagaaatgctaattgggttgtttaacccaatcagttccttgatgtggtggggaagaaccctggatttggggtttgatcaaaattcagcttggacccggtgcggtggctcacacctgtaatcccagcactttgggaggccaaggtgggcagatcacttgaggtcaagagttcaagaccagcctggccaacatggtgaaatcccgtctctactaaaaatacaaaaattagctgggcatgaaggccagctactcgggaggctgaggtaggagcatcacttgaactgaggaggcggaggttgcggtgagccaagatcacgccattgcactccagcctgggaaacagagcaagactttgtctccaaaaacaaaacaaaamaaaaaaacaacaaaaaagcagctctgctacttagcaactccaatccctagtgcctcactgtctaacggggacatatctaaaaaggctgctattatgatacataaaagaatggataaacaaacggtggcacatccatataatggatgctactcagcattaaacacaa

SEQ ID NO: 75356 - DNA, 1043 bp, Homo sapiens
ctttcagcttttctttcttccatgctgctttccctcagcatgcagatttgctcaatggtctctcattttaaagaaaccttcccttaaagctgggcgcggtggctgacacctgctcgaggcaggcggatcacgaggtcaggagatcgagaccatcctggctaatacagtgaaaccccatctctactaaaaatacaaaaaattagccaggcatggtggcacgcgcctgtagtcccagctactcgggaggctgaggcaggagaatggtgttaacctgggaggtggaggttgcagtgagcagagatcacaccactgcaccccagcctggacaacagagggagactctgtctcaaaaaaaaaaaaaaaaaaaaaaagaaaaagaaaaagaaaagaaacyttcccttgagcctatatagggatctctgctctttagggcttctctttttcacagtcaaacttactgttactcaattcctcacatttttcaaatagtggcttctcagttggttgtattaataaacccttggacacaggaaagtgggtagggaatccctttcctcccatctggctgccagtcccagtattgctctcaggagagaggagaggttcaagaggcttccatccctggtcttcccatcccttctttgcgcctcaggccagtcctcagcagcagcatgccctgggagggtggacgctagaggacaaaggagaattttgcctgctgccctcccctctctcaagccttcttcctgtttttttatccttcatatcactatcatcagccacaacagtctcagctctgcatctgtccccaggactctctccccaactcccagggtccactcccatctcctctagcacccacgcccctggatgtcaggccatcctccctccaacttctcaatagatgtgccagcaagggggaaagtgtatgtggcctctcatgttggaattttgagcttattttccaatagaaatattttcccccaccccaggggctctatgatacaataattcaggtaatttggaggttttaaataactgta

SEQ ID NO: 75357 - DNA, 1043 bp, Homo sapiens
ctttcagcttttctttcttccatgctgctttccctcagcatgcagatttgctcaatggtctctcattttaaagaaaccttcccttaaagctgggcgcggtggctgacacctgctcgaggcaggcggatcacgaggtcaggagatcgagaccatcctggctaatacagtgaaaccccatctctactaaaaatacaaaaaattagccaggcatggtggcacgcgcctgtagtcccagctactcgggaggctgaggcaggagaatggtgttaacctgggaggtggaggttgcagtgagcagagatcacaccactgcaccccagcctggacaacagagggagactctgtctcaaaaaaaaaaaaaaaaaaaaaaagaaaaagaaaaagaaaagaaactttcccttgagcctatatagggatctctgctctttagggcttctctttttcacagtcaaacttactgttactcaattcctcacatttttcaaatagtggcttctcagttggttgtattaataaacccttggacacaggaaagtgggtagggaatccctttcctcccatctggctgccagtcccagtattgctctcaggagagaggagaggttcaagaggcttccatccctggtcttcccatcccttctttgcgcctcaggccagtcctcagcagcagcatgcccygggagggtggacgctagaggacaaaggagaattttgcctgctgccctcccctctctcaagccttcttcctgtttttttatccttcatatcactatcatcagccacaacagtctcagctctgcatctgtccccaggactctctccccaactcccagggtccactcccatctcctctagcacccacgcccctggatgtcaggccatcctccctccaacttctcaatagatgtgccagcaagggggaaagtgtatgtggcctctcatgttggaattttgagcttattttccaatagaaatattttcccccaccccaggggctctatgatacaataattcaggtaatttggaggttttaaataactgta

SEQ ID NO: 75358 - DNA, 720 bp, Homo sapiens
tcaaaggctaggggttgggtggcaamtcctgaggaccctaggtagaaggaaaaaagaagcccatgcagctcaactttgaaccccagccctctcctctcttcagaccccttccagctgccaacagggcagctccttaggtcacctcagcctggatatgttgacattcaccatcttctgggtgtggtcctccactgcaccctaccatgcaccccaagtaaagctccagctgggaaagtctttcagtttgctcaggaatctagtgacttacataattatctttagttagaagcttagagagaagaggatcatttatgtataagtgataggaccctcagaattctttcttctctaataaaataatgaggtcactaatccagttgtcattcaactatctcttaatatttcaatgatgtgagtctagctgtaaccaaaaaacacaaggttaacctcaggattcatgcagaagctgcttgaaacctagtcccatctatagtcgtgcagccaggattgtcaggagtctgcagtgtcaaataaggcagtataattgcttctgttgaaggtaagaggagggtggggagagaggaagacatcaaattcctctgaagcaggtagagttcatcaaccctaacttaattgtaagcttcaaataggataaatcattatggtccctcattttgttaaggtttgacagctttctgacagcttccaataaaaacaaaa

SEQ ID NO: 75359 - DNA, 700 bp, Homo sapiens
acagtgtgcyataacatgtgagcctaatcctgttttggggttctttgtgaacattctgtctgtgatacagccattctgttggtggctttagaggatgactctagaagattgtgagatttattcataacatctacttttatttaagccagattatctccaaatttggatgggagtttgtctggtcatttttgtgtgatgaagtgacgtaactacagggtcctctagagaagcagaaccaacaggatatagcaaatgagggattggctcatgtgattatgagggagaaatcctatgatctgctgtgtgtaagctacagaaccaggaatgccggtggtacagttccactccaaacctgaggcctgagaaccaggaacactgatgtctgagggtccaagtggagcacaaatttgccatttttccactttttggctctattcttgccctccaggaattggatgatgctcactcacatgggtgagacggtcttctgtcctcagtttaccaattcaaatgttaatatcttctggaaacaccctcacagacacacccagaaaaaatatttaacaagatctctgagcatcctttagcccagtcaagttgacacacacactatatacatatatttttattttattttattttattttattttattttattttattttattttattttattgagatggagtctcgctctgt

SEQ ID NO: 75360 - DNA, 713 bp, Homo sapiens
ctggagcccaggtggtcaaggctgcagtgagctaggattgcwtcacttcagcctgggtgaagcaaggtcctgtttctaaaaaggaaaaaaagtattttctgaagggtacacctcagagtaaaataaaattaaaaaaaaactggcttaaacatacactgcaattccaaaaagactaatacagttcttccatatttcactgtttagaagagattgcaaaaagttccttatgagagagttttgtaaatgagacctcaacacctgtcatatggaaagagaaaacaggttttcatgctctgacaattctatgctttatcaaagtagttctaagtgaaaacctgaagcaaataaaattgaagccacgatgttttcatcaggggaaattagccactcagtgaatactcaattttcacggggagtgatggtgattaggaagctgtgaaaacacctgctaaaattgtttctgaaaaaccctcacattttcagcttccttggaaagctgagattcgttttctgagcacagtcttgttacacgttgaccatcctatcaagagtacctggtccacatgtcaggggcagtggatcaaagcccttgcccaccttgcactttttgcaaatactgagctccctgatttaagaacaagatgaagggagccacaggagccagaaaggactgaggcaatgttgtcaccacaacacagattctgtctccaagg

SEQ ID NO: 75361 - DNA, 848 bp, Homo sapiens
gtgattgggctccacgggtgtcagcggctttggtagtaatggcagcggaacttgaggagccgagaccacgggccatagcgctagggaggcagagctgcgacaatcaccctggcagcatgactatgtttttcttcatgcggacatgatatccatgggattcctgtgacgtgtggtaacgcgtgtacatcgcgtagtgatcgatggtcaactgaggggatgtagggcatccatcccgtgggtatctgtcatctctacctgttgggagcatctcaggtgctgtcttccaggagctcttcggaaacaagcactaatacatcgttgttacccctagtcgccctactccgccgtagaacattattggaacgtattccctccatccaaacgcatgctcggacccatttcaccaacctcttttcaccgcagtcacccacacaccctctccagcctctggtgtctatcgttctactctctacctccacaaggtgaacattttgagctcccaggattggagtaagaacctgccctctctgtctttctgtgcccggctcgtttgatgttccatcgtgacctttagctccgcctctgttgctgcagaccagaggatttcgttcttttctatggccaaagagtattccatggkgtctatatgccacatttttgttaatccatttcccggccgatggacacttatgttgtcttatccacatcttccctacctgcacgtccttcataggctctctgcaagaagaaaaatatggctctttctgcccgacctcgcaggcagtcagaccttaccgttgtcttcccctgttccctaaaagtcgctgttattctattctttttcaagg

SEQ ID NO: 75362 - DNA, 981 bp, Homo sapiens
tgcatcaatactcacataacatggaaaatgctatttaaacaatagaaaactcctaaataaaaattttaagaaccttacatttattttcatgtatactctgaaatctaggggctgtaatggttaattttatgtgtcaacttgactgggctataggatgcctgggtgtgtctgtgagggtgtttctgaaagagactggcatttgagttggtagactgagtggagatctgccctcaccaatacaggcgggcctcatccaatccaatgaaagcctaaatagaagaaaaaatggaggcaggggaaatttgctctgtctgcttgagctgggacctctgatttttaccttccctcaggcttcagtattcctggttctcaggtcttgaaactggactgggacttataacactgattgtcctgggtttcaggcctctggtttggactagaactacattgctagctttcccggatctctggctcccagatggcagctcatgggatttatcagcctccataatcacataagccaacccatcaaaataaatctctttctatataactacatgttaatatatcctgctggttctgtttctcttgagaactatgactaatacaggggccacaattatgacaggatttattcttatattaaacaaattatttgtctttttaaatttagatttaatttaaatattgtaaaatatacagctcttaagtatacagtggcatgagttttgacaaacgtctacactcatgcaaccaatactacacttgagacataggacatttctactaacctagaaatttctcattcccttttgcagtcaaactctgaccttaaagaaaaccactaatcttatttgtatcamcagagagtaattttacctattttaaaattttatctagattgaatcacttttcatttaacatgttttttaaaattcacccattttgtcacgtgtcaatagttcattttatattgctata

SEQ ID NO: 75363 - DNA, 566 bp, Homo sapiens
agcgagttacttattctcctcaaacttttttttcacctttaaaatggagataagagtagtattactctatagggctatttgagggacttaaataatagcatatattacaaaattgttggatttaggttacagcggcttgacatgcttatgcttataacattcgactctacttcagcatgayggccacaaattgagttatatcacacactctgaagcaccacaaggagctcctaccctccacactcagttcagctctcatgtcacttggcaactcctttacttgcctttaatcattttcactgccttaagtgccattccaaaattcagcactgtcctcaagctgatatccagtctcattcattttacatccagtagatagtctcagcttctaaatcatgaagtaacttaggagatcagaaatgacctatcccacttctcacatgcccattaactgcaaatatctttatatcccttgcacgcctgctctttttcctctagtcttagagaacacttgcttagtctcagccagtgatcttacacatattctttgtatcatcccttcccca

SEQ ID NO: 75364 - DNA, 566 bp, Homo sapiens
agcgagttacttattctcctcaaacttttttttcacctttaaaatggagataagagtagtattactctatagggctatttgagggacttaaataatagcatatattacaaaattgttggatttaggttacagcggcttgacatgcttatgcttataacattcgactctacttcagcatgatggccacaaattgagttatatcacacrctctgaagcaccacaaggagctcctaccctccacactcagttcagctctcatgtcacttggcaactcctttacttgcctttaatcattttcactgccttaagtgccattccaaaattcagcactgtcctcaagctgatatccagtctcattcattttacatccagtagatagtctcagcttctaaatcatgaagtaacttaggagatcagaaatgacctatcccacttctcacatgcccattaactgcaaatatctttatatcccttgcacgcctgctctttttcctctagtcttagagaacacttgcttagtctcagccagtgatcttacacatattctttgtatcatcccttcccca

SEQ ID NO: 75365 - DNA, 566 bp, Homo sapiens
agcgagttacttattctcctcaaacttttttttcacctttaaaatggagataagagtagtattactctatagggctatttgagggacttaaataatagcatatattacaaaattgttggatttaggttacagcggcttgacatgcttatgcttataacattcgactctacttcagcatgatggccacaaattgagttatatcacacactctgaagcaccacaaggagctcctaccctccacactcagttcagctctcatgtcacttggcaactcctttacttgcctttaatcattttcactgccttaagtgccattccaaaattcagcactgtcctcaagctgatatccagtctcattcattttacatccrgtagatagtctcagcttctaaatcatgaagtaacttaggagatcagaaatgacctatcccacttctcacatgcccattaactgcaaatatctttatatcccttgcacgcctgctctttttcctctagtcttagagaacacttgcttagtctcagccagtgatcttacacatattctttgtatcatcccttcccca

SEQ ID NO: 75366 - DNA, 718 bp, Homo sapiens
cttcaaatgcaaatatataatttgttcttgctgaattcataggaatgtggctctaacttgctttgatcttattacaatttctgtatatttggagaatatgagtgtttattacatattttaaaatattcacttaccattttgtagtataaccactatattatttagactakttttaaaaagatgtgaccaatatgtaaagcaatgtgttaggaagaagtattttgacctgtgaataccctccactacaataacactcaaactgcagcatgaagattttacaaataagcaaactgattgaaactagaacataattagatcaacatcaggtgactaagagtcagatttgacatcagaactcaaatctttcaataccatatgttttagaaacatagatatataagacaatagacacaggaaaaatttcacagtgaatgataaagcactctttttattaccttataaactaggaaacatcttccagaccagtgatggcttgtacttatttgaagttttatattacaagaaaatatccatttgattttctttgcatagcctaaatttacccactgaaatatagcaacaaatgtttcattaggtactgaatgctataacctccaagctcctaccatagaagtcagtgagctattggcagggcgcagtggctcatgcctgtaatcccagcactttgggaggctgaggctggcagatcacttgaggt

SEQ ID NO: 75367 - DNA, 718 bp, Homo sapiens
cttcaaatgcaaatatataatttgttcttgctgaattcataggaatgtggctctaacttgctttgatcttattacaatttctgtatatttggagaatatgagtgtttattacatattttaaaatattcacttaccattttgtagtataaccactatattatttagactagttttaaaaagatgtgaccaatatgtaaagcaatgtgttaggaagaagtattttkacctgtgaataccctccactacaataacactcaaactgcagcatgaagattttacaaataagcaaactgattgaaactagaacataattagatcaacatcaggtgactaagagtcagatttgacatcagaactcaaatctttcaataccatatgttttagaaacatagatatataagacaatagacacaggaaaaatttcacagtgaatgataaagcactctttttattaccttataaactaggaaacatcttccagaccagtgatggcttgtacttatttgaagttttatattacaagaaaatatccatttgattttctttgcatagcctaaatttacccactgaaatatagcaacaaatgtttcattaggtactgaatgctataacctccaagctcctaccatagaagtcagtgagctattggcagggcgcagtggctcatgcctgtaatcccagcactttgggaggctgaggctggcagatcacttgaggt

SEQ ID NO: 75368 - DNA, 738 bp, Homo sapiens
ctgcttttacattgatataggagtaggacagacttctcaacttcagcattattaacattttgggctagataactactggggagagtctgccctgagcatagtaagatatttggctgtaactccccgctgctaactagacaacacaggaacccgcctgtttgaaattatatatatatacacacacacatatatatatatatataaaatamatatatacacacacatatatatatatatgtaagtacatatatatatatatatacacgtgtatgtgtgtatatatatatattccaacattcccaaatatttactggggggaataatcactccctgttgaaagctacttatctggaccatttatttaacatgcaaacaggtaaaagttcactcatcaaaatttaccaaagatttctcaacacacttaaaatccagtgtggtcaccatatccatcgtaaccctaacacttctccataatcactgtttgtcacctgtcatagtctttgctcttcctgggaaaggccaccacatccccacttgaaatctttatacttcacgtttttctttttttttttttttctggaatgttgtttcttaagaaattactaagatttgcactttcactttaaatctcagctcttcacagtattattttctctcagcagagtactgacttataagtacagggactccatcttgttagtggctgtaagattataatctgtaacagtgatttgcttt

SEQ ID NO: 75369 - DNA, 738 bp, Homo sapiens
ctgcttttacattgatataggagtaggacagacttctcaacttcagcattattaacattttgggctagataactactggggagagtctgccctgagcatagtaagatatttggctgtaactccccgctgctaactagacaacacaggaacccgcctgtttgaaattatatatatatacacacacacatatatatatatatataaaatacatatatacacacacatatatatatatatgtaagtacatatatatatayatatacacgtgtatgtgtgtatatatatatattccaacattcccaaatatttactggggggaataatcactccctgttgaaagctacttatctggaccatttatttaacatgcaaacaggtaaaagttcactcatcaaaatttaccaaagatttctcaacacacttaaaatccagtgtggtcaccatatccatcgtaaccctaacacttctccataatcactgtttgtcacctgtcatagtctttgctcttcctgggaaaggccaccacatccccacttgaaatctttatacttcacgtttttctttttttttttttttctggaatgttgtttcttaagaaattactaagatttgcactttcactttaaatctcagctcttcacagtattattttctctcagcagagtactgacttataagtacagggactccatcttgttagtggctgtaagattataatctgtaacagtgatttgcttt

SEQ ID NO: 75370 - DNA, 652 bp, Homo sapiens
attcaagactaagacaaaagtgctgacaggccaataagacaaagaaaagaaggcgtcaattaacctacagcgacaggctttaaaaaaagaatagcgaatccatttattcatcttcaaatactgtttctgtaggactatttctcctcctccaaaacttctagatatagtagatatattcatgcactgcatgttgtagaaagctgtcagaagttctgatatagtcacctcaaggtccaatcctattatattagatgaaaaaaatacaaggatgctcacaaaatcagcccttcttaagaaacatcaagaaatacataaagtactttaggtgctttgcccctgagtgttgctagaacagtaacaggctacgaacaatctatgaatctagagatggcagtaaacaggattgctttcagtttatgagctgttaagcctgtttcataaagtagttcatggtgactgacagttaaaacattgggtcattcgctagttcctgtgttatgtgccaagyggcacaaggccatgaaaaatgatggtactaggagaaaaatcttacaacaaatgctcttcttgcacagccacctatgggaaagatgaacaaaaggtagagaaagagttcaaagctataaacttctccaaaagcaaagtctcagac

SEQ ID NO: 75371 - DNA, 652 bp, Homo sapiens
attcaagactaagacaaaagtgctgacaggccaataagacaaagaaaagaaggcgtcaattaacctacagcgacaggctttaaaaaaagaatagcgaatccatttattcatcttcaaatactgtttctgtaggactatttctcctcctccaaaacttctagatatagtagatatattcatgcactgcatgttgtagaaagctgtcagaagttctgatatagtcacctcaaggtccaatcctattatattagatgaaaaaaatacaaggatgctcacaaaatcagcccttcttaagaaacatcaagaaatacataaagtactttaggtgctttgcccctgagtgttgctagaacagtaacaggctacgaacaatctatgaatctagagatggcagtaaacaggattgctttcagtttatgagctgttaagcctgtttcataaagtagttcatggtgactgacagttaaaacattgggtcattcgctagttcctgtgttatgtgccaagtggcacaaggccatgaaaaatgatggtactaggagaaaaatcttacaacaaatgytcttcttgcacagccacctatgggaaagatgaacaaaaggtagagaaagagttcaaagctataaacttctccaaaagcaaagtctcagac

SEQ ID NO: 75372 - DNA, 1455 bp, Homo sapiens
tttccactaagccaataaaaatgtgaaatgcttggagaaaaaaggatggagttaaataccatacattctgtcttactggccaagattataacaacttgaaagatgattcccttcttgcctctctccccctcttcatctgcctccctttctccttccctcccctcttttttccttttctttctttcttccttcctcccttcatccctccctttcatcctttatttttctttctctttttttctcttgttctctttttctgtttgtttctttccttctttctttctgttttcattttaaggtacaaagaatcgcgtaagagccatgagaaatgaagttagtgcctgttgtttaaaataacaacagatgccatctatgtgcatataaaatataagacagattacataatatattctaacaatatatatcataaataatatgtaatatacttaatcttatttctcagtattaaaatgttttctattttttgtatcataaataataagtaaatttaattatacacaaatcttttccaagtttttgactatttccttcaattatatttttaaaagtaaatttactaaatgtatgaacaaattttaaaagatcaatgtgttaattgctgttacaaaaacgctattgatgtatggtacttattttgaagcaggtttctttatgacactgcaatcatttccaggtwtttttttccccaattatttctcttatcttagaaatgcccagttatccttcacaacttggatcccagaatgctggcagttaggtttataccctctgtgcaggaggtgggtagactgcagcctagggagtttgaggagacaaagaacaaaaaagctaaagttaccatcatccaagtttccctaataaaatagccttgccagctgaccagcaatgaggttcttagttgacagtgaccattcattagtgcagagctactaatcagcttttagatattatgcctttacatatgaatagtcaggattcattagacccaagacagagaccaaaacagatatacaggaaaccacacatctagtgaaagaccagaaagtcagaaaaccaaatggtaagtatatcagaagtatcagagaaaatggagggaacaaaataaaaacagtacttcaaaatttcacagaattgaagtgtatgcatttctgtattcaagaaaaatatattcaatggaaaaaaattgactcatactgaatcataacaccaagaaatgtcaaaacactatagtaaatgaaacaatctccacagcttattggggaaaaaaccaaaccaaaactaaaaggctacatacaaaaaaaaatcagtagtagttcagaggtttatggatatctcttttgtgacaccaaaagctaaaaggtaatggagcaagacattaacttttttttttttaaagaagttcttttatttcaaaatttttaaacattgagtttt

SEQ ID NO: 75373 - DNA, 674 bp, Homo sapiens
tatttttttccattgcccatattaattgccataaatcagttctaaggcagacttgcatcccaaaggacttgcaaaactggcttaagggatgtcaaggtttagtgtcaacaggatagcagctgtaattttagtagaaagggtcttatgctcttttttttttttagacttgcctttgtgatataacactcagttccaaatctcactctatcctatgaaagagttcaaatgagaattcaaatagaagagagatttggataacaactataggaagttaagtagaaaggaaaaaaaaaaaatccaagcttgatgttatgtgtataacggtgtgctgatggcctgtgagaaaagcagtagttaaaattctgtgtgatgaaaacactgcttgtatgctttagttgagtagttgctatagtttcatgaatacctgtatctataggttgatctcttaatctattgatataactataaatataggtagatatctctctgatgtttagaaatacaagrttagtgcattatgccaattttgaagataggacaatgaaacaaggagcatgttacagacttcatatggaaaaaaaagaagaggagggatagacagaaagagagactatagccagttgaaacatgttggatgttggaacagaccctgacagaggagaggaagagtggat

SEQ ID NO: 75374 - DNA, 2188 bp, Homo sapiens
cacatgcagtgatactcccccacatgactgctgatttaaagggaactaaggtattttctgtgagtgtccatcacacttccagttctcaagaagccataaaaatggggtcctttgagctctgaagtaactggaaattcttcacattatgttattgtttcagcagctcaagcaaagacttttatcctttgtctgttccttatttctcaaagaacagaaatagaactgccaaaatgccacaagggaagctattctcattgtcaggtcaaatggtagtcccattaataatgctagtggaagtaaaaaatatcatacagttataccaatgattgttcttgttagaatttcactctcttgatttgaaataaccattttcccctattacaagcgagttttaatttactgttgctttcttattattaaggaaacttggaaactgtgtgctttcttcctattgttatctttagataattgatctcaatgacaggtaaatgtgtcctataactagaaatgtgttttgagcaatttgtaggctcagtttatggtctagttcatgttatcttatctggtttattctttgagttctgatttaataagattcctataccctcgtaatacaaaaaacacatggtaaaataagacaaacctcttggtcatctctcttatgtcctagggagggtgtcagcaagcattttttacagagagtcagatacttaatatgttaggctttgtgggctatacagtctctattgcagctacacaattttgccattgtaatgttaaagcagctatagataatacatgcatgaatgaatgtgattatactccaatacaattttattaacaaaaacaagatgtacgctggattgccctagaggaattactttgtcagttggccagagaacacagtgatcatagactgaaaaaaamtatcagtacctcacaagagttctgtaactaacatcgaattcatcttaattttggttgtaaagtatatctgtttgggtataggctaagttcgtgaaacagagaccacagaatagaattacttcagatatagaaatgatatttttctcaagtgcatggggttgaattgtgtgcccccagtaaatatatacggaagtctaaacctgcataccagtgaatgtgatctgacttggaaataacgtcattgcagttgtaattagttaagatgtggtcatactggagtagggtgggccctcaatcccgtatggctgttgtccttataaaaagagaaaagaccatgtgaagacacaggcacacacagaaaattccacgtgagtatgtgagaggaaggtatgttttggagtaatacatctacaagacgagaaatgcctaggagttcctagaagctataaaaggcaaacaacgatacttcctcagaaattttggagggagcgtggccctctcggcaccttgattttggacttctaacctacagaaatgtgagataatacgtttctgtcttttaaaaccacctaatttgtgtggtactttgttactgtggaattagaaaacaaatacacccagtaatggtttagtagtgaggctggcagaagaccagtcaggaacctaggtctcttgtggtctgcctctcagtcatcttggaccataggcccttgtggttacactccaaggtttatgaataactcatttgataatattttatttttaaaaatatgactacaaagaaaaacaacttatattaaaacatagttaaccaaaatattagaagaacgaattcatatgatacccttatatatgctttattattaatacattaaatatcaagattaagtggttggtctaataactactaaatatctcaataaggataagcatgaacaatattttgatgcatcctcaactataatgtgatatgaaaatgtctgttatttctatatataaaaaaggcccaggtacagctaagattacaatggattttacctacattcataattgaaagaaatgctaattttcaattaggggctagtaaaaattaagatgtaattattcccaccatgtttgtgaccccttggattccatgcataggtcccttagttcctgaacctcaggttaagaaccacttccagggtgtttgtatctacaggagggaacaatgcatttctttccttttacctctcttcttaattttgagtgtaattgacaa

SEQ ID NO: 75375 - DNA, 2188 bp, Homo sapiens
cacatgcagtgatactcccccacatgactgctgatttaaagggaactaaggtattttctgtgagtgtccatcacacttccagttctcaagaagccataaaaatggggtcctttgagctctgaagtaactggaaattcttcacattatgttattgtttcagcagctcaagcaaagacttttatcctttgtctgttccttatttctcaaagaacagaaatagaactgccaaaatgccacaagggaagctattctcattgtcaggtcaaatggtagtcccattaataatgctagtggaagtaaaaaatatcatacagttataccaatgattgttcttgttagaatttcactctcttgatttgaaataaccattttcccctattacaagcgagttttaatttactgttgctttcttattattaaggaaacttggaaactgtgtgctttcttcctattgttatctttagataattgatctcaatgacaggtaaatgtgtcctataactagaaatgtgttttgagcaatttgtaggctcagtttatggtctagttcatgttatcttatctggtttattctttgagttctgatttaataagattcctataccctcgtaatacaaaaaacacatggtaaaataagacaaacctcttggtcatctctcttatgtcctagggagggtgtcagcaagcattttttacagagagtcagatacttaatatgttaggctttgtgggctatacagtctctattgcagctacacaattttgccattgtaatgttaaagcagctatagataatacatgcatgaatgaatgtgattatactccaatacaattttattaacaaaaacaagatgtacgctggattgccctagaggaattactttgtcagttggccagagaacacagtgatcatagactgaaaaaaactatcagtacctcacaagagttctgtaactaacatcgaattcatcttaattttggttgtaaagtatatctgtttgggtataggctaagttcgtgaaacagagaccacagaatagaattacttcagatatagaaatgatatttttctcaagtgcatggggttgarttgtgtgcccccagtaaatatatacggaagtctaaacctgcataccagtgaatgtgatctgacttggaaataacgtcattgcagttgtaattagttaagatgtggtcatactggagtagggtgggccctcaatcccgtatggctgttgtccttataaaaagagaaaagaccatgtgaagacacaggcacacacagaaaattccacgtgagtatgtgagaggaaggtatgttttggagtaatacatctacaagacgagaaatgcctaggagttcctagaagctataaaaggcaaacaacgatacttcctcagaaattttggagggagcgtggccctctcggcaccttgattttggacttctaacctacagaaatgtgagataatacgtttctgtcttttaaaaccacctaatttgtgtggtactttgttactgtggaattagaaaacaaatacacccagtaatggtttagtagtgaggctggcagaagaccagtcaggaacctaggtctcttgtggtctgcctctcagtcatcttggaccataggcccttgtggttacactccaaggtttatgaataactcatttgataatattttatttttaaaaatatgactacaaagaaaaacaacttatattaaaacatagttaaccaaaatattagaagaacgaattcatatgatacccttatatatgctttattattaatacattaaatatcaagattaagtggttggtctaataactactaaatatctcaataaggataagcatgaacaatattttgatgcatcctcaactataatgtgatatgaaaatgtctgttatttctatatataaaaaaggcccaggtacagctaagattacaatggattttacctacattcataattgaaagaaatgctaattttcaattaggggctagtaaaaattaagatgtaattattcccaccatgtttgtgaccccttggattccatgcataggtcccttagttcctgaacctcaggttaagaaccacttccagggtgtttgtatctacaggagggaacaatgcatttctttccttttacctctcttcttaattttgagtgtaattgacaa

SEQ ID NO: 75376 - DNA, 2188 bp, Homo sapiens
cacatgcagtgatactcccccacatgactgctgatttaaagggaactaaggtattttctgtgagtgtccatcacacttccagttctcaagaagccataaaaatggggtcctttgagctctgaagtaactggaaattcttcacattatgttattgtttcagcagctcaagcaaagacttttatcctttgtctgttccttatttctcaaagaacagaaatagaactgccaaaatgccacaagggaagctattctcattgtcaggtcaaatggtagtcccattaataatgctagtggaagtaaaaaatatcatacagttataccaatgattgttcttgttagaatttcactctcttgatttgaaataaccattttcccctattacaagcgagttttaatttactgttgctttcttattattaaggaaacttggaaactgtgtgctttcttcctattgttatctttagataattgatctcaatgacaggtaaatgtgtcctataactagaaatgtgttttgagcaatttgtaggctcagtttatggtctagttcatgttatcttatctggtttattctttgagttctgatttaataagattcctataccctcgtaatacaaaaaacacatggtaaaataagacaaacctcttggtcatctctcttatgtcctagggagggtgtcagcaagcattttttacagagagtcagatacttaatatgttaggctttgtgggctatacagtctctattgcagctacacaattttgccattgtaatgttaaagcagctatagataatacatgcatgaatgaatgtgattatactccaatacaattttattaacaaaaacaagatgtacgctggattgccctagaggaattactttgtcagttggccagagaacacagtgatcatagactgaaaaaaactatcagtacctcacaagagttctgtaactaacatcgaattcatcttaattttggttgtaaagtatatctgtttgggtataggctaagttcgtgaaacagagaccacagaatagaattacttcagatatagaaatgatatttttctcaagtgcatggggttgaattgtgtgcccccagtaaatatatacggaagtctaaacctgcataccagtgaatgtgatctgacttggaaataacgtcattgcagttgtaattagttaagatgtggtcatactggagtagggtgggccctcaatcccgtatggctgttgtccttataaaaagagaaaagaccatgtgaagacacaggcayacacagaaaattccacgtgagtatgtgagaggaaggtatgttttggagtaatacatctacaagacgagaaatgcctaggagttcctagaagctataaaaggcaaacaacgatacttcctcagaaattttggagggagcgtggccctctcggcaccttgattttggacttctaacctacagaaatgtgagataatacgtttctgtcttttaaaaccacctaatttgtgtggtactttgttactgtggaattagaaaacaaatacacccagtaatggtttagtagtgaggctggcagaagaccagtcaggaacctaggtctcttgtggtctgcctctcagtcatcttggaccataggcccttgtggttacactccaaggtttatgaataactcatttgataatattttatttttaaaaatatgactacaaagaaaaacaacttatattaaaacatagttaaccaaaatattagaagaacgaattcatatgatacccttatatatgctttattattaatacattaaatatcaagattaagtggttggtctaataactactaaatatctcaataaggataagcatgaacaatattttgatgcatcctcaactataatgtgatatgaaaatgtctgttatttctatatataaaaaaggcccaggtacagctaagattacaatggattttacctacattcataattgaaagaaatgctaattttcaattaggggctagtaaaaattaagatgtaattattcccaccatgtttgtgaccccttggattccatgcataggtcccttagttcctgaacctcaggttaagaaccacttccagggtgtttgtatctacaggagggaacaatgcatttctttccttttacctctcttcttaattttgagtgtaattgacaa

SEQ ID NO: 75377 - DNA, 1139 bp, Homo sapiens
tgcattattaaaatacaaattttgcatgaaatatatcacttaatttttccagctcacatgatgttactttgaatctgaatattgcaagcccaaaacgtaaaaagatgaaaaagtttctgtagatgcagaaaatatgggcatagcttaactagggtccaattcagccctatctacatctaagattcatgtatttccaccgtaccttaatagctcttcttccttccttccttccttccttccttccttccaacaatgatttatttggcataaaataaatgaaagtgatgtactttgtgctgtccatacacccaagtgtaagatttagttcttgtgctgagagacatgtttcacagatttcaaataaataattattatgcaaactcaggccttttcaaattgatccagttatttcccctttattttgttatagcctctcaattttgaatattgatttgctcacatatgtgaacaaattccatcccaataaagatggagagcagaaaacaaacttctaacccccaaactctcattttaaaacttgttttatatcgtttgttagtttgatgttgttgctattgttgttattttgctgctcagagaactcgtggttaaaatttacctatactgggggcttatagtgtgtcagatatgtcctaataaactaacatttaaggagagttaaaggactttatgataacaaagcattattacatttttaaaattgaaatataaaatatgtacacaaattataagtgtataacttgatcaatttatacaaaattaacaatcctatagaattttctttagtttaagatgcaaaacattagaagcatcctaaaaaccccaggaggaaggaggtaatcattaagatatagcatgagataggattctggttggtttaagttgttytatttcctgatttttctataaattacatgagttcacattttgataattcattgaggtttatattttaattaattgtaaataattatctttatgtgttacatttcacactaaacccatgtttaaaaagaacaaaccaatgtatagtgttacatattttcattatgtaaaactttttttgagaaaatgtgctttgatatgaatttttgttatttgtcaagaatcttgatttt

SEQ ID NO: 75378 - DNA, 917 bp, Homo sapiens
tctataactgcattgtctcaccatctgtctttatttgctaccctgtataatacctggaacatatatttatccacgaaaatgacacattagtaaatgggaacctagtgcctagagagatgacaggacctattctagggcttttatgtgtattttttattcacacacaarctcgattagtatttcatttttaaagatgtggagactactgagttacagagaagttaaataacttgcccaagcctacccagttagttagtgagaaggagattcaaccctaggcagcttggattgagagtctatgattttaaaccctttgctacataagcctttaagtcttaatatttcccgaggagaatctacgatacatgtctgtgttaaacaactctccttgcctataaatttttccttttatctaaccttaatcctctatgctttagattaagcctctcatgctttctttggtgcagagaatctatttaagagccctttatgtacttgagaggagtttttcagtcattcacttgactactggttcaataacccaagtacttttaacctttccctctagaattgatgtctgaattctataagcattttggagcactttggtggaaactcttcaagtcatgtttagctgtgaatcgaacagattcagtatcatagatttggattaggattaacctgtcaacaatttatcatgcacaatatcctgtgatatggaattatagaattttaagatctattttatgtataatcttgccatgtttgaagtttaaccaccaaaatttattatttagatgtatttcataatcaaatggttttggaaccataaaagaagttttaaaagttgcttaatggcatttttcttctattgcctaaaactggtttccttttttagagatggaacaatattttaa

SEQ ID NO: 75379 - DNA, 732 bp, Homo sapiens
tgtgcaagaaagaactcagggtgagttgacagggcaaagtgaaagcaagtttattaagaaagtaaagcggtcaaagtagggagttcctgaaagtaagaggaggaactggcccaccctaggtaaaatkcttgtttatttataggataacaataacaacagcaacaaaaaatcatggggagatgatttgctacaacggtttgtgacaaaggattaattttcttaattactatattttgcaataattgatattactatctttaaagcaaaattaggaatgcttctgttcttacgatattgggatatcaggacattcctgagtctgggtctgtttagtaaacgttatcaatctgttccctttaatggcaaacatccagagcctaggaatacctaacttttggggactgtggctcagcaagtctcagcctcacttttcctagccctcactcaagatggagtcgctgtggttcgaatgtctctggcagaatgatcattataggcgcacgctttgggtcacacagaactggggtagagtgtcctggctccatctcccacaagctggagcttcagacagtttctttaagctaagtctcagtgttttcttttttgttttgcttgtttgtttgttgttttcatttgcaaggtgggctaattaaatagcctatctactatacagatacaatgacacaatgaaggtgaggtgctaggtaaagtgcctggcacatggtaagcatt

SEQ ID NO: 75380 - DNA, 1233 bp, Homo sapiens
agtgcaatggtgccatctgagctcactgcaatctccgcctcccaggttcacgcgattctcctgcctcagcctcctgagtagctgggattacaagcaggtgccaccatgcctggtgaatttttgtatttttttagtagagacaggttttcaccatgttggccaggctggtcttgaactcctgacctcaagtgatgtgcccacctcagcctcccaaagtgctaggattacaggcgtgagccactgcacccgaccagaacaatcccaattctatctgtatcacacagtgtgtttctcatctaggatacagactcactgggcagcagccgtgtctgccctggaaagtgggggcatcagggaggaggaggaatgtgtgaacctaaacacatggaagaccttcaaawgcaccagaacacagtctttcagcacagaattctttacatccttaacttgcacttgtgctaatgaagactctacctcctgttcttttccttctgtgacaaaacaagttatctgtctgggaagacatggcacaatttatttatacaacatttttatggcttgcagatgactccgctggatcctccctcagaattgcccttcatagggaagttcagtggccactcaagtggttagcaaaatcaaggtgaaaagtttttctttttattcaaaatgggataaaaagaagcagctgccttttgtgacttttaagtgagaagctttcattatgtcttagccctacagtgtgttatcaataatcatatctgtgttaaattgtacttcactttgtatatcaccattgtaagttttaaccgtatacattataggctttttccatttttattttaaaaactgtttaaggtgtagctttttaaggattctgtttttgctcttattttttacctgtgtcttggtctttcttatcatggaggtgaaaacagtaatactgaagaccttaatgtgagtttaggagaaaagatgttaatcaccagtttcctgctactggttttaaatttcatagaggaagccacacttattttgtcatcagaaattcttatattttttgtttaaattctcatctccctcccctcttgcccagatctggttttttggctagaaacaacttacagtaacttcaaattaagcattttaattctaaggaatggtcttaagtgaaccaatgtatatagagttttatctttacttttaaaaggtctctaaagcatttttcttctt

SEQ ID NO: 75381 - DNA, 637 bp, Homo sapiens
cggatccccacctcccgccggcgacaagcggcgccgatgcaagcgtctccgctcgcacgtgcacgggaagcgggcagtaggtggtgccgttcgggctccagcgctagtcttccttcggtgccaggcccgcgccccgggatttggaggtatttaccttgcgtttctcagtccgagagtcagagtcagacatttgggggaacaagggccaagaaagggcgccgaggcggtggcggcgggaacgcagcgaaccgaataccgcgatgatgcgatcgcagtgtggcagggttcgcagggtggctgcaagaatcaagtggtggtagtggcggcggcggcggcggcggcggcggcggcggcrgcggcggcagcggcagcggcgctggacgcagagctccaacaaactgcagaccaggcggctgcgcggagcgaagtgaaacctgcgcggccctgcagcccagctctggctggcggccccgctcctacgcccaatcactgcggaccccgcccccgctaggtcccgccccggcgcgcgggctggcaagctccgcccccctcggcgccgcggccgccggcgcgtgcaggctcggacaggtaaaggcgggggttgccccgctgggttgcctcccgcgcgcgccgccgt

SEQ ID NO: 75382 - DNA, 1355 bp, Homo sapiens
attacaccagtaatttctaatgaaaaacttcattcttcacacactgtggttaagcatcatcaaatcagtactgaaaagacctttgatcgtatttgcaagatgcactaaaatgaactttcactgaccaagatttcaaagtttgtaattaatactcttgaaaaatccctgactaatctgtcaactctcaacgtctttaaccacacagttcaaaaccatgaggtggcgtacacagcccctaaamtttccacatattgtcatatgattattcaagataattttccctttgggtttgcattatgaaactcaaccaactttggtaatatattcaccggtgggggaaatacaatgatttgaatgagtgtaaaatagagtatgggttttatctatctggtgccaaaaacagaacgtagggccagaggtaggaattaaatgaggcagatttcaatataaagaaaattttaaaaaaataaacttgaaaaggaacccaatggctggtgaaaaggagggtttcttcactcataagtgttcagggagtgtgccctccaatggcaccctagagaagaaaaatgaactggctgtgaagaggagttgactgccaagattctttctaaatctaaagttctggagcagtttaaaatactccttctagccttctccatttttcctagactgcaacagaaacctcagaatgattattgtctcaatggacggatccggcatcattcctgttagttattgtttgactcttagttattgtttgactctgattccaggtacccacccacctctgttcctggctgtcaagatgataataataattaccatcctttcactcacaaatggtatgctggattcctacccagtgttaggtacaattctggactttagaggtttaatggtacacactacaggaacaggtctcacatcgtgaagctgttgaggcgttttaaaaatttttaaaaatatatgatctctttaatacaaaataaacttgagaagataatatagcattgattattacacagttacagtatttttattaccagggggtatttttatatggggctaagcagtgtattattaaagtttagttttgttaccaaacatgcttccatactataagcataaaaattgcacatagtgtaggggtcctctgccctgccagtttatgacccatttatgctggacaaagtacttcaagcttacccatatctttacaaagaaaattcaccagcttttgaaaaagacaaatgaataggtatactttaaaaataaaaaagtatgaacaagttataggttcttgcaaaaacattttttaaggtcaaacctaaacatgggcactattgctctacaag

SEQ ID NO: 75383 - DNA, 626 bp, Homo sapiens
agggttataatggttgccagcaatactctcgaagttaatgctgtctctgcacttggaggccgagccagaatttgaccttctgatgygttcattttgaccacttgacagcagaatggtgtgtagagcctatactgctcctaggtcagcccatctgggcgtgaggatcactgtgaagcccgcagttggcttcagcctcttatttcctaccaataaactctaattcaaggggacagaggcttctcagtcagttgctttcctattctaggaatgctgcctttccatcagcatgccccaagacctgggtgctcttcttcctgcctggggcgggtctggaggtggggccagggagcctcttgccagcaggggtgaggttacactgagcctgctccaatgtcctgcaacagcaccaagatattgacatataaggaagagcacttgggagctggctggtaggccttcaaggggcctttcctcttcacttgaacttgttgtggttttttttcctttttcctcatactctgaggggtgcagttgtagccagctttgcacagggctttctgcaaagtttcccacctgaagtcccttcttcaggcaggggtctgcattgcacagccagttagttttct

SEQ ID NO: 75384 - DNA, 626 bp, Homo sapiens
agggttataatggttgccagcaatactctcgaagttaatgctgtctctgcacttggaggccgagccagaatttgaccttctgatgcgttcattttgaccacttgacagcagaatggtgtgtagagcctatactgctcctaggtcagcccatctgggcgtgaggatcactgtgaagcccgcagttggcttcagcctcttatttcctaccaataaactctaattcaaggggacagaggcttctcagtcagttgctttcctattctaggaatgctgcctttccatcagcatgccccaagacctgggtgctcttcttcctgcctggggcgggtctggaggtggggccagggagcctcttgccagcaggggtgaggttacactgagcctgctccaatgtcctgcaacagcaccaagatattgacatataaggaagagcacttgggagctggctggtaggccttcaaggggcctttcctcttcacttgaacttgttgtggttttttttcctttttcctcatactctgaggggtgcagtygtagccagctttgcacagggctttctgcaaagtttcccacctgaagtcccttcttcaggcaggggtctgcattgcacagccagttagttttct

SEQ ID NO: 75385 - DNA, 998 bp, Homo sapiens
atatgtccctagctctttccaactcactgagattcttatctagaggtgaatggttattttcattttatcacatggtttcttaagtaagattattctatacatttttaatatcacacaaacggaaatacattgccatagattccttcacattatttattgcaaatattttgtaccaagtgatgtcttaagggtgctttgtataactttgcttacacatacacacaaaaattatctcacaattgtgtttgaattgtttcttgagtcttaccaagatcatgatagtgcaaatctgctggatgtgacaacagtggtgagaattttccaaagccaaatggctattctctaggccagacttttggttgatcaaagataattgagagccattttaacagctagctagtaatgataaatagatagatttttagattttgactctatttgcttaaaagaaaatgtaaaatctgtaacagaagacattcatttttggcataaggtctcttgactcataagactataggctctgagaaggttacttcatttatatttgactccattccatgatatactcttgtaatcttttaaggttgtttatttttaggccttggaatacaagggccacatgycttcaatttgggcttactacctagcttcaggatgcctgacctacaatgttctaccatgttatttactattttgtcctttgcatttttgtagatattcccccactgtagacctgaggcattataattgcagcaatattgtctggttgactcaagagcaatagttttcaaaatttgtatatttaaattctgctacttgctaagaataacttttaaaatgtttgcttacttatttatatcttgtctagagaagcttcctttattttgatatggtagagaatctgatttgtaattaactcagggcgtattaagctcgtactaaaatattcaaacactacattaagaaatatatcctggctgggcacagtggctcatgca

SEQ ID NO: 75386 - DNA, 2697 bp, Homo sapiens
tttcagcctacaccttgtcaattcagcccatggattcttttttcaaataattgatttggcatgttcattatgatggctcagcatgtgactsatgtcactgaatgttccgttttttcattggaagtttggcacgtattcctggatactgtaattattctaccttttttgtttctcttcattatacatgaagtgctggagagaggccatccttactgattgaacactgatattcccttttcaaccctctcacagagggtgttagcttgtgcgtcgggcatgagttgagaacatgtgaattagccctgatttttgaattgactgtcatttatatgtccatagttgtcacactcacactaatcttaatttctgtaccttgaaaatgggaatgacaatcttatccctttcaaaaagagaaaaaaaaaggcatgttggggattaactgaacagggctcaaaagcaccaggaaaatgtaagagaagtctgtccacataagccaagcgctgatgctttcttagcggtcaatggatgtgcttattgcagtttctaaatcagaaaacagacctcaaactagatctatgattgatcgggtgatcaattgtgagttcaactctctgtgaagccccagagtagatacacaaaatgtacaaggcatgttttatcttttaaccagagttaaatacctcatgaaattgctgtatttggagccatagcctaccctcttacagtagtgccagaggaggggtggccttgtagatggctttgcccagtgtagttaagtcctcacaaatactggccacatttcaagtactcagtaaccacatatgctaacctactaggttggacagcacagatttagaacctgcatcagcatggaacattccactgcacagcgctgcttgaaactgacaaatcttccttcttaccactgctctaactggtctgaagtcagtctttacagtagcattgggtaggtccatctcacactaatgaagaactctcacaagtaacagcgcatatataatgctgtattttcatactttcctttacctaaaccctgcatatgaggctaagtgtactcaagtgcatgttaaaatgagatttatcaaccagtaatcaatatctaatttttaaaaagaattataccatgagacaggggctaacaatatgctattttttctttatatatgaattctagttgattcaccatttgaatgaccaagacattacctcccactccagccttgcaccctccatccccccaagaattaaagattgattttattataggtccattcctctttgtttatgataccacatctatttgatttaaaaaatgcaacactggcagagatttaagtgtttcacatgttatatatgcaaacagtgtaagcatcaaatatattaatagatccaaggtaaatgacttaaaagtgcactgtttatcataacttacttgttaatctcacatataccttatatctaacagggagcaggcctcatgcatccataaacatactaccaaccaagctattgaacttgcaatagttaagcatagcattcataaaataatagaatttgcagagttgacacagaccatagaactgtcagagacatggatgtcaaatcatctctttaccaaagtcaggagaggtggagtgccccttaatcactagatgagtgatggagtgaggattagaactcagctccctggacctggacctagggctgctttggacactttgttctttgccgtcctctgacaaggagatgagagagaccagctgggagaagatgagaaagttgaaatctctctgatggcaggaaggtgagtcctggttccagaccagcacctgggccatcataccactacctggcagaagaagagatgccctttcttcttagcctgtatcagcatttcaagtgttccatctggcttcaaagttgccccttcccagggtaaccaagtgcttagtcgatggcatttctggaaccagagcacagtgccttgtcctggttattgtatttgtcccattactctctggttttatgggctccctttgaaaaaagtcccaagttcccttaccctacttctctcaaatgggatctgagcatttatcttgaggattcatagatgtgattttaggggactgtaaatgtcctggagaggaaagggaaatgcgcctttcagtccatagcattcattaaattatcaaaaatgtctatgatggaataaggctaagaacttctataagggagaaaagaaaggtgcattttttagaagagaaaaaaatcgttgaactcagaaaaactagtaaacaggcagtaggtataataaacaccaatttaatggaaacaggcaatgcaaatgaatgataatgcaatgctaaagaagcctaggaagaggctgcgtgtggtggcttatgcctgtaatcccagcactttggaaggctgaggtaggtggaccacctgaggttaggagttcgagaccaacctggccaacatggtgaaaccccttctctactaaaaatacaaaaattagctgggcatggtggtgagtgcctgtgcctgtaatccccgctactcaggaggctgaggcaggagaattgcttgaacccgggatacagaggttgcagggagccgagatcgtgccactgcactccagcctgggcgacagagtgagacaagcttggagatgca

SEQ ID NO: 75387 - DNA, 2697 bp, Homo sapiens
tttcagcctacaccttgtcaattcagcccatggattcttttttcaaataattgatttggcatgttcattatgatggctcagcatgtgactgatgtcactgaatgttccgttttttcattggaagtttggcacgtattcctggatactgtaattattctaccttttttgtttctcttcattatacatgaagtgctggasagaggccatccttactgattgaacactgatattcccttttcaaccctctcacagagggtgttagcttgtgcgtcgggcatgagttgagaacatgtgaattagccctgatttttgaattgactgtcatttatatgtccatagttgtcacactcacactaatcttaatttctgtaccttgaaaatgggaatgacaatcttatccctttcaaaaagagaaaaaaaaaggcatgttggggattaactgaacagggctcaaaagcaccaggaaaatgtaagagaagtctgtccacataagccaagcgctgatgctttcttagcggtcaatggatgtgcttattgcagtttctaaatcagaaaacagacctcaaactagatctatgattgatcgggtgatcaattgtgagttcaactctctgtgaagccccagagtagatacacaaaatgtacaaggcatgttttatcttttaaccagagttaaatacctcatgaaattgctgtatttggagccatagcctaccctcttacagtagtgccagaggaggggtggccttgtagatggctttgcccagtgtagttaagtcctcacaaatactggccacatttcaagtactcagtaaccacatatgctaacctactaggttggacagcacagatttagaacctgcatcagcatggaacattccactgcacagcgctgcttgaaactgacaaatcttccttcttaccactgctctaactggtctgaagtcagtctttacagtagcattgggtaggtccatctcacactaatgaagaactctcacaagtaacagcgcatatataatgctgtattttcatactttcctttacctaaaccctgcatatgaggctaagtgtactcaagtgcatgttaaaatgagatttatcaaccagtaatcaatatctaatttttaaaaagaattataccatgagacaggggctaacaatatgctattttttctttatatatgaattctagttgattcaccatttgaatgaccaagacattacctcccactccagccttgcaccctccatccccccaagaattaaagattgattttattataggtccattcctctttgtttatgataccacatctatttgatttaaaaaatgcaacactggcagagatttaagtgtttcacatgttatatatgcaaacagtgtaagcatcaaatatattaatagatccaaggtaaatgacttaaaagtgcactgtttatcataacttacttgttaatctcacatataccttatatctaacagggagcaggcctcatgcatccataaacatactaccaaccaagctattgaacttgcaatagttaagcatagcattcataaaataatagaatttgcagagttgacacagaccatagaactgtcagagacatggatgtcaaatcatctctttaccaaagtcaggagaggtggagtgccccttaatcactagatgagtgatggagtgaggattagaactcagctccctggacctggacctagggctgctttggacactttgttctttgccgtcctctgacaaggagatgagagagaccagctgggagaagatgagaaagttgaaatctctctgatggcaggaaggtgagtcctggttccagaccagcacctgggccatcataccactacctggcagaagaagagatgccctttcttcttagcctgtatcagcatttcaagtgttccatctggcttcaaagttgccccttcccagggtaaccaagtgcttagtcgatggcatttctggaaccagagcacagtgccttgtcctggttattgtatttgtcccattactctctggttttatgggctccctttgaaaaaagtcccaagttcccttaccctacttctctcaaatgggatctgagcatttatcttgaggattcatagatgtgattttaggggactgtaaatgtcctggagaggaaagggaaatgcgcctttcagtccatagcattcattaaattatcaaaaatgtctatgatggaataaggctaagaacttctataagggagaaaagaaaggtgcattttttagaagagaaaaaaatcgttgaactcagaaaaactagtaaacaggcagtaggtataataaacaccaatttaatggaaacaggcaatgcaaatgaatgataatgcaatgctaaagaagcctaggaagaggctgcgtgtggtggcttatgcctgtaatcccagcactttggaaggctgaggtaggtggaccacctgaggttaggagttcgagaccaacctggccaacatggtgaaaccccttctctactaaaaatacaaaaattagctgggcatggtggtgagtgcctgtgcctgtaatccccgctactcaggaggctgaggcaggagaattgcttgaacccgggatacagaggttgcagggagccgagatcgtgccactgcactccagcctgggcgacagagtgagacaagcttggagatgca

SEQ ID NO: 75388 - DNA, 2697 bp, Homo sapiens
tttcagcctacaccttgtcaattcagcccatggattcttttttcaaataattgatttggcatgttcattatgatggctcagcatgtgactgatgtcactgaatgttccgttttttcattggaagtttggcacgtattcctggatactgtaattattctaccttttttgtttctcttcattatacatgaagtgctggagagaggccatccttactgattgaacactgatattcccttttcaaccctctcacagagggtgttagcttgtgcgtcgggcatgagttgagaacatgtgaattagccctgatttttgaattgactgtcatttatatgtccatagttgtcacactcacactaatcttaatttctgtaccttgaaaatgggaatgacaatcttatccctttcaaaaagagaaaaaaaaaggcatgttggggattaactgaacagggctcaaaagcaccaggaaaatgtaagaraagtctgtccacataagccaagcgctgatgctttcttagcggtcaatggatgtgcttattgcagtttctaaatcagaaaacagacctcaaactagatctatgattgatcgggtgatcaattgtgagttcaactctctgtgaagccccagagtagatacacaaaatgtacaaggcatgttttatcttttaaccagagttaaatacctcatgaaattgctgtatttggagccatagcctaccctcttacagtagtgccagaggaggggtggccttgtagatggctttgcccagtgtagttaagtcctcacaaatactggccacatttcaagtactcagtaaccacatatgctaacctactaggttggacagcacagatttagaacctgcatcagcatggaacattccactgcacagcgctgcttgaaactgacaaatcttccttcttaccactgctctaactggtctgaagtcagtctttacagtagcattgggtaggtccatctcacactaatgaagaactctcacaagtaacagcgcatatataatgctgtattttcatactttcctttacctaaaccctgcatatgaggctaagtgtactcaagtgcatgttaaaatgagatttatcaaccagtaatcaatatctaatttttaaaaagaattataccatgagacaggggctaacaatatgctattttttctttatatatgaattctagttgattcaccatttgaatgaccaagacattacctcccactccagccttgcaccctccatccccccaagaattaaagattgattttattataggtccattcctctttgtttatgataccacatctatttgatttaaaaaatgcaacactggcagagatttaagtgtttcacatgttatatatgcaaacagtgtaagcatcaaatatattaatagatccaaggtaaatgacttaaaagtgcactgtttatcataacttacttgttaatctcacatataccttatatctaacagggagcaggcctcatgcatccataaacatactaccaaccaagctattgaacttgcaatagttaagcatagcattcataaaataatagaatttgcagagttgacacagaccatagaactgtcagagacatggatgtcaaatcatctctttaccaaagtcaggagaggtggagtgccccttaatcactagatgagtgatggagtgaggattagaactcagctccctggacctggacctagggctgctttggacactttgttctttgccgtcctctgacaaggagatgagagagaccagctgggagaagatgagaaagttgaaatctctctgatggcaggaaggtgagtcctggttccagaccagcacctgggccatcataccactacctggcagaagaagagatgccctttcttcttagcctgtatcagcatttcaagtgttccatctggcttcaaagttgccccttcccagggtaaccaagtgcttagtcgatggcatttctggaaccagagcacagtgccttgtcctggttattgtatttgtcccattactctctggttttatgggctccctttgaaaaaagtcccaagttcccttaccctacttctctcaaatgggatctgagcatttatcttgaggattcatagatgtgattttaggggactgtaaatgtcctggagaggaaagggaaatgcgcctttcagtccatagcattcattaaattatcaaaaatgtctatgatggaataaggctaagaacttctataagggagaaaagaaaggtgcattttttagaagagaaaaaaatcgttgaactcagaaaaactagtaaacaggcagtaggtataataaacaccaatttaatggaaacaggcaatgcaaatgaatgataatgcaatgctaaagaagcctaggaagaggctgcgtgtggtggcttatgcctgtaatcccagcactttggaaggctgaggtaggtggaccacctgaggttaggagttcgagaccaacctggccaacatggtgaaaccccttctctactaaaaatacaaaaattagctgggcatggtggtgagtgcctgtgcctgtaatccccgctactcaggaggctgaggcaggagaattgcttgaacccgggatacagaggttgcagggagccgagatcgtgccactgcactccagcctgggcgacagagtgagacaagcttggagatgca

SEQ ID NO: 75389 - DNA, 2697 bp, Homo sapiens
tttcagcctacaccttgtcaattcagcccatggattcttttttcaaataattgatttggcatgttcattatgatggctcagcatgtgactgatgtcactgaatgttccgttttttcattggaagtttggcacgtattcctggatactgtaattattctaccttttttgtttctcttcattatacatgaagtgctggagagaggccatccttactgattgaacactgatattcccttttcaaccctctcacagagggtgttagcttgtgcgtcgggcatgagttgagaacatgtgaattagccctgatttttgaattgactgtcatttatatgtccatagttgtcacactcacactaatcttaatttctgtaccttgaaaatgggaatgacaatcttatccctttcaaaaagagaaaaaaaaaggcatgttggggattaactgaacagggctcaaaagcaccaggaaaatgtaagagaagtctgtccacataagccaagcgctgatgctttcttagcggtcaatggatgtgcttattgcagtttctaaatcagaaaacagacctcaaactagatctatgattgatygggtgatcaattgtgagttcaactctctgtgaagccccagagtagatacacaaaatgtacaaggcatgttttatcttttaaccagagttaaatacctcatgaaattgctgtatttggagccatagcctaccctcttacagtagtgccagaggaggggtggccttgtagatggctttgcccagtgtagttaagtcctcacaaatactggccacatttcaagtactcagtaaccacatatgctaacctactaggttggacagcacagatttagaacctgcatcagcatggaacattccactgcacagcgctgcttgaaactgacaaatcttccttcttaccactgctctaactggtctgaagtcagtctttacagtagcattgggtaggtccatctcacactaatgaagaactctcacaagtaacagcgcatatataatgctgtattttcatactttcctttacctaaaccctgcatatgaggctaagtgtactcaagtgcatgttaaaatgagatttatcaaccagtaatcaatatctaatttttaaaaagaattataccatgagacaggggctaacaatatgctattttttctttatatatgaattctagttgattcaccatttgaatgaccaagacattacctcccactccagccttgcaccctccatccccccaagaattaaagattgattttattataggtccattcctctttgtttatgataccacatctatttgatttaaaaaatgcaacactggcagagatttaagtgtttcacatgttatatatgcaaacagtgtaagcatcaaatatattaatagatccaaggtaaatgacttaaaagtgcactgtttatcataacttacttgttaatctcacatataccttatatctaacagggagcaggcctcatgcatccataaacatactaccaaccaagctattgaacttgcaatagttaagcatagcattcataaaataatagaatttgcagagttgacacagaccatagaactgtcagagacatggatgtcaaatcatctctttaccaaagtcaggagaggtggagtgccccttaatcactagatgagtgatggagtgaggattagaactcagctccctggacctggacctagggctgctttggacactttgttctttgccgtcctctgacaaggagatgagagagaccagctgggagaagatgagaaagttgaaatctctctgatggcaggaaggtgagtcctggttccagaccagcacctgggccatcataccactacctggcagaagaagagatgccctttcttcttagcctgtatcagcatttcaagtgttccatctggcttcaaagttgccccttcccagggtaaccaagtgcttagtcgatggcatttctggaaccagagcacagtgccttgtcctggttattgtatttgtcccattactctctggttttatgggctccctttgaaaaaagtcccaagttcccttaccctacttctctcaaatgggatctgagcatttatcttgaggattcatagatgtgattttaggggactgtaaatgtcctggagaggaaagggaaatgcgcctttcagtccatagcattcattaaattatcaaaaatgtctatgatggaataaggctaagaacttctataagggagaaaagaaaggtgcattttttagaagagaaaaaaatcgttgaactcagaaaaactagtaaacaggcagtaggtataataaacaccaatttaatggaaacaggcaatgcaaatgaatgataatgcaatgctaaagaagcctaggaagaggctgcgtgtggtggcttatgcctgtaatcccagcactttggaaggctgaggtaggtggaccacctgaggttaggagttcgagaccaacctggccaacatggtgaaaccccttctctactaaaaatacaaaaattagctgggcatggtggtgagtgcctgtgcctgtaatccccgctactcaggaggctgaggcaggagaattgcttgaacccgggatacagaggttgcagggagccgagatcgtgccactgcactccagcctgggcgacagagtgagacaagcttggagatgca

SEQ ID NO: 75390 - DNA, 2697 bp, Homo sapiens
tttcagcctacaccttgtcaattcagcccatggattcttttttcaaataattgatttggcatgttcattatgatggctcagcatgtgactgatgtcactgaatgttccgttttttcattggaagtttggcacgtattcctggatactgtaattattctaccttttttgtttctcttcattatacatgaagtgctggagagaggccatccttactgattgaacactgatattcccttttcaaccctctcacagagggtgttagcttgtgcgtcgggcatgagttgagaacatgtgaattagccctgatttttgaattgactgtcatttatatgtccatagttgtcacactcacactaatcttaatttctgtaccttgaaaatgggaatgacaatcttatccctttcaaaaagagaaaaaaaaaggcatgttggggattaactgaacagggctcaaaagcaccaggaaaatgtaagagaagtctgtccacataagccaagcgctgatgctttcttagcggtcaatggatgtgcttattgcagtttctaaatcagaaaacagacctcaaactagatctatgattgatcgggtgatcaattgtgagttcaactctctgtgaagccccagagtagatacacaaaatgtacaaggcatgttttatcttttaaccagagttaaatacctcatgaaattgctgtatttggagccatagcctaccctcttacagtagtgccagaggaggggtggccttgtagatggctktgcccagtgtagttaagtcctcacaaatactggccacatttcaagtactcagtaaccacatatgctaacctactaggttggacagcacagatttagaacctgcatcagcatggaacattccactgcacagcgctgcttgaaactgacaaatcttccttcttaccactgctctaactggtctgaagtcagtctttacagtagcattgggtaggtccatctcacactaatgaagaactctcacaagtaacagcgcatatataatgctgtattttcatactttcctttacctaaaccctgcatatgaggctaagtgtactcaagtgcatgttaaaatgagatttatcaaccagtaatcaatatctaatttttaaaaagaattataccatgagacaggggctaacaatatgctattttttctttatatatgaattctagttgattcaccatttgaatgaccaagacattacctcccactccagccttgcaccctccatccccccaagaattaaagattgattttattataggtccattcctctttgtttatgataccacatctatttgatttaaaaaatgcaacactggcagagatttaagtgtttcacatgttatatatgcaaacagtgtaagcatcaaatatattaatagatccaaggtaaatgacttaaaagtgcactgtttatcataacttacttgttaatctcacatataccttatatctaacagggagcaggcctcatgcatccataaacatactaccaaccaagctattgaacttgcaatagttaagcatagcattcataaaataatagaatttgcagagttgacacagaccatagaactgtcagagacatggatgtcaaatcatctctttaccaaagtcaggagaggtggagtgccccttaatcactagatgagtgatggagtgaggattagaactcagctccctggacctggacctagggctgctttggacactttgttctttgccgtcctctgacaaggagatgagagagaccagctgggagaagatgagaaagttgaaatctctctgatggcaggaaggtgagtcctggttccagaccagcacctgggccatcataccactacctggcagaagaagagatgccctttcttcttagcctgtatcagcatttcaagtgttccatctggcttcaaagttgccccttcccagggtaaccaagtgcttagtcgatggcatttctggaaccagagcacagtgccttgtcctggttattgtatttgtcccattactctctggttttatgggctccctttgaaaaaagtcccaagttcccttaccctacttctctcaaatgggatctgagcatttatcttgaggattcatagatgtgattttaggggactgtaaatgtcctggagaggaaagggaaatgcgcctttcagtccatagcattcattaaattatcaaaaatgtctatgatggaataaggctaagaacttctataagggagaaaagaaaggtgcattttttagaagagaaaaaaatcgttgaactcagaaaaactagtaaacaggcagtaggtataataaacaccaatttaatggaaacaggcaatgcaaatgaatgataatgcaatgctaaagaagcctaggaagaggctgcgtgtggtggcttatgcctgtaatcccagcactttggaaggctgaggtaggtggaccacctgaggttaggagttcgagaccaacctggccaacatggtgaaaccccttctctactaaaaatacaaaaattagctgggcatggtggtgagtgcctgtgcctgtaatccccgctactcaggaggctgaggcaggagaattgcttgaacccgggatacagaggttgcagggagccgagatcgtgccactgcactccagcctgggcgacagagtgagacaagcttggagatgca

SEQ ID NO: 75391 - DNA, 1224 bp, Homo sapiens
ggcaaagttaaatgattgtctgtaaaaaaaacactgggaaaaaagtacttgctctcttggcacaggtgaaaaatcactatctcagcccttgaaatcaattttgttgacccgctttaacaacaatgactttttttgtgagcaagataagaaagtcacatttcctgagcaatcttgacacttgcgttgttctcaggctagcacttaaagttgggacttttagttcttgtgaccagaaaagctgagatcatgagttcaatcaagaaactctatggtcatcattcttccagtggctggtaccctgagagaaaatgtccagtgcaggaaagatgaggatgttcatttcctttagctcaactgataatctgctaagacaaagggaaagcaatgtgaagtaattcaactaggtgtttgggtctgagtttaacagagtgtggcctggggagccagcctgtgactggcatccatatggtgaagttcataaatctgggttagtcactgagtagtcttagtccattcaggctgccataatatggggagcttataaacaacgtctattcatttctcacagtaatggaggctgggaagtctaagatcaaggcagatttggtgtctagggagggcctgcttcttggttcctagatggcagtcttcttgctcagtccttgctcaaacgtggtggaaggggtgagggagctctctgggatcccttttataagagcactaaccccaatcatgagggccctgccttcttgctccaaccacctttacaaaggccccacctcctactactgtcaccttgggcttaggatttcaacccgtgaattttggggagatgcaagcattcaacctatagcactgaggtggctaattaagcatatacaccgaagtgtggccctttcataccgtttgctcttagaatggcataatagatgaatatctcaagtattagartccttaacacagacataattcctttctttgccacttcaccccctcccacactgctttgttctaactctcactaaaagattttaatttccaagttgtttctctacagacttggatggtgccccctggcatgcaccccctcaaggcctctgaactgcctccctgtcagtgtggactccagttcgagggctgtgaaattgagtcaagttgttctgtctcggtgcccaaactgcaaatgagaaatcttataattcaaattgaagttctcctgtgtca

SEQ ID NO: 75392 - DNA, 653 bp, Homo sapiens
tacacactgccactgtagctggatgcagcagattagagatggtggcaagttctttcacaggcttcttatggagaggtggtggctatttgccctccccgtgaatctgggctggcctgtgagtgtttcaccaatagagtatagtgcaagtgaatctatgttagatgtaagcctagcctttaagaggactggtagccactgccttggcttctttgagcactgtgcctgactagtaccctgtttgagaaagtttgtggagaggctctgakcctacatgaagaggaagaggactgaggcatgtggagtgaagcccgtagaccctccagcccagcccagtcaccacttgaataccagcgaccccagtcaactccacatgatgcaaagaaatcagccaattcttgacccatataaaatgatccttattttaacttatcatgttttggaataccctatcatgcaacatagattcctggagccctagttaaggacaaatattatagggtcctccaggctgtgttcagagctcccatccccttttaagagcagttccgcttctcatcctcctctctagactctttccactgggtgcagatctgtggggaccttgagaccaaccagcctcattagatgagtttcaagttttccccaactagatt

SEQ ID NO: 75393 - DNA, 689 bp, Homo sapiens
ctggccgaattctttgttgtggaaaaggtagactaggttaacggagaacccatccctggactattctggaaagcaaaggtggaggttggtgctataatatctactagtccactgtgctccaactatctagtttttcagcttcccaaagggctgaaaattctgtatggcagtttataaacacaatctctcagtgttttttatattgtttccattcagaagtgggtgtatatatcctccctgtgaatctgggctatgagtgtttgaataatagaatgtggtgatgtgatgctgtgccagtttggagcccaggacttaatacataggcagcttccacttcctatttcttggacacttgttggaacccagctactgaagtatgaaacagcctaagctgcttgtgaagacatcctcatgaagtggcccatrgggagaggaactaaggctatggctgtcagccctagctgagccctgagctgacaggcagcacccactggccttccatgagaatgagcaccttagacctggagcccccctcacctactagagccaccccagttgatactacatagagtagtgatgagtctttgctgagctctgcccacattgtagattcaggggccaaacaaatgatcgtggtagttttaagcactaagttgtgggatggtggctggataaatgaacccttccct

SEQ ID NO: 75394 - DNA, 831 bp, Homo sapiens
gttttgcttatagtgctcttctattcatttaacataaacatttgtgtattttaattctgtctgttctaaaattctaatttcttctataaattaatcaaatatgaaatctaagccagcaaagtatgttagaggaacagtgagtcaagttttataaaaattaggcaggtatggaacagagctttaaaactgtatgatatttggagggaatggagtaagaaacagaaaccagttttctgaagggtatttattgttattattattaaataaacacattattgcgtgttctgtgagcagttctttcttgataggaatactgacaatacctgttatattattatgaaattaaacttatctcttttcaaaaataaattcacacaccgtgaccccaaagtgtgaaggatcacaagatgtgtgacaaaraatgcattcagcaaggactggtaaagtgctggaaaccccaagggacgtgagttatatttcatggaactgagtctaggatttggaaattattttgcaattatttattgttggtctcgagagtgtacgtttcatgtatttcttcctttttacccagaatgtaattttgcttggtggtgaccatgtgagaaaaatagcactgtgggaagcgttcttgtgcagttttcactgtaatccgatcaatacaataaacagtttgaaagctattcatcatacaaaaataaacaactattaggtagctgttggtccaatgctcataaacatgaacaatttacacaagaaagaaagtatactaacaggaaaaaaaagccatagacaaataacaaattatctcctaagaaaatgttttatttc

SEQ ID NO: 75395 - DNA, 625 bp, Homo sapiens
gatctacattggcttatctatcagaaatacagtttataaatataaaagaaaaaatatgctgtcagaaagcaattaatagagattaatctgaatttagaaagtaacagtatcagatgacaaggaaccttaaggcctgacttagtcattccttaatattttactctggtgattatgagcactgaatcagtaacttwtgaaatatattaatctgctaattttgtcatttccttgatgaatgtgagagaatttcaaagggagattatgaaggcactcacatatactttgtcaatgtaccagaaggttttcaataaatgcagtgtgtagccaggtgcagtggcttatgcctgtaatcccagcactttgggaggccaaggcaggaggatcgcttgagctcaggagtttgagaccagcctgggcaacatagtgagaccttgtctcttctaaaaattaaaaaaaaaattgtttaagatagccaggcattgtgatatgaacctgtagtcctagctactcacaggctgtggtggaaggattatttgtgcctgaaggtcaaggctgcagtaagctgtgatggtgccactgcagtctagcctgggtaaaagaccaaggccctgcctcaaaagaaaat

SEQ ID NO: 75396 - DNA, 279 bp, Homo sapiens
agcctgaaacatcatttctaataagtaatatttccttcatagtaagtttcccagagtaatggaatatacatatatatatgtatattccatctatatataggtacagatatatgatatatgtatatgtaaatakagatgtgagtgtttattgtatgtgtgtatttgtgtatgtgatacccaacggtgctcatataaggaaaggaatattgcaaaaaaacagacattagtgaatagatcatcttttggtacagaagtcaaatatttgaagtctgttccagt

SEQ ID NO: 75397 - DNA, 561 bp, Homo sapiens
tcagctgcatcccagttgcatgtaaaagccaaactccaaacaacagtctgttgggcctcccaaaagcccttgcctcctgctctaagttaatttcccactaactgtgtcttcatcttattgactacactccagccattatggccttcttttgtatctttattcttgaattctggaattctttttgttacttttgtctgaaatttctgttctcagctctctacttggcactgtctttctcctgtctccactttaatgttacttcctcaaagaggctttccccggttctcaatatgaagtcatctcagtcacagatattctctaatttttcatttgttttcttcataattttaaacattacttgaaattatcttgtccatttttgtttcacttacaatttcccctctataatagagtacaatatctgagagtataggccttgtctgttttatttaccattgaagccgtggcctaaaatagtgccagacatacagtacacaataaatatttgctgagtwaacaacagataaaaagaataaatgtttttatttatataatgtgtca

SEQ ID NO: 75398 - DNA, 1486 bp, Homo sapiens
cttttctgtaattttacccttaccatttctaatatcatgacatccaaagttataaaaagaattttggcataycttggcattggctataacacttccttttcctcctctggcttaatcacaaagccgatttgttcattttctctctaatgcttcactagtcatatctttccaatttccactacagtgtgagtgttgaatgtgtgtgtgtgtgggggggtgctgattgtgtcctgatcactgtattaacaaagaaacagattggaagtaggcaaaatttgtctttttatatgtcactttgaataccactttcaccccctaaggtatcctttcttggccctggcataaaatcttattaataattaatattcaaagcattccttctaccaagtagaatttatatgctaaaggaggttagaataacaattctccataatgatatgatttcagcatccatagcacatgagagagaaaatacctgggggaagggaaagtcttcaacgtattccattctccatcatgttgcagacagacatctatttctccccaatatattacaaacttgaatacagagtcctctaactcataatgagaacattaatgtttatcactttactttcttagagtaatagcattattttcgtcaaaaactttattcttacaaagcatttttatataccttatcttatttaagccctgtttgttgatgttgtttctgttattactcccatttcagagatggagtaactgtggttcagtgaggaattaagtggcttgcctcaggtgatataaatagtaggtggcagatcctaggcttgtattcatacatgttgtctttcagttgactgccattctttctctacctctatgctaccctgttccttgctcccttaaaagtttctcacctatgatttcagggcccatccacagagatagtaagtatgtgtagggccacagatatgcactcttcatatcaggtatcttagatacaagtagtataaacatcataacttaagaaacagagatatagaagctatcttggatgaataagtgatcagggcagggcagaaggtggttagcactccaattaattaaggtcaagccaaggtaaaagcaggtcttagatgaaacagatctttagttcttccacctctagcccatcttgctgctgcactccagcccccaggtcatcacagcgatagccacccctgctttgtaacacccaacacaggttggccttgcaatgctctaagctgcctgcataacttaaattcttatttccccagattagaaggaggactaccaattaaacttcattttatgttgtatcaaccaaatggcttgtattagaagagaagtggaaaggtttttaccccatgaaataattttcatattatggagtttttaaatagaaaagattgtgaaatgaaaatcaggagggcaacaggacctttagtcactacaaaattatttcacaaagatagccaca

SEQ ID NO: 75399 - DNA, 1486 bp, Homo sapiens
cttttctgtaattttacccttaccatttctaatatcatgacatccaaagttataaaaagaattttggcataccttggcattggctataacacttccttttcctcctctggcttaatcacaaagccgatttgttcattttctctctaatgcttcactagtcatatctttccaatttccactacagtgtgagtgttgaatgtgtgtgtgtgtgggggggtgctgattgtgtcctgatcactgtattaacaaagaaacagattggaagtaggcaaaatttgtctttttatatgtcactttgaataccactttcaccccctaaggtatcctttcttggccctggcataaaatcttattaataattwatattcaaagcattccttctaccaagtagaatttatatgctaaaggaggttagaataacaattctccataatgatatgatttcagcatccatagcacatgagagagaaaatacctgggggaagggaaagtcttcaacgtattccattctccatcatgttgcagacagacatctatttctccccaatatattacaaacttgaatacagagtcctctaactcataatgagaacattaatgtttatcactttactttcttagagtaatagcattattttcgtcaaaaactttattcttacaaagcatttttatataccttatcttatttaagccctgtttgttgatgttgtttctgttattactcccatttcagagatggagtaactgtggttcagtgaggaattaagtggcttgcctcaggtgatataaatagtaggtggcagatcctaggcttgtattcatacatgttgtctttcagttgactgccattctttctctacctctatgctaccctgttccttgctcccttaaaagtttctcacctatgatttcagggcccatccacagagatagtaagtatgtgtagggccacagatatgcactcttcatatcaggtatcttagatacaagtagtataaacatcataacttaagaaacagagatatagaagctatcttggatgaataagtgatcagggcagggcagaaggtggttagcactccaattaattaaggtcaagccaaggtaaaagcaggtcttagatgaaacagatctttagttcttccacctctagcccatcttgctgctgcactccagcccccaggtcatcacagcgatagccacccctgctttgtaacacccaacacaggttggccttgcaatgctctaagctgcctgcataacttaaattcttatttccccagattagaaggaggactaccaattaaacttcattttatgttgtatcaaccaaatggcttgtattagaagagaagtggaaaggtttttaccccatgaaataattttcatattatggagtttttaaatagaaaagattgtgaaatgaaaatcaggagggcaacaggacctttagtcactacaaaattatttcacaaagatagccaca

SEQ ID NO: 75400 - DNA, 1013 bp, Homo sapiens
gcatgatattactgatttaagtatatgaagaactgcaagactcttgactgattttgcctcatatttcattaaaaatgccatgccaatttattctcccactaagtttatgacagcatgtgagggcttatttgtttctactaatagtggaaataaaaattaagaaaaaaattaattttgccagaattgtcatgaaatggcctattatcaggtatgctttcatttctctgattattaacttggttagtcattttccatatatataatctctattatatctagatagatctatatctagaaaattatctatctgaatagataaagataaaattccacaagtctgtatacctactgcatctggaagagaagtccaggtaagagctgctgagcacagaaaatggcatctatctcatcatctaggaggattcctggccatagaagaagaaaattaagccagagctgcagtggaactccatcaagaaagtctggaagtcaatggcccttgacctggtgaaagaggacataaagtcagtagtgtttgcattactcaaaattttgtttttcaaaaggagctagtcaacaaatgccccatggacctccaccagcctctccatttcagatatcaaaaaggacagcagtgtgctccaccaggaktttttgcaggcaacactggtggccctgatgctctgaaacaacttcccgacatctacctcatgatgagtgcctgaaaaacaaaagcctgcagtgggaaccaggatccaaattttcatccaggagaaaactctgcaactcctgggccactggaagcctagccacacttggggagcactaatgttgttctgaggaatgtggacatttacatatcccctctggggtttaaataccatgatgtagaagggtgggaaaatgcctgcaagggaacagagaggcattggcaaaggtgccccttccctgagcccacggtggcacacttcatttgttgttaaagactaaaactacctttctcattgttaaaa

SEQ ID NO: 75401 - DNA, 705 bp, Homo sapiens
acaataattattaggtctgctagaccaacagaatattatgttgttctactttgacaataggaattttattacttcgtgcatatacaactacagtatraatgtgcttcttcattatagaacagtacttctttttaatcttattgaaaacatatcttaaagtccatctaatctgatcttgtttcttccattcgcatttgttcacaccagaaacttaagtctcactagtcttctacttcttcatttacttctctacttttaatttttttcaaattttttttctcttcattgccatctctttagtctaaaatagtgtaatctcttacaaagacttctgccaaatcctcctatcttgcctctctatacctattttttccattctactttcttaaccaaattagagtgtgtatgtatatatttgaaggataaatgaataaacaaatgtggtatatatatctgcaatgaactattactgaaataaacaggaataaaattctgttacctgctataatatggatgcatctcaaagacattatgctaagtagaataaaccagaagcaaaaggacaaatattgtatgatttcacttacataagaaacctagaatagttaaattcatagaaaaagaaagtagaataatagttaccaggaactggggaggagaagagaatgaggaattattgtgtaatggatacagagtttgagtttg

SEQ ID NO: 75402 - DNA, 705 bp, Homo sapiens
acaataattattaggtctgctagaccaacagaatattatgttgttctactttgacaataggaattttattacttcgtgcatatacaactacagtataaatgtgcttcttcattatagaacagtayttctttttaatcttattgaaaacatatcttaaagtccatctaatctgatcttgtttcttccattcgcatttgttcacaccagaaacttaagtctcactagtcttctacttcttcatttacttctctacttttaatttttttcaaattttttttctcttcattgccatctctttagtctaaaatagtgtaatctcttacaaagacttctgccaaatcctcctatcttgcctctctatacctattttttccattctactttcttaaccaaattagagtgtgtatgtatatatttgaaggataaatgaataaacaaatgtggtatatatatctgcaatgaactattactgaaataaacaggaataaaattctgttacctgctataatatggatgcatctcaaagacattatgctaagtagaataaaccagaagcaaaaggacaaatattgtatgatttcacttacataagaaacctagaatagttaaattcatagaaaaagaaagtagaataatagttaccaggaactggggaggagaagagaatgaggaattattgtgtaatggatacagagtttgagtttg

SEQ ID NO: 75403 - DNA, 726 bp, Homo sapiens
tttgttttagcaggtgatactactaaaagttctactttatgccatccctttacattaagatataaatctgtataaaatttatggttaaattctctatgattttcagagccattatttacatgctttttggatggcagcagtgtaactgtcacttctagctggacttctgttggctagatggcccctctccatggtaatttcattatgccttaaacctgcgttccaactcccactgctgcagttacatgcgaaatttaaagtgaacagattgtaaagttatgctacctactaccagctattcaagggtaattccctcattactttcyggatctagaccaaattgttcttttatatgattttaaaaggaaaaaatttcttaaaggaaacaaattccccatatctgtattcttatacatgggatttctgctgaactaataatagtaaagagcatctaggtctctaaaaggcaaatcttctcacaatcatgaagctctttgatttgtattaagtgacattctgtctatgtttcttcagtcaaagtcacttttgaaattatgacttgtttgttcatttaaggcaagtaaaattctccaaacaaagatattagttagtttagaacattttaaaccaaacttcattatccagaagacaaacctaaaccaggtaatcagagctcaattgcataagctcataccataaaacttaaagcgtgtgcactcagaacta

SEQ ID NO: 75404 - DNA, 613 bp, Homo sapiens
tatggagaattatttcagttctgaaatacatcattcccaattatatactcagggagagtggcaatcaccatagattgcaatcgtggacctttggacctattactccctggcttctattacttaagtcccattagccctatttctaataaagatgccaaccatatttctattaaaaagactgacatctctgctatcatcagaggagatccatccctgaatatcctattgatgctgtttttcttctcaccagaacttttcagatagtttttagtaatggcatgtcctctggatctcctacaaaatacaatctgccagtatagtattctagtcttacgtcatatatacatmtcagcatgcccacctccttgagccttcttattccttctaccatccattagagtaactcacatattttctactttgcttagcataagccatatctttttctaggctttttgggccactctagctgcaagtttgcctaattgtctggagtccataaagggggttaaatcccatgttccagaaaagtgacccaaagtcaatgaattcttgactcaatcaaccactcacaaaatccattcccaggagttttctcctggttcccagtaat

SEQ ID NO: 75405 - DNA, 1308 bp, Homo sapiens
tcagtgtgcttagcagcatatgtaaataacagattgaaacttggtcacagagaattttctgttcccgacatctgttatacttgacagatgccccagtgccaacatggcatcaagtaaagtgagactacagagaaagtaggaactcccactgtcttactcctttctgaacaaaagcaccattaactcaaaaatgaggttctgagctgaataaactatatatgatgtctgtagttcgtggatgtagaggcatgtgtgatttcagtaattaaaatatcacattccttgctccctgctcctgacagacaggtggtctggtttacttaatcttacatttgagttcataacatttcaaaatgttttcatttattctatcagtaggaagaaacagaatatctaaatagtgttaaatgtttaatcccagtaataaggacaacatcatgatgttaataaatgcatatgcaaaaacatgaacagcaaaatgactgaaaagcaaatgcaaataacagacattgtttaattttgctactgttgcaatgattgcaaattaaagcaaaattgagggataatttacaaggcatgcaatttaaagtgacatatgtcaccaaaagctagtgatagtgcattaaatctgtagtgctgctgcacagattgtagaatggccattttcaaaagcaatttggcatatcaaaggccattacaagtgtttataagactcacttgaggaagctgctggttaattcggtgatgataaacaagcagaagctattgacttcctccataaaatcctatcctggagcaacgggggaaacaaaagggaaatacgaatgccagaaagaaaccaaaaatctaagcaagctcttcagagcatggagtgtgttttgggcagtttatgtctggagtgtgagtggctgaaggcagcaaaagaagagggaaatggaagcagcaaggacagggctggccagaggtaaggtgttttgttttgttttgttttgttttgtttttggcagagtcttgctctgttgctcaggctggagtgctgtggcacaatctcggctcactgcaacctccgcctcccgggttccagtgattttactgcctcagccaccttagtagctgggattacaggcacacgccaycatgcccggctaatttttgtatttttagtagagatggggtttcaccatgttggccaggctggtcttgaactcctgacttcaggtgatccacctgccttggcctcccaaagttctgggattacaggcatgagccaccgcacgtggcccagaggcaagcttttattcttaactt

SEQ ID NO: 75406 - DNA, 1308 bp, Homo sapiens
tcagtgtgcttagcagcatatgtaaataacagattgaaacttggtcacagagaattttctgttcccgacatctgttatacttgacagatgccccagtgccaacatggcatcaagtaaagtgagactacagagaaagtaggaactcccactgtcttactcctttctgaacaaaagcaccattaactcaaaaatgaggttctgagctgaataaactatatatgatgtctgtagttcgtggatgtagaggcatgtgtgatttcagtaattaaaatatcacattccttgctccctgctcctgacagacaggtggtctggtttacttaatcttacatttgagttcataacatttcaaaatgttttcatttattctatcagtaggaagaaacagaatatctaaatagtgttaaatgtttaatcccagtaataaggacaacatcatgatgttaataaatgcatatgcaaaaacatgaacagcaaaatgactgaaaagcaaatgcaaataacagacattgtttaattttgctactgttgcaatgattgcaaattaaagcaaaattgagggataatttacaaggcatgcaatttaaagtgacatatgtcaccaaaagctagtgatagtgcattaaatctgtagtgctgctgcacagattgtagaatggccattttcaaaagcaatttggcatatcaaaggccattacaagtgtttataagactcacttgaggaagctgctggttaattcggtgatgataaacaagcagaagctattgacttcctccataaaatcctatcctggagcaacgggggaaacaaaagggaaatacgaatgccagaaagaaaccaaaaatctaagcaagctcttcagagcatggagtgtgttttgggcagtttatgtctggagtgtgagtggctgaaggcagcaaaagaagagggaaatggaagcagcaaggacagggctggccagaggtaaggtgttttgttttgttttgttttgttttgtttttggcagagtcttgctctgttgctcaggctggagtgctgtggcacaatctcggctcactgcaacctccgcctcccgggttccagtgattttactgcctcagccaccttagtagctgggattacaggcacacgccaccatgcccggctaatttttgtatttttagtagagatggggtttcaccatgttggccaggctggtcttgaactcctgacttcaggtgatccacctgccttggcctcccaaagtkctgggattacaggcatgagccaccgcacgtggcccagaggcaagcttttattcttaactt

SEQ ID NO: 75407 - DNA, 1994 bp, Homo sapiens
gacaattggaccttatacacctatcaaaagtgcttgatgctcttaggacttcttatctgactttctaggtttgccattcttacaggttataacaggcatatttagaactaaacctcatgtctgttaatttataggatagtcctttctgacaatttccatttaggataatttccatttagagctgagtggtaacgattgtagtcrttctaagagtgagtcttctcaggtattaatatgaaccctccatgtaccaagttgttaatatactgcactcagcaactaataaatgagatctattactatggtgtaaaacagaagaaaactgttttagtggaaccaatatcttgcaactgtatattttgagcaaagtactgtttataagcctgtgatttttgtacccataatgagggatattaacatgtacctggtagagagtgttaaatgaagtcatataggggagtgctgatgggttacattgtccataaatgtggattctctaatctctgtctggaacatcttttattgactgcaggagaatgaatgacaacctttaacacttcgcttctggctattcgttctctgatcttcatttccagattgctttttttccttgctaagaaatttttagttttctgcctttaaaaaaatacagctttgattcatgtttgttttcttcaattccaaggcaacttgagggctttaaatcatgtacagttggggactgagtatgtggtaaaggaaacagctgcactgactgctctggagctaagcttctcctggggctgaaccctgtcctcagactcagagttaaatgtttcctttgctatttggataatcagatggatcaaactttcttttacacttactgtcaaaaagacatagctttctggtaaaccagatacccttagtggtgaaatgaactgtgtctcaggaggaatggacagcaggaaaggacaataggagctggaagaaaacgagagtgcagaggggtggccaatgggaagggtttcctcaggtgctgtctgtcacatgcatgtgaagctgtgcaagaacctctgcaaaatgcctttgcccacctaacatctgggacctggcaagattatcagtgaactcttatcatctctgtcaagtgcctttcagcaatcttaaaaacaattttctcctgtcgattttcatcctagtaaagggcctttgaaatgaaaatgcacagctgaaaattaccacatattgctagagatgaatgatcagttttagaaaaacaatgattgcttccttataaatttgtgcaagcaaccaaatctaataatatggggcattaatggagattggtttaaacaaaagtaacagctttgcttgccttagcttacccaatttatgtttaggacctgccacatcgaccatacccacgattccaccttctgatataaaccgtttgtcagcttctgaaaacccaatacagaaaaatgatggttatttccaacaacatgtacatttgaagttttttgttactatttatgccagaatgaaacacatatgtaactttccttgttttttcctccttgtacattcctgggttttgaaattttgaataaatcaccacaggagaagtttaaaaattgctatggttttaacagctttgctcttttttctttaacctgattcagtttgtttgttggaactgatttatttgaattggtgagttttattgatttttttcatgcctgatttaattcaatcaaattgccttgttccaagttgtgtaaatgagttttattttctaacccaattaggaaaagcttataggatgttgttcatgtaagaattggagaataaccaatttgttttctactagctgaagctatatatatatatatatataaaatcctcgtggcacaatccctaatggtacaaatacctgtgcctaaatacaaatacctgtgcctaaaatatctcagaattaatgatatatttagggaatggtgaatcataaaaaa

SEQ ID NO: 75408 - DNA, 1994 bp, Homo sapiens
gacaattggaccttatacacctatcaaaagtgcttgatgctcttaggacttcttatctgactttctaggtttgccattcttacaggttataacaggcatatttagaactaaacctcatgtctgttaatttataggatagtcctttctgacaatttccatttaggataatttccatttagagctgagtggtaacgattgtagtcgttctaagagtkagtcttctcaggtattaatatgaaccctccatgtaccaagttgttaatatactgcactcagcaactaataaatgagatctattactatggtgtaaaacagaagaaaactgttttagtggaaccaatatcttgcaactgtatattttgagcaaagtactgtttataagcctgtgatttttgtacccataatgagggatattaacatgtacctggtagagagtgttaaatgaagtcatataggggagtgctgatgggttacattgtccataaatgtggattctctaatctctgtctggaacatcttttattgactgcaggagaatgaatgacaacctttaacacttcgcttctggctattcgttctctgatcttcatttccagattgctttttttccttgctaagaaatttttagttttctgcctttaaaaaaatacagctttgattcatgtttgttttcttcaattccaaggcaacttgagggctttaaatcatgtacagttggggactgagtatgtggtaaaggaaacagctgcactgactgctctggagctaagcttctcctggggctgaaccctgtcctcagactcagagttaaatgtttcctttgctatttggataatcagatggatcaaactttcttttacacttactgtcaaaaagacatagctttctggtaaaccagatacccttagtggtgaaatgaactgtgtctcaggaggaatggacagcaggaaaggacaataggagctggaagaaaacgagagtgcagaggggtggccaatgggaagggtttcctcaggtgctgtctgtcacatgcatgtgaagctgtgcaagaacctctgcaaaatgcctttgcccacctaacatctgggacctggcaagattatcagtgaactcttatcatctctgtcaagtgcctttcagcaatcttaaaaacaattttctcctgtcgattttcatcctagtaaagggcctttgaaatgaaaatgcacagctgaaaattaccacatattgctagagatgaatgatcagttttagaaaaacaatgattgcttccttataaatttgtgcaagcaaccaaatctaataatatggggcattaatggagattggtttaaacaaaagtaacagctttgcttgccttagcttacccaatttatgtttaggacctgccacatcgaccatacccacgattccaccttctgatataaaccgtttgtcagcttctgaaaacccaatacagaaaaatgatggttatttccaacaacatgtacatttgaagttttttgttactatttatgccagaatgaaacacatatgtaactttccttgttttttcctccttgtacattcctgggttttgaaattttgaataaatcaccacaggagaagtttaaaaattgctatggttttaacagctttgctcttttttctttaacctgattcagtttgtttgttggaactgatttatttgaattggtgagttttattgatttttttcatgcctgatttaattcaatcaaattgccttgttccaagttgtgtaaatgagttttattttctaacccaattaggaaaagcttataggatgttgttcatgtaagaattggagaataaccaatttgttttctactagctgaagctatatatatatatatatataaaatcctcgtggcacaatccctaatggtacaaatacctgtgcctaaatacaaatacctgtgcctaaaatatctcagaattaatgatatatttagggaatggtgaatcataaaaaa

SEQ ID NO: 75409 - DNA, 1994 bp, Homo sapiens
gacaattggaccttatacacctatcaaaagtgcttgatgctcttaggacttcttatctgactttctaggtttgccattcttacaggttataacaggcatatttagaactaaacctcatgtctgttaatttataggatagtcctttctgacaatttccatttaggataatttccatttagagctgagtggtaacgattgtagtcgttctaagagtgagtcttctcaggtattaatatgaaccctccatgtaccaagttgttaatatactgcactcagcaactaataaatgagatctattactatggtgtaaaacagaagaaaactgttttagtggaaccaatatcttgcaactgtatattttgagcaaagtactgtttataagcctgtgatttytgtacccataatgagggatattaacatgtacctggtagagagtgttaaatgaagtcatataggggagtgctgatgggttacattgtccataaatgtggattctctaatctctgtctggaacatcttttattgactgcaggagaatgaatgacaacctttaacacttcgcttctggctattcgttctctgatcttcatttccagattgctttttttccttgctaagaaatttttagttttctgcctttaaaaaaatacagctttgattcatgtttgttttcttcaattccaaggcaacttgagggctttaaatcatgtacagttggggactgagtatgtggtaaaggaaacagctgcactgactgctctggagctaagcttctcctggggctgaaccctgtcctcagactcagagttaaatgtttcctttgctatttggataatcagatggatcaaactttcttttacacttactgtcaaaaagacatagctttctggtaaaccagatacccttagtggtgaaatgaactgtgtctcaggaggaatggacagcaggaaaggacaataggagctggaagaaaacgagagtgcagaggggtggccaatgggaagggtttcctcaggtgctgtctgtcacatgcatgtgaagctgtgcaagaacctctgcaaaatgcctttgcccacctaacatctgggacctggcaagattatcagtgaactcttatcatctctgtcaagtgcctttcagcaatcttaaaaacaattttctcctgtcgattttcatcctagtaaagggcctttgaaatgaaaatgcacagctgaaaattaccacatattgctagagatgaatgatcagttttagaaaaacaatgattgcttccttataaatttgtgcaagcaaccaaatctaataatatggggcattaatggagattggtttaaacaaaagtaacagctttgcttgccttagcttacccaatttatgtttaggacctgccacatcgaccatacccacgattccaccttctgatataaaccgtttgtcagcttctgaaaacccaatacagaaaaatgatggttatttccaacaacatgtacatttgaagttttttgttactatttatgccagaatgaaacacatatgtaactttccttgttttttcctccttgtacattcctgggttttgaaattttgaataaatcaccacaggagaagtttaaaaattgctatggttttaacagctttgctcttttttctttaacctgattcagtttgtttgttggaactgatttatttgaattggtgagttttattgatttttttcatgcctgatttaattcaatcaaattgccttgttccaagttgtgtaaatgagttttattttctaacccaattaggaaaagcttataggatgttgttcatgtaagaattggagaataaccaatttgttttctactagctgaagctatatatatatatatatataaaatcctcgtggcacaatccctaatggtacaaatacctgtgcctaaatacaaatacctgtgcctaaaatatctcagaattaatgatatatttagggaatggtgaatcataaaaaa

SEQ ID NO: 75410 - DNA, 1994 bp, Homo sapiens
gacaattggaccttatacacctatcaaaagtgcttgatgctcttaggacttcttatctgactttctaggtttgccattcttacaggttataacaggcatatttagaactaaacctcatgtctgttaatttataggatagtcctttctgacaatttccatttaggataatttccatttagagctgagtggtaacgattgtagtcgttctaagagtgagtcttctcaggtattaatatgaaccctccatgtaccaagttgttaatatactgcactcagcaactaataaatgagatctattactatggtgtaaaacagaagaaaactgttttagtggaaccaatatcttgcaactgtatattttgagcaaagtactgtttataagcctgtgatttttgtacccataatgagggatattaacatgtacctggtagagagtgttaaatgaagtcatataggggagtgctgatgggttacattgtccataaatgtggattctctaatctctgtctggaacatcttttattgactgcaggagaatgaatgacaacctttaacacttcgcttctggctattcgttctctgatcttcatttccagattgctttttttccttgctaagaaatttttagttttctgcctttaaaaaaatayagctttgattcatgtttgttttcttcaattccaaggcaacttgagggctttaaatcatgtacagttggggactgagtatgtggtaaaggaaacagctgcactgactgctctggagctaagcttctcctggggctgaaccctgtcctcagactcagagttaaatgtttcctttgctatttggataatcagatggatcaaactttcttttacacttactgtcaaaaagacatagctttctggtaaaccagatacccttagtggtgaaatgaactgtgtctcaggaggaatggacagcaggaaaggacaataggagctggaagaaaacgagagtgcagaggggtggccaatgggaagggtttcctcaggtgctgtctgtcacatgcatgtgaagctgtgcaagaacctctgcaaaatgcctttgcccacctaacatctgggacctggcaagattatcagtgaactcttatcatctctgtcaagtgcctttcagcaatcttaaaaacaattttctcctgtcgattttcatcctagtaaagggcctttgaaatgaaaatgcacagctgaaaattaccacatattgctagagatgaatgatcagttttagaaaaacaatgattgcttccttataaatttgtgcaagcaaccaaatctaataatatggggcattaatggagattggtttaaacaaaagtaacagctttgcttgccttagcttacccaatttatgtttaggacctgccacatcgaccatacccacgattccaccttctgatataaaccgtttgtcagcttctgaaaacccaatacagaaaaatgatggttatttccaacaacatgtacatttgaagttttttgttactatttatgccagaatgaaacacatatgtaactttccttgttttttcctccttgtacattcctgggttttgaaattttgaataaatcaccacaggagaagtttaaaaattgctatggttttaacagctttgctcttttttctttaacctgattcagtttgtttgttggaactgatttatttgaattggtgagttttattgatttttttcatgcctgatttaattcaatcaaattgccttgttccaagttgtgtaaatgagttttattttctaacccaattaggaaaagcttataggatgttgttcatgtaagaattggagaataaccaatttgttttctactagctgaagctatatatatatatatatataaaatcctcgtggcacaatccctaatggtacaaatacctgtgcctaaatacaaatacctgtgcctaaaatatctcagaattaatgatatatttagggaatggtgaatcataaaaaa

SEQ ID NO: 75411 - DNA, 1994 bp, Homo sapiens
gacaattggaccttatacacctatcaaaagtgcttgatgctcttaggacttcttatctgactttctaggtttgccattcttacaggttataacaggcatatttagaactaaacctcatgtctgttaatttataggatagtcctttctgacaatttccatttaggataatttccatttagagctgagtggtaacgattgtagtcgttctaagagtgagtcttctcaggtattaatatgaaccctccatgtaccaagttgttaatatactgcactcagcaactaataaatgagatctattactatggtgtaaaacagaagaaaactgttttagtggaaccaatatcttgcaactgtatattttgagcaaagtactgtttataagcctgtgatttttgtacccataatgagggatattaacatgtacctggtagagagtgttaaatgaagtcatataggggagtgctgatgggttacattgtccataaatgtggattctctaatctctgtctggaacatcttttattgactgcaggagaatgaatgacaacctttaacacttcgcttctggctattcgttctctgatcttcatttccagattgctttttttccttgctaagaaatttttagttttctgcctttaaaaaaatacagctttgattcatgtttgttttcttcaattccaaggcaacttgagggctttaaatcatgtacagttggggactgagtatgtggtaaaggaaacagctgcactgactgctctggagctaagcttctcctggggctgaaccctgtcctcagactcagagttaaatgtttcctttgctatttggataatcagatggatcaaactttcttttacacttactgtcaaaaagacatagctttctggtaaaccagatacccttagtggtgaaatgaactgtgtctcaggaggaatggacagcaggaaaggacaataggagctggaagaaaacgagagtgcagaggggtggccaatgggaagggtttcctcaggtgctgtctgtcacatgcatgtgaagctgtgcaagaacctctgcaaaatgcctttgcccacctaacatctgggacctggcaagattatcagtgaactcttatcatctctgtcaagtgcctttcagcaatcttaaaaacaattttctcctgtcgattttcatcctagtaaagggcctttgaaatgaaaatgcacagctgaaaattaccacatattgctagagatgaatgatcagttttagaaaaacaatgattgcttccttataaatttgtgcaagcaaccaaatctaataatatggggcattaatggagattggtttaaacaaaagtaacagctttgcttgccttagcttacccaatttatgtttaggacctgccacatcgaccatacccacgattccaccttctgatataaaccgtttgtcagcttctgaaaacccaatayagaaaaatgatggttatttccaacaacatgtacatttgaagttttttgttactatttatgccagaatgaaacacatatgtaactttccttgttttttcctccttgtacattcctgggttttgaaattttgaataaatcaccacaggagaagtttaaaaattgctatggttttaacagctttgctcttttttctttaacctgattcagtttgtttgttggaactgatttatttgaattggtgagttttattgatttttttcatgcctgatttaattcaatcaaattgccttgttccaagttgtgtaaatgagttttattttctaacccaattaggaaaagcttataggatgttgttcatgtaagaattggagaataaccaatttgttttctactagctgaagctatatatatatatatatataaaatcctcgtggcacaatccctaatggtacaaatacctgtgcctaaatacaaatacctgtgcctaaaatatctcagaattaatgatatatttagggaatggtgaatcataaaaaa

SEQ ID NO: 75412 - DNA, 702 bp, Homo sapiens
atttgctaagatctgaagaaatagagttatgtttccattagcatagtgacttacataccttggaaaattcttccagttagttaaaaaaaaaaacttgtgacaatataaatatggagatatatttgaaagtctgttgctccttagcaagaaaaggaataatcagaagctataaattcaagacaggaataaagggattgagttactagaatgagctacttactttaacaaacccaaaatctcagactgaaggcattaaaagkttccccctgaccccccgaaccccgcgagacacttcaatgtaattgtttggtggtggaatccatgtggtaattctaaaagcctgattccttccatgttgtgtagacactcatgagggactttgagtccactgcaggagttgctatatctagtttggtagatcacctgggagatttttgaggtttaaggtctaggactgtggtgcatcagtttcaaccatatcccaatggcaagagtttatcactcagagataaaaggaagcttggaaaagctagtttccaagcagcaactctgtgttgtgaaaaaaaaaattgtaaatattttctggttaaaactaggtttccgtttgtaggtgtttgacctaagtactaaggtttggacactattagctcatgatttctttggcaatgcaatttcatcaaaaatgttatgagcttttcattt

SEQ ID NO: 75413 - DNA, 728 bp, Homo sapiens
agcttagtataggttgacaaaaggaagaaataggattcagaagttttgttgctgctgctactgttattgatttttgaaataaggagaactgagaagatgcttttaaaaatgagaagaatcaaattgagagaacctgattgcatgttgagagaaagaatagataataagcactgggatagaaaatagttcaaagagatccaaagcacagattgaggcattctcctttcaaagaggaagaggcactcatctgctgtagcaggtggttagattctaaatcaatgggtttttcaactgaaaaaaaagacactgccaaccaatttttgaatgaattttaaatatgacattttaatatacaatttatatccaaattttatgttctataaaattgtcaagaagaaagcatgtgtattcaaaactgctaaaataacattacataaataattttaaaagcatttttgctatatttacttagtgtaaggcatattatttacctatattatttgtcaatcatattacatactcctcacagtagtttatttaaaagtgttgtttttattagcatttktatatagcttagatatttcaaattttatgggtgaaacacctggaaatgaagcaagataacttctaggcatttagttcttttaatgaacagaagataaaaatattttgtattttcacaattttaataagatgaagtatagtatttaagctaaaagaatattagg

SEQ ID NO: 75414 - DNA, 635 bp, Homo sapiens
tcctttgaggccaggagttcaagaccagcctggccaacacggtgaaaccccatttctacctaaaatccaaaaattaatcgggcgtagtagtgtatacctgtgatcccagctactatggagggtgaggtgggaggatcacttgagcccaggaggcagagattgcagtgagctgagattgcaccattgcactccatcctgggccacagatcaagactgtgccaaacaaacaaacaaacaaacaaacaggctttaatggggcacctgagtcaggagcaaggcgttgcctttgaagagggtggttccaggtgagactcagagctggcgaacaggtgactgttagtagggtaaatgcagctgagagcaataacttaatcatagccttagaatcaccctgtacggcagacacacctgaatgtgtgttctgagttaggaaatttaagagtggccaacccagagatttgttctttgtccataaggaatatctgagtccccagcgcatccagtggaacaggggctgaacaggggattgagtctccacgttttgggttgaataaaaattgccaggtggaggttgtcagggggaaggtgttaaatggaaacactatrtataaactgcatgctttttgcaagggact

SEQ ID NO: 75415 - DNA, 1289 bp, Homo sapiens
gggacactatcttttcctccactgtcagtccagtgcctagaataacactgagcccccagaaggtattacttaacaaaaccttcaaaaggggagctgttattttaggcttttccctttaaaagcatcctccacccgctttggatcatttactccgttttatgcagcataaacagacctgaagggccgaaacactttgtatcattttttataaccctgaacttgataggaacgttcagaactatctgccagattctttggcttcatcktacatatgcctctagcagatgcctcctaaaacacagactggaaaaaaaaaagtgtttatagtatttgacaagtgaagggaacactattggctgccttctcggcctccatttccctcctcttccaggccaaaagaacctcagctttgttctcgcttagtaaacccaggcagccaggagcctcttatcaccccacccccagctctcagattggtctaagggcaatcctattccacagtgattggttcaggaatgagcatgtgacctgatcctagccaacgacacaagagggggactcctcgcgcctaaaagagagccacgggaagagacggtctctctggcttccttgggcatgttgtgagtggttacctggagctgttgcagcccttttggtgaccaggccaggagaaagccagctctaagaatggccaagcagaaagatgggaagaacctgcctcctcaaagacattgccaagccacaaatcaacaaccctgaattctatataccctggggattacctgttttattaagagaaaactccagtggggtaagggtcagagggaggtaatctgcagagatactgcactgaggacaagccacagaggaaatcagactgaggggctcccagggccccaggcagatatgatgaatacatgtctctagacttagatgaggtgggggaccctgcagtgttattatgctttctcctttccaagaatgaaagctgtattactctgctttccgttcttttctggccactaggaaactcaacaccaaacgtattgctgcatcacaactgttttaacctgtgtggttggcaatatttgccttctctttgtctcagccaagatttttctagttttattctgctccactcatcttattgtatatggccacttcagattcttcctgaaaagagatgtggtataaataaatgaactggtaacacagccatgggcccaatgtctaaagaggaattaataaaatgaacctccatatggagcctgcttgacctaagctgatcg

SEQ ID NO: 75416 - DNA, 763 bp, Homo sapiens
ctgggttcaagcaattctcatgcctcagcctctcaagtaactgggactacaggtgtgcaccaccgcacttggctaatttttgtattttttgtagagacagggtttcaccatgttggtcaggcttgtcttgaactcctgacctcaagcagtctgcccatcttggcctcccaaaktgctgggattacaggcgtgagccaccatgcccagcctggatatggtgatatgatgtttagttagccacagcctctggtgaggacagttgactaatttaaaaatgcttggcacacacatgagcattgtatcctgctgagagtcttccacagatttgtcctttggtctaacttatatttctctaggtgaagtttacactcatttctttttgttctacccttatcggtgactaagagaccagctgtattccaacttctgaatactggcagaattctgaatcagtagctcttccaaaagggcctagcttacctcagagaatcagtctggcccttgtgtccttgtctcctctatggagaacatggagttgcttttctttgcagttggttgtagcttaaaccatagtgcattgctgagtcgtgtgatgtgtgattcatcaggcctcaggtgacaacggtggatttccttcaggaatgagtagcaaacattttggcccctctttgggtgccaagcaccatgaggtaagggagtactttacagacccctagagatccacgggtgctctagatatagccatatttcagcccctggatcc

SEQ ID NO: 75417 - DNA, 2460 bp, Homo sapiens
cctttcatcagggaagaatttcaatcttcagccaaagaaaaagaaagaggcctggagaaaatcagcccagggaagtatttcaggtggtgggtaaacattgtgttgtcttgtaggcaccatttcccctaatgatgggaaataatcaattattctaaaaacattaatgtggtgagtaaaagatgcattcaaattamagtcttatgctcctctggtaaaagtcagtccaagttagaaaaataagaatgcccaagcaatagggagcacatgattcagagaaagttcacagggcaaattcttcatagttgcaactaagaattattgccactaataagacaatgctttctgcttcctccatgacacatctcaaaggaaggatgttgagttagaaacttaccatcccaacatttttgtttaatctcctataaaatatatccaggtttcaaaagacagtgtggctccatcaacatgatgatttatttgacacaggtacctgcgcaagggaggactaacagaggggggtccgcacagtcaaagtggttgatctcattggatcctcagaaggacagaagaagcatccggatggtctgtgccagatagtttgcaaagccatatatttaagaaacagaagccagagagaggcagacaaatctggacattttactaccatataacaagggcttgcaaatggccatgtagcagtcattagccatcactgtaagcatatgataatctctgattatcaggacaatgaaaaagtagaattataaaacataaccaacctgtgtatgtacttttgaacctaaaataaaagttaaaaaacaaaaaaaccggccagatatggtggctcatgcctgtaatctcatcactttgggaggccaaggcaggtggatcaccggaggtcaggagttcaagaccagcttggccagcatggcgaaaccccgtctctaccaaaaatacaaaaattagccaggtgtggtggtgtgcacctgtaatctcagctactcggtaggctaaggcagaggattgcttgaacccgggaggcggaggttgcactgagccgagatcgtgtcactgcctgggcgacagagcgagactccatctcacaaaaaaaacaaaaaacaaacaaaaaaaaaaacttacacaaccaatgaagaaaatggtttttctcttggataggaaattaaccaatatctgaggagtgacattgagagtataacagagaactgcaaaggagaggtgactgaggaagaagtacattggaatgtgaagttttcagtcacttctaatgatcaaaatcatgctcaaattgcccattaccataataaggtaaatgaccaggaacgtgacagaaaaaaaggacaagctgcaactcggcttgatctgtcggtcccaggggaataaactcagctatggctgtccagtgtttctttgacattgtatttgcttggcttctaatgaggtctaaagaaaagaaaagaaaagagaaagcatttgtcttttgtcatttagccatttccaaaaaagacagtatggctacttttagtctcctgtaattgtttcttggtcccatgaatgagataacattttactgtaaagaggtgaaaatgtgtgggtttgcaaaatgtaaaaacaaagtcggaagattcagaaggatgagccacactacacataaaagtgcattaatgacttattttataatcatagaggattctgtgctttgaaaagaaagtactttttaaaaagaagatattatttctttaaagtttagcaaaatttgtcttccaacttcgtaatatttaagccataatgaaaagtattttcttttgtttcctttcttatgctccgaactagtaagttcttgtccatagagttgagcaaactttcctcccatttccttccatcctcacccactttgtgatctcagatgaaccagcttcatatgtagcctgcccctccaccactgctcctttttttttaaccataaataagcatgtaatgggtagaaagtttgtttaaaatttaaattatgccggccaggtgcagtggctcatgcctgtaatcccagcattttgggaggccgaggcaggtggatcacaaggtcaggagttcaagaccagcctggccaacatggtgaaaccccgtctctactttaaaaatacaaaaatgagccaggcatggtggcatgtgcctgtatcaggaggctgaggcaggagaattgcttgaacccaggaggcagaggtttcagtgagctgagatcgcgccattgcgctccagcctgggtgacagagcgagactcgatctcaaaaagaaaaaaaaaattgcctatacaccaaaggatcccataatgagtgggagaaaaagttactgggtaggaaggtagatagataatagacagatggagatggataatttttcccctctccaaaataggaaaaatatgcttgtggctgcatggaaaaa

SEQ ID NO: 75418 - DNA, 1182 bp, Homo sapiens
gcacagggggagggagcaaagaatgacatacactccccaaataaccacttctacgatttttttccaattcaaacataggttcaagggaggcagcagaaccactgaataaagtgcatggggttttaaatccgtgtttctgcttcttcctgagcaacctcaagctagttattcatccccctaccaaagcccaagtttatacatctggaaagtgaggatattagtaatacccacaaataaagttttgctgtgaggactgaatgatgtaacttatgctctgagcagttgagctctacatctgtgcagggctacacagcagggtctggacccataaattactttctccgaaaatgtttaagcaattgttaagccttggttaagcacaatccatttatcacctgcaatagacgtcccacaccctcagactgaaaagggttggcattcctgaatcagcctactgtaatacttaccaaacgggatggtaacttggacactgtgtcagggaagaggcacttggtcctctgcttttaggaaaaagtcttggcccacaaagagggaggacctaatgatgtaatctttgtcatttgggatcaacctcctaaatgcaacctaatatggctccttctggctgtcctactgttaattatgctctgaggaaggctgcctgaaacaaaagtgatgggcaaggagaggagatgatctgggccatggtccagcatccaaagtggaccccttggggatcctacccacacccagagcaccactgagttcctactaccccaacttttggggcccaggaggcacctggtacaggtaaacattcagtggtacaagcatgtggtttaaaatctgtgaaatcattcacaataagcaaaaagctcttaaatatttaatcacacatgggactacgcacaaatattgctttgtgcacaatcaagatctttatggggtcatgaagaaggttttattcactagtrtgtgagtgtattgtgtatgaccagatgcagtagggcagagtggtctctaaaatcaggcttagctgagttcaaatcaaattccagctttgctatgtaccagctgtggaattttgagtaagctacttaatctcttttaagtcctggtttctttgtctctaaaatgaggataatcatagtaccttcttatgaggttgttgccaagattaaa

SEQ ID NO: 75419 - DNA, 627 bp, Homo sapiens
atcttgccttatttactaacaaatacaagtgcctctaaacttagacagtttccaagtcatggaactgatgagcacttagctcctgcagagagctctggatgatgggtcgggagaacaaagacacaatacatcaaaacggcattaacaagtaaacaggttttcaaagccctctacatgcaaatttacacaattatccttttaatttttatcttcatatatatgtacataatctacttgcttctgagtataaataaaactgtatgttcttagttaatagtctctataaattcactctatttatctttctgagttgaaatactgcatctcattggataacaaaaaaaaatttgackaagattacactggaaaggtgagtaggttgggtgattgactgtgattgagaattccatgattctggataacttccaaagcataaaaataaatgtgtgttttatttcacacgtagacaatacacatacttattactttaaaaaattaatatgtgcatggaagtgacttactacaaataaagtaaatacacatttcacaaaaaaagaagagaggaagggagaaacatgttaaaaacaaagagaggtacattttattgtgtgaaaagcctccaacgga

SEQ ID NO: 75420 - DNA, 1609 bp, Homo sapiens
  misc_feature (1)...(1609): n = A,T,C or G
ctaacaaattcaatggcaatatatatataagatggtttggaataaatatgctctggaataaactgtctataaccaagtgataaaatatgtggtccgaacattcagtgctatgtgtacacagaaggaagacagaggaaagtggtaattagagggtttgtagaaagcattaacagaggattttgaccagtgttatggtatgaatgatgtctaatatgccagaaagaaacaaggaggaatgtaatcaggacaggaagaacattacaagggaaaaatttgagaatgtacttaaaataacatgagttagtaaagatatgaaagaagagtaacccttggaaaggaggcatagaataaaagttacatagacattctgagttgcactgaattttaagttgaggggctggatatatttatactgggacagggagagttatagatttaacttaaagtcagttagatataagtgttgggcatccaaacattcagctgctattatgaagccccatggaatctgtttcacccaagacttgactcagaagtgcattgatctacatatatgtatgtatgacctatatatgtgcatgtgtgtgtacacacacacagagatagcatgcactcatgtgtgtatgtatctatatgaactgaatttcatgagcttcccaatcaattccattgtgcacatctttcttttctcctttaatttgggtcttctggctaacagcctaattttcccattactgatccaacctccacatactacctccttctgactttagatataactttgtttgtactcctgatctcatttatgtcacctgatgacttgatgcactcatgtgcaaacctctactctttattctggctctagtgggcctttgggatctctagcctctcattctatgagcnnnnnnnnnnnnnnnnnnnnnnnnnnnnnnnnnnnnnnnnnnnnnnnnnnnnnnnnnnnnnnnnnnnnnnnnnnnnnnnnnnnnnnnnnnnnnnnnnnnnaatatacatatttagtatatttagaatatatatatttagtgtatttatatatatttagtatatatacatttagtacatatagagaaagaaagaaagagagagagacaaaatcatattctgttacccaatctagaggtcagtggcgttatcatagctcaatgtaaccttgaactcttaggcttaagagatctttctgcctcattaggtctcacatctcaacactgttgcaatctcaacattgaaaatttagtttctaacagatgatatttgagggacaaattcaaatcataccatacggtcttatggtgattttatytttaatgtttggagaacatccaaatttctttctacagaaactaaagcttcttacatttctctaagcaatgtacgacactttcagtctcttcacatgctctccaaattttgttattttcatttaaaaaaatcattactgtcatcttaaaaggcatgaagatacctcattgtgatttgatttgcatttttcaaatgactaattatgatggcatcttttcatgtgcctgttagtcctttgtacagacagtccccaacttataatggtttgatttctgaatttttgactttacac

SEQ ID NO: 75421 - DNA, 539 bp, Homo sapiens
tctctagggtctgacactccacctctcaacccatatgtttaatacctgctaatccttactagcatttgaagttttgacctccatttctgagagggatgggacaggaagggggaatgagagggagaaggtggaaggctggatggtgaatggagggaaacaagggagttcagctgctgaggactaattggccaacaggatttttcagagcatctggtacatcagacttttatcagtgtctaacatattttaatctgtatatttcatggagcataatcttacctctctctgtgacctccaactctttagtaaaatgttttactttcatgaatgcccttgagcataagctttcagtggaaactgaagacagggctggatgttatatctgggtcaataacctgtgaacaaagcaccttagacatgggagcccagaagcagaggtgrcctagagcgcgtaagtccctcaggaatatgcagaagtcttggggagggctttagaatgccattggcatggacaatggatttgacttaatcttatccac

SEQ ID NO: 75422 - DNA, 1655 bp, Homo sapiens
tgcatgtatatttttctagaatccatacctttttattgaattctcaaaggattctttaacactcaaacgataaagttacactgatatgaagcctcccttgatccttccattttctccaggcccttttcatattctttcttgtttaaagagttgatgatgtacttcgatgccagctgctctggccttctttgtgctctgcaagaacactaagcccattcccagctcaggccttttgcattagctgttccctctgcctagagtgtcctttcctcagaggctcccatggatggttttctttttttttgttaacctcagttttcagtttaaatgtcaccttctcatagaggcctgccctgattccacaaaatagtcactttctagcatattctcctgtttcatttctaacactatcatcatctggttttctttctttattgcatatttttgtctggcagtaagtgaactccataaaaatgggaatcattcatcttgctcaccatgttatccccactgyctagaatagtgcctggcgtatagcagacactcaaaatggtttctgaaataaatcgataaatgcttgttttctttatccgtctgaaaatggtttcctatgtgttccccccttatgtcatctttataacgctataaaatttatatataattataaacaatccaagcatataaaaaaagcttaggtaataacagatacctatgtactcatctcaaagatgaaacagatgttaacattttgcttcaattatttcaaattttgcctgtgcttcttttaaatttttgctaaaaatttcataccccatattttgctctgcgcttccttctcagcagtaactgctatcttaaagaaagaaatgtcatttctttatatgttttagtagtttaatgatatgtgcttatatttataaataatgcatgctattttttgtatgttctgagattttatataaatgcttgcatgctgtagatatcttttggtaatttggtcctgggtattttacattgttgttgagccacaggattaaacaactctggagccattctacctgtgggcttattgttatatgagaaaataaaattccttgttatttaagccacatgaatttggtttgtttttatgtacagggaagcctcctaactgcgataatctaactctatttaaacattcctcgttgttgagtccttaggctcaataatatctatattaaatgtggctgggctggcagttttcatttggctgcatgtctactgatatatagacagttttagtttctcctttaacccatgttgcccaatccagaaaccttttgtatttgtattttatttctgtgtgctatggtctgattgtttatgatttcccccaatttatatatttaacactaatccccactgttacaatgtttggaggtggagcctttgggtgatggttaagtcatgagggtggagccctcatgaattggattggtagatgcgtatggggctgtcctagtacaatcaggctgctataagaaaaatacaatttatagacaatagaaatttattgctcacaattctggaggctgggaagtccaagcccatagtgtcagcagactcagtgtctggtgagggctcactctctgcttcatagatggtgccttcttgct

SEQ ID NO: 75423 - DNA, 1655 bp, Homo sapiens
tgcatgtatatttttctagaatccatacctttttattgaattctcaaaggattctttaacactcaaacgataaagttacactgatatgaagcctcccttgatccttccattttctccaggcccttttcatattctttcttgtttaaagagttgatgatgtacttcgatgccagctgctctggccttctttgtgctctgcaagaacactaagcccattcccagctcaggccttttgcattagctgttccctctgcctagagtgtcctttcctcagaggctcccatggatggttttctttttttttgttaacctcagttttcagtttaaatgtcaccttctcatagaggcctgccctgattccacaaaatagtcactttctagcatattctcctgtttcatttctaacactatcatcatctggttttctttctttattgcatatttttgtctggcagtaagtgaactccataaaaatgggaatcattcatcttgctcaccatgttatccccactgcctagaatagtgcctggcgtatagcagacactcaaaatggtttctgaaataaatcgataaatgcttgttttctttatccgtctgaaaatggtttcctatgtgttccccccttatgtcatctttatarcgctataaaatttatatataattataaacaatccaagcatataaaaaaagcttaggtaataacagatacctatgtactcatctcaaagatgaaacagatgttaacattttgcttcaattatttcaaattttgcctgtgcttcttttaaatttttgctaaaaatttcataccccatattttgctctgcgcttccttctcagcagtaactgctatcttaaagaaagaaatgtcatttctttatatgttttagtagtttaatgatatgtgcttatatttataaataatgcatgctattttttgtatgttctgagattttatataaatgcttgcatgctgtagatatcttttggtaatttggtcctgggtattttacattgttgttgagccacaggattaaacaactctggagccattctacctgtgggcttattgttatatgagaaaataaaattccttgttatttaagccacatgaatttggtttgtttttatgtacagggaagcctcctaactgcgataatctaactctatttaaacattcctcgttgttgagtccttaggctcaataatatctatattaaatgtggctgggctggcagttttcatttggctgcatgtctactgatatatagacagttttagtttctcctttaacccatgttgcccaatccagaaaccttttgtatttgtattttatttctgtgtgctatggtctgattgtttatgatttcccccaatttatatatttaacactaatccccactgttacaatgtttggaggtggagcctttgggtgatggttaagtcatgagggtggagccctcatgaattggattggtagatgcgtatggggctgtcctagtacaatcaggctgctataagaaaaatacaatttatagacaatagaaatttattgctcacaattctggaggctgggaagtccaagcccatagtgtcagcagactcagtgtctggtgagggctcactctctgcttcatagatggtgccttcttgct

SEQ ID NO: 75424 - DNA, 1184 bp, Homo sapiens
gatagatagatagatagatagatagattgtagaaagctccatgtttttagggatgcatttttagcaagtacattataagagatagtattagaactaacttttcactttcagataattctcaagaaataataggtctggttggaaaagccatggactagtgtgacaggtctaaggggataaaagagtaatataagatgacaacagaataggcagaaccggaccacacttggacacagagagctctccaagctgattttgagctgtgtcatacctatggcagaggcagtattggttcccatgggctaccctccaatctttcctcttgtcaacttggcaagcctgggacctcttctgaaaacctcagctctaacaactcctaaagtgtctcagtgtaacaggtaaggaaactgacaaaagcagggacaagggcacactgtccctgttgagcccmtcagttggtttagcaaccagggagaggccactccctggcttagctctttcatccataagctaggatccctggtgcctctcccagttctttctgcaacctgctatagcatcaggaggagggagggactcaagccatctttctgcaactcaatgctcatatttctggcttgttatcacagtgatgtatccttagggacagtgagtcacatcctagaagtagctggcatccttggagccatccctgactttctctctcccagcagggtgggagaagagcacctctccttccaaggcatggaggcaagaaagtcttccccttctcaatcctctgttatggctaagctttacacactagagttcaggtgtgcaaaaccagaaaggagcttcttttattttagtaatggattgtcttctgctctgaagcccccatagaagtagggggaaaaacacaaataaaaatagacatgccaataaaagagaacccagtctcttccagttcaaaatagttccctttgggcaaatattctgaagtggttcctaccaagtctgtttctctcttttcaagaagttgctttctactctttttcaagatggcacctgaagtggagggaagcagagccttaaatatcctcacagcagagaggaggagttctgcacctgcgtgtggtcctctgggctgctgttctctgggccccagcttctggccttaatagccttccttgcctcaatgtgaa

SEQ ID NO: 75425 - DNA, 768 bp, Homo sapiens
ggtagctcatcctatgccatggtgaagagctaactaaacagtgcctttggtccctgtaatgaaaggctctcttagaatgaaatgcctattcaaggcgaggttttggggaaaccaagttgccaccgtcattgaaaagatgaaagactgtagggatgcacctgatgtttggagggcaccgaatagctgaaaaaaaaaaaaaaaaaaaaaaaaaaaagaaataggctgggcgcagtagctcacgcctgtaatcccagcactttgggaggccgaggcaggcagatcacgaggtcaggagatcgagaccatcctggctaacacggtgaaaccctgtctctactaaaaatacacaaaataggctgggcgtggtggcgggcacctgtagtcccagctactcaggaggctaaggcaggagaatggtgtgaacccaagaggcggagcttgcagtgagccaagatgcgccactgcactycagcctgggtgacaaagcgagactccgtctcaaaaaataataataataataataaaagataaatgataagttaatcttcttaaattattgattatggcaaagactgagttcctggaactctcacaatcctaacagagtctcaattctctctaattctttcaactttcatgtaggtgaaaatcaaactccaagtttgatattatgattgccaaattatactatcagttgattttagagtcttgccggtccttgtatgagaaagtgagagacagcaatgctcagaaaactataggactgga

SEQ ID NO: 75426 - DNA, 768 bp, Homo sapiens
ggtagctcatcctatgccatggtgaagagctaactaaacagtgcctttggtccctgtaatgaaaggctctcttagaatgaaatgcctattcaaggcgaggttttggggaaaccaagttgccaccgtcattgaaaagatgaaagactgtagggatgcacctgatgtttggagggcaccgaatagctgaaaaaaaaaaaaaaaaaaaaaaaaaaaagaaataggctgggcgcagtagctcacgcctgtaatcccagcactttgggaggccgaggcaggcagatcacgaggtcaggagatcgagaccatcctggctaacacggtgaaaccctgtctctactaaaaatacacaaaataggctgggcgtggtggcgggcacctgtagtcccagctactcaggaggctaaggcaggagaatggtgtgaacccaagaggcggagcttgcagtgagccaagatgcgccactgcactccagcctgggtgacaaagcgagactccrtctcaaaaaataataataataataataaaagataaatgataagttaatcttcttaaattattgattatggcaaagactgagttcctggaactctcacaatcctaacagagtctcaattctctctaattctttcaactttcatgtaggtgaaaatcaaactccaagtttgatattatgattgccaaattatactatcagttgattttagagtcttgccggtccttgtatgagaaagtgagagacagcaatgctcagaaaactataggactgga

SEQ ID NO: 75427 - DNA, 1033 bp, Homo sapiens
ggacaaagccttgccctgttgccgatgctggagtgcagtggcgcaatctcggctcactgcaacctccacctcctgggttcaggcgattctcctgcctcagcctcctgagtagctaagactacaggcgtgcatcaccatgcccagctaatttttttttcttttattttactttaagttctggggtacatatgcagaatgtgccggtttgttacayaggtatacatgtgccacggtggtttgctacccagctcattttttgtatttttagtagagatggggtttcaccatgttggccaggctggtctcgaactcctgacctcaagtgatccgcccaccttggcctcccaaagtgctgggattacaagtgtgagccactgtgccctgccaaaaaattacatttaaaaagaaacaaccaatgtattaatagacagatatgagctacaaagagaaatactgggaatgaagaagtagtcattgaaattaaaaaatctactagatgagagttctagactggacagagtcatagagataattagtgatgtttgatacttgttttgaataattcactcagaatatatcacagcaatggaacagaatagagagcctagaaataatgctgcacacctacaaccatctgatctttcacaaagctgacaaaaacaagcaatggggaaaggacttcctattcagtagatggtgctggcataactggctagccatatgcagaagattgaaactggaccacttcctcacaccatatacaaaaatcaactcatgatggattaaagacttaaatgtaaaactcaaaagcataaaaacccttgaaggtcacctaaaaaatatcactctggtcattctggacagaggacctagcaaggatttcatgataaagatgccaaaagtacttgcaacaaaaataaaaataaaaaaaagggacctaattaaactaaagagcttctgcatagcaaaagaaactatcaatagaataaaaatacaatccacagaatgagaaaaaaaatttgcaaactatgca

SEQ ID NO: 75428 - DNA, 1033 bp, Homo sapiens
ggacaaagccttgccctgttgccgatgctggagtgcagtggcgcaatctcggctcactgcaacctccacctcctgggttcaggcgattctcctgcctcagcctcctgagtagctaagactacaggcgtgcatcaccatgcccagctaatttttttttcttttattttactttaagttctggggtacatatgcagaatgtgccggtttgttacacaggtatacatgtgccacggtggtttgctacccagctcattttttgtatttttagtagagatggggtttcaccatgttggccaggctggtctcgaactcctgacctcaagtgatcygcccaccttggcctcccaaagtgctgggattacaagtgtgagccactgtgccctgccaaaaaattacatttaaaaagaaacaaccaatgtattaatagacagatatgagctacaaagagaaatactgggaatgaagaagtagtcattgaaattaaaaaatctactagatgagagttctagactggacagagtcatagagataattagtgatgtttgatacttgttttgaataattcactcagaatatatcacagcaatggaacagaatagagagcctagaaataatgctgcacacctacaaccatctgatctttcacaaagctgacaaaaacaagcaatggggaaaggacttcctattcagtagatggtgctggcataactggctagccatatgcagaagattgaaactggaccacttcctcacaccatatacaaaaatcaactcatgatggattaaagacttaaatgtaaaactcaaaagcataaaaacccttgaaggtcacctaaaaaatatcactctggtcattctggacagaggacctagcaaggatttcatgataaagatgccaaaagtacttgcaacaaaaataaaaataaaaaaaagggacctaattaaactaaagagcttctgcatagcaaaagaaactatcaatagaataaaaatacaatccacagaatgagaaaaaaaatttgcaaactatgca

SEQ ID NO: 75429 - DNA, 746 bp, Homo sapiens
tctgcagagcctggtcagtggtacttatagtctaagtctcacaggttccaaggggggkgggtagatctgagaaacagagggccagctgagagaactcttgtcttcctaactctttcactccatcaccctgagactttctctctctctgtctagagttgaccaaaaagtgcagcatcatctttggttgtcctgtgtaccccctagagccacagggaggtaaaaaataaactgctctctgctcttctttcctgccccagattctctagccaagtcagacttctcccagctcaagtggagaattactctgtatcagctgactccctgaaagtcagctgactaaatggtgttctatcctcattttaaagcagcctagaaaaaattgaatttatggagaatctctctgagtcagtgctcagaaaaacctctacatgtcagtctatttaatttttttttgttttgtttttgtttgtttgtttctttgagacggcatctccctctgccacccaggctgcagtgcagtggcacgatcttggctcactgcaacctctgcttcccgggttcaagcgattctcctgcctcagccttctaagtagctgggattacaggtgcctcccaccatgcctggctaatttttgtatttttagtagagatggggtttcaccatgttggccattgtttgccaggctggtcttgaactcctgacctcaggtgatccacctgccttggcctcccaaagtgctgggatt

SEQ ID NO: 75430 - DNA, 1174 bp, Homo sapiens
ttttggaggaccacccctgcaatctcccaaattagccagaatgacagattcacacatggagcagttatgtttggcatactttttctgtaaggtcctctagtcactattaaagatgatcacccctactggtttcccctccagactcctgagaatcactgagagaggtggttgtggctcaaccccatactaggccatttaaaacaaggttatttggccaggtgcagtggctcatgcctataatcccagcaatttgggaggctgaggtgggcagatcacctgaggtcaggagttcgagaccagcctggccaacatggtgaaaccccatctctactaaaaaatacaaaaattagccgggcatggtggcaggtgcctgtaatcccagctacttgggaggcagaggcaggagaatcgtttgaacctggaaggtggaggttgcaatgagctgagattgcaccactgtactctagcctgggtgacagagcgagactccatctcaaaaccaaaaaaaccaaaaaaccaaggttattaaagaggttaatcggacctccttagcactctggagtgggcaaaaagaaaaaaaagaggttaattagtagcatataatcaataatgcattaaatcagtagatgaaccatggaaactgaaaattccctgtgccaccaaagtccctttcttttgaatgcccttcaccttgcttatggctgatgatgaggtcagaagtctttctactggggcttctgtctacagcctccaccaggtgcctctgatccatttttgcctctagcgcttgacttggacctcagctgtggattctgcttctacttgtgccacctcagacgcatcctcaattgagttttcagctacttaaaaagtttgaaactcacagcctacatgcagaacattcaaactcttaacctacaggaagtccaaaatctgcacgtcagttcccttggtatagatgcccttttcatctccggatccaatatattaaccctagctatcaagtttttttccaggaaatgaaaccaacttctgggttggtgcctttgaaagatccttaaacataatcacatgtgcgaagacctttttcccaaayaaggcaacatttgcaagttccaaggatatctttgaatggccattacccagctgactacagctgctatcattggctgag

SEQ ID NO: 75431 - DNA, 689 bp, Homo sapiens
tgattaaccagagtttccaagatgaactcaaagtactggaaaaaatgttctgttaatacttttcatgagmtagttattaccatcatatactgaaatagatacaaactcatgggaaagccttgttctgtgtgatccaataataaaatcaattagcactgctacttaattatcagcatgtcagacagatgagcataccaaacagagtgttgatgggcagaagaaactgaattggaaacaacacccggggctgctgagatgtttaggcctcttagctttagggcagcctgcccccttcagtggcttgcctcctccactcaccctctacctttgcattgcaggttctttttttttttttaattttattattattgtacttcaagttttagggtacatgtgcacaatgtgcaggttagttacatatgtatacatgtgccatgctggtgtgctgcacccattaactcgtcatttagcattaggtatacctcctaatgctatccctccccactccccccaacccacaacagtccccagagtgtgatgttccccttcctgtgtccatgtgttctcattgttcaattcccacctatgagtgagaacatgcggtgtttgtttttttgtccttgcattgcaggttcttgatgatgggaaaggagtctgtgaatttgggctagcagaaaggattttgcttg

SEQ ID NO: 75432 - DNA, 689 bp, Homo sapiens
tgattaaccagagtttccaagatgaactcaaagtactggaaaaaatgttctgttaatacttttcatgagctagttattaccatcatatactgaaatagatacaaactcatgggaaagccttgttctgtgtgatccaataataaaatcaattagcactgctacttaattatcagcatgtcagacagatgagcataccaaacagagkgttgatgggcagaagaaactgaattggaaacaacacccggggctgctgagatgtttaggcctcttagctttagggcagcctgcccccttcagtggcttgcctcctccactcaccctctacctttgcattgcaggttctttttttttttttaattttattattattgtacttcaagttttagggtacatgtgcacaatgtgcaggttagttacatatgtatacatgtgccatgctggtgtgctgcacccattaactcgtcatttagcattaggtatacctcctaatgctatccctccccactccccccaacccacaacagtccccagagtgtgatgttccccttcctgtgtccatgtgttctcattgttcaattcccacctatgagtgagaacatgcggtgtttgtttttttgtccttgcattgcaggttcttgatgatgggaaaggagtctgtgaatttgggctagcagaaaggattttgcttg

SEQ ID NO: 75433 - DNA, 689 bp, Homo sapiens
tgattaaccagagtttccaagatgaactcaaagtactggaaaaaatgttctgttaatacttttcatgagctagttattaccatcatatactgaaatagatacaaactcatgggaaagccttgttctgtgtgatccaataataaaatcaattagcactgctacttaattatcagcatgtcagacagatgagcataccaaacagagtgttgatgggcagaagaaactgaattggaaacaacacmcggggctgctgagatgtttaggcctcttagctttagggcagcctgcccccttcagtggcttgcctcctccactcaccctctacctttgcattgcaggttctttttttttttttaattttattattattgtacttcaagttttagggtacatgtgcacaatgtgcaggttagttacatatgtatacatgtgccatgctggtgtgctgcacccattaactcgtcatttagcattaggtatacctcctaatgctatccctccccactccccccaacccacaacagtccccagagtgtgatgttccccttcctgtgtccatgtgttctcattgttcaattcccacctatgagtgagaacatgcggtgtttgtttttttgtccttgcattgcaggttcttgatgatgggaaaggagtctgtgaatttgggctagcagaaaggattttgcttg

SEQ ID NO: 75434 - DNA, 2429 bp, Homo sapiens
cattgaatggggtaaatcaggaatgaggaacgtgatgagatttgtaaccacttttgtacctttagaaaaatttttcagtatccattcaaaaccaaatttttattaaactccctcggcttataccacaaggcacatactaaaaaaaaaatttaaactctctaccaaaaataccaaaagaagcaaaccaactattctctcatgattcaagcttaaaatttcagaaaagcttatactcattaactttagctgagaaatctctagaaaaatctcataaaacacatttttcatcaagtggggtcttgagatacttccaaagccaaattagcttcttcaaacagaaaaatagcttcaggttcctcccaaataacctcatacaggggaatactgtggcccattcaagtctggtatgttatcagcccaaaccacttcactctctctgcaagccaccaaggtgccaggcaaatcatccggatttacttttccaggcactttagcttcatctttggaatgttgctagtaaacctacttctatttaacctcagtctgtgaggatcctgagtctcaagtgctgataatcctgtgtgcatcaggtgtttggatgattctgtagatctttggtgaagtctctgaaataacgtctgatgacaataacagaggaacgtcattctcccatacatagcttttttactagggggagggacctcaggggggaaaaaagaaaagacggctaactttttttttttaataaaatatggaacacttcactaatttgtgttgtcatccttgctcagggccatgattatcttccccatatcattccaatttttagtatatgtgctgctgaagtgagcacgatgtccaaacttggtattttataaccttgctgttgggccacaaatcttaagaaaacagtacgtttctttatgcaatgaagaattttggtctaccaatccatttttaataagtactgtctacgtggtagaactggctcaggcattttaccaatgttagtaacttttggcatggatttatacattcacatataaagattattaaaataatatttaggtatttggggaaattggtttaaaaaataaatttttcatagtgaggccccatctctaaaaaaaataaattaaccggtgtggtgggccacacccatagtcccacctactcagaagccaagaggatcacttgggccccagagttcaaggctgcactgagctatgatggtaccactgcactccagagcatgggcaacagagcaagaccgtctcttaaaaaaaaaaattcctatatatggatgaagagtggtaaatcttcccacccctttccctcaccctcccaggttcccttacctgagatgtcattactctttacatattctttgagatattttatgaatctgcaaagaccttttttgtttttactatttgctttaatacaggtttaaaaagctcccatttcttcactttcatgcagtgtcatcccataaactgactatgacactggttgtgatggtgctgccgtggccagaggcaattgaagaggtcaccttctacagtgcttggaagagtctcaagctcacagggaagaactaataaattattctaaaatgcattaattagaactctagatccatcaatattttgagaataacacacttcagccttatctgaaagtacattcacattgcatcacagcgattcttaactttctgcagggtggaggagggcctaacactgcctttgagaaactaaggaaaacttactggaaaacacacacacacacacacacacacacacacactctctctctctcctatacactcccagtagatcacagacatggttgcctatggacatcaggttattaatacctaatctccctaacaagccaagatcaagacatctgctgaagaggttgtaacaaggtaagtataagaacagaagagatgatagcataatcaattagatgttaggaaaagttcattgcttgtctgaaaaataaaaaagagtagacggctgctgaaacactgtcattttaaatctcaaggtaaaattatttaagaatctgattatgtacaactcaatgaccagtgaagctaaatacaaaacaaaataatacatgctctctgaatttcatccagatagacgactgctcttttatgattactataatctatatgcttatagaaataaaatacaggtaacttaattatgatcccttttagcagcatggcccgtcaattgagaaaaaaattagaacgagataaaagaaaaatatacttcattgaagaataatcaaaacaaagataatgtgcaaattaactgaaaattaacacacragccctggggaaacagagtttcctcagcagccaactgagttgctgatggtttctcttctagtcctaggacaaagatgatact

SEQ ID NO: 75435 - DNA, 830 bp, Homo sapiens
agacaccaccaccaacatcctctgctgattccacgtacctaccattgcccaggccgtgaagaagcgtttgggaggaagggaaacctgaaagagtcacaggaccacagacctgagggtttagaatctcaaggggggtataggccagataaacaaataaatacagataacttagaacaagaaggaaagtcatcagttaggtactgaaaagttctccccaagttcaaaagagggaggatgagtcttgctggagaaagtggcttttgaatggaacttggaagggtggcttggatctggacctggaggaagaaaaggccttctcagaaaagggattgattaagggaaagcatgaaattgtaacacatgggtgaggatggaattcatggaattcctgcaccctcaggtacatgargagcagtgagggaaatcaggctggaggatgggtgggatgggctggggaatgtaatgggtaaaagaaagagccattcagtctagggatttgggtctttcatgggggaaaggggaggatcagctgacagttactgagctgaaagtggacagagctggttcaggagctaatcattgtagtgggatcttggggccagggaacattcccctttctacactctcttccctaaaaagattggttcaaaaatcccacagaactcttgagtgttagccatttgctttaaatcctaccatgtcataccttgtcctttaggattatgcatttgtgatagaggagggcatgggagaatgaaacacgtgtggccgtttctctattactcagacctcagggcaaacaagtacatcggaacttttctgaagggtgg

SEQ ID NO: 75436 - DNA, 538 bp, Homo sapiens
caggttgagacattcctccatcccttctaaagagaggacaactggacactgttttcagggtcattctaatctgtccaaaaggcaaacaggaaggaaggaccttggcttcaagtctgtgtttgtgtggttgttttttttgggsgggggcgggggggacggagtttcactcttgttgtccaggctggagtgcaagtggcgtgatctcggctcactacaacctccacctcccgggttcaagcaattcttgtgcctcagcttcctgagtagctgggattataggaatgagccaccacacctggctaatttttgtatttttagtagagacagggttccaccatgttggtcaggctggtcactaactcctgacctcaggtgatccaccctcctcggcctcccaaagtgctgggattacaggtgtgagccaccgcgcccagcccagtctattttcttatccaagtgggaaatcttgaaatccttgctccaagtttcttttcctccacctcttaacaaaactctccacattaaaaaaaaaaaaaaa

SEQ ID NO: 75437 - DNA, 538 bp, Homo sapiens
caggttgagacattcctccatcccttctaaagagaggacaactggacactgttttcagggtcattctaatctgtccaaaaggcaaacaggaaggaaggaccttggcttcaagtctgtgtttgtgtggttgttttttttgggcgggggcgggggggacggagtttcactcttgttgtccaggctggagtgcaagtggcgtgatctcggctcactrcaacctccacctcccgggttcaagcaattcttgtgcctcagcttcctgagtagctgggattataggaatgagccaccacacctggctaatttttgtatttttagtagagacagggttccaccatgttggtcaggctggtcactaactcctgacctcaggtgatccaccctcctcggcctcccaaagtgctgggattacaggtgtgagccaccgcgcccagcccagtctattttcttatccaagtgggaaatcttgaaatccttgctccaagtttcttttcctccacctcttaacaaaactctccacattaaaaaaaaaaaaaaa

SEQ ID NO: 75438 - DNA, 2470 bp, Homo sapiens
ctaagtgctctaattatgtttgggaaaaaaaaggatagcctgcaacttttgaaatctgctttagcattgggcagctgtaaaagaacaacacactaaagagatctatcttctctttattcttttctgtagtctgaaaatattatgcagaagcaagatgggatgtctggaatgacaatagatcattttctttcaacagtgaatctacatgcacaaatccctgaaatagtacttctaatttgacaaagactcctccttagtagtggtgactggtagccatgcctgttagtttattgaacataagcatgcaagctctccgtttcatgtgagtgaggacaccacttctcaaactaatgagtgaaaagtaattggtcattatccattagaattcaattattctaaggtggaacatcagaagcaactagaatggacagggttagatcctggatatcacatagggataatgacatatctgttatcattgacttccagttgaagccatgccattgacaggcagagcccctcagcaggtgccagggtatggtcatttccaggttttgttaggaacaccttttcagaagaaatctgttactagaggttgatatattatcttgtttcaaagtggtgtatttaatttctgaattaaaaagtaaggccaggctgggtgcagtggctcatgcctgtaatcccagcacctggaggctgaggcaggaggattgcttcagctaatgggtttgagatcagcctgatcaacatagtgagaacttgtctcttactaaaaatmaaacaaataaaaaaaaaatcagcagggagtggtggtgtgtgtctgtggtcccatgtgccagctactctgaggccaaggcagaaggatcacttgaacccaggaatttgaggctgcagtgagctatgatcgtgccactgcactccatcctgggtgacagcaagacccacagaccctgtctcaaaagtaaataagtaaaaataaaaaataaatgaggacagagattcaaagctggagacaattcatgtgatcaatgagcaaaatagtgcattgcatttctcttatttgctcagtttggtcataagtttagggaaataaacctttgtttatactgtaaggataattttaagatgcataaaatatattctttacacagcatttataaggaaaacaatatttaagattgagacatctcattaatatcctgaaaaaatatttaaaagtcaagatactgaaattattttgaggaatgaaaatatatcaaagtgtcagcaaataaaaagagtgaatgaaactataaaatacttgttagttttaaatttatttgaccttgtgcttattgaaagtatgcaagtggacattttgtgaatagttaaatgataagtattatggggaaacaaggcaatggaagaccactcttctcatgatgaatttatattataataattaaacaagtcaacaatataagaatgatcctgaggcaaaaagattcattcaatatttattataattgaaatatatctgcattgtatggataaagttcctgtcatacagaaagtttcaatgctttattgaggctacacagctaaatggaagtacagtcataagtagaacccaggtctctggacatgaagttcagggataattttttactcaaggatctgcacatgaaagtaaatagcgtggtaataatgttttattaagcatggtagagattcaaaaatgagaaaaaaatttagtgtcagtatccccaaagtctttctggaaattatacaattgaagataggtcttgaagggtggttgaatatagagacagaggacttggggaggtgaaataggctaagaaaagcaacaatttaaattttgggtttgaataccagtgattagagagttagcatgactcaagtgttaatataaataaataagtgtggaaactaagtttcaaagactgtgtattataaggaaaacaaacttcacataataaattacaaagggggttttggaagagagaagtgtattagtgttctaccctgtaactatagttttgaaaaccacagtttaaaaatgttatgcaaaaataataaaaagcaaatagatgaagaagtgattgcagttttgatatgagaactgacatatttattgttggttgggggcaattaaaagatacatatgtatatgtataaaagatatgatagactcactgaatttcatacttaaggacatttatttcaactaactaaacattgcccaaatctcttctacaatacagatctagtatttggttttctggtgcatgtttgaaaaccccaagaccactacattagtattttcttccagtagccaactcagtttttgaatatttctggctcttgaaaaaagttttccttattcaggtctaaaattgtagttcagtgcttagagtgttttctaattttctttttcaacctgtatacttatattttcttcaaccat

SEQ ID NO: 75439 - DNA, 783 bp, Homo sapiens
cctcaaatgaaaaagactaataagtcggggctaaagaactctgggaaggaagtatatggaagatcctataggagtgggcacaacrcatgcagataagtgtaactagtattaatttctaccagagagaacccatctccagggagcatctcttcaacaaggtagacaggatgactattgcaatgcttgcacaatgagcacatgaccagggtggtcatagcagaaggattaaggctatgcatgaggctaatgacatgtattcatgtattcgtcttcaccaaggctgatctattgctaccattgctgaatgtccagtctgagagcagtgcatatccattgcagagtcttccatgtgacactacttttcgggagtttaagcagcctcttggtgacagagctatgaaataagaccccttccaccagaaagggaataaggattgtccttatcagaacaaatgcacattctggatatgagtttgcctttttttgcacagtttttcaatcaacaccatcatttaagggcttaaaaaatgcctgatatctcaacagagcatttcatgtgggattgctttagaacaaggagcctgctttatcacaaaggaggtatgttgatgcataggtaatcacaagattcgtggggcttactactagtattctactacactgatagaatgaagactcagttaaggagccagctcagagaaaaaatcccagggtgttgtcttctagtgtacactatatgcactgaagcataggtctgggaggtaaggagtagaagtgggatcc

SEQ ID NO: 75440 - DNA, 783 bp, Homo sapiens
cctcaaatgaaaaagactaataagtcggggctaaagaactctgggaaggaagtatatggaagatcctataggagtgggcacaacacatgcagataagtgtaactagtattaatttctaccagagagaacccatctccagggagcatctcttcaacaaggtagacaggatgactattgcaatgcttgcacaatgagcacatgaccagggtggtcatagcagaaggattaaggctatgcatgaggctaatgacatgtattcatgtattcgtcttcaccaaggctgatctattgctaccattgctgaatgtccagtctgagagcagtgcatatccattgcagagtcttccatgtgacactacttttcgggagtttaagcagcctcttggtgacagagctatgaaataagaccccttccaccagaaaggraataaggattgtccttatcagaacaaatgcacattctggatatgagtttgcctttttttgcacagtttttcaatcaacaccatcatttaagggcttaaaaaatgcctgatatctcaacagagcatttcatgtgggattgctttagaacaaggagcctgctttatcacaaaggaggtatgttgatgcataggtaatcacaagattcgtggggcttactactagtattctactacactgatagaatgaagactcagttaaggagccagctcagagaaaaaatcccagggtgttgtcttctagtgtacactatatgcactgaagcataggtctgggaggtaaggagtagaagtgggatcc

SEQ ID NO: 75441 - DNA, 562 bp, Homo sapiens
tttccacatggaaagcagtcagggttgaattgcatctagtgagccatacattayatattatagttgcaattgataaacctcctagaaaattcaaaatgtttatcttttagaaattcagcctcctgtgcacactcctacacacagttttctatttgcaatgcttcctttttgcttccttctgcaggagatttggaactgaagttatgtcttcttttgcaatgagatgcagttttggttttcacggggcaatccatcaatgagttttttcatgacttaaagcaatgaaaaaaaatcttgtagctaaatactgtgagcatcccaagatcttccccttgaacttcctgtttagaaacaatgtagtaattactaattgtaattacatcccgaatctctgcaaccagctgtctgtgcttttcgttgttcaaggagcaggtgaaatcaatactaatttttggaatttacacaagtcacctgggaaaatttggtgtgattattctccatgacagtttgctttacctaggtattcattttcagaaaatgaatttttctatatgactttgtt

SEQ ID NO: 75442 - DNA, 1433 bp, Homo sapiens
aaaggagtaatacaagtgtaaaacattgaaacgatggtagctaatgaggtcgcagagataaaggagggaaacttcgaaatttaaatgagaaatgcaggaggtagctggaaatatttggaggagattattagaatcgtgagcttgcttgagaatcaacaatacttaaatattaaatgactatgaaaaaccaatctcagtttgtgtttttcattgaggtattcaggtgattaaatgcactgtgtaagccactgtgggtcatccgtttttttaggtggcactgtctagcaataataaatgtactgaaatatgtaacagacktggagttcacaaatgaaatggggtagaaactatatttagaattttcttctatgaagaatgttttactactcctggatttagatatttgatattttctatttaattatggaaatctctagtgaatttgagacagtgaccagagtcgggcgatatgcagattttgtctggtaatgattgattgcatacggaatcatgctttagtgaccatgatttaggtaccgatataatatctgtgaataaataccaaagctgaagaagagtcattctgctaattaaaagctaaaagcatgcagttaggagtaaaatttaaggctaaatcagccttgaaataggttttgaaggtatatggtggtaggttacaaaatttggcatctctaagtaaatgccattagatgataagaacatagctcaaattaaagtcttgcaacaaacagttattcaaacagagcttgaccatggtcaactctgtccattactcaggctcattcattggcattctgtgtaagttgtggtaacttacctgccagttgatgatgaaagcgctgtttatcttaaagtatctaaaaccgtgccgatcaaactacacttcagggactctgtgattacaatggatattctcagcttcctcctagtccacaatcaggcaatttatttatttatttgaaatttagcagctggtagccttgatttgccagggaggcaaataggcaaaagaaaagtttccagaaataatcgcagttgggcattcctgaagggatgggactcaacgttcagagtcagggcccagggaacagaagggttcctatcgtgtctgttgctctttgcacccagagaggatgtcatgcatcccacaaaacagggcaggcaagttcacatatgcaaacagactcatgaatacttattttaaaatttgaccacttgtgttttgagacagagaggagtccatgtctgttcgatctaaaatcccagtgaaaatccttgtttggttttgtgcctcccattttgaagtgtttgtccttatacaaaattcaaaaaaaagaaaaagatgtagactgtgaagagccttaggttttgggcattcccagagttcttgtggtttcacatgtgcacacctt

SEQ ID NO: 75443 - DNA, 1956 bp, Homo sapiens
tccaattttcattaccacaactttcacatctgtgaattttatcctacttgtaagctaacagaccctaccagttgaattcaggtactttttctcccctatgggcacccamaccaagcagtttaagataggtatgttggagatcacagccaagaaatgatgttatttccacagccagaagtgtgagaggtggtggaaggaggaggtggaagaggctagcctgcaggagacagttgttactaggaagtaatcccactttgactccttgccccagaacagtgttgcctcttccttcaaatacctgttggctctgacaagcacccccagggctcagggctccttttttttcgctgctctcctgcatgctattgtagatctgccccatggtatttggcatttttgaccacctctatgtgcagatttccctgtccccatggggccaaggaggatagtgatttggatgcctatattgaacggagctgtaaaaggggcattcctcccttccccaaagatggggagctttttttccttaaagctgtagagagagagggatcagaagttctagagtaggttgataaaactgtcgaaggtgacccactggagacactgttgggagaggcaatctgccaggaacgctgagtgttcctgcatgtattttcttccttcatatgaatttaaggccgtgaccattcttcttgggctgtacctcagtgttctgttggcagtaagctaccttgaaatgagcaggtttacctattgctcactgtaagttttaagcactccacccccactaccaaacttggggtctgcatgtgtaggcattcatctaggactaccttgtggcacttttgggggtgtaggccataaggagaacggctttgtgtcagtcagcaaggccatgtatttactttcaattcaagtggctacctacttggactcaacaaacagctaatgtttttagttcaaagttctatatccttatcactgccatcatttatttcatctttgggaaatcattcatcagccatggccatactgcctttcagctggagccatgagcttgctgcctcattgtcaaaacatcttttctgcctcctgcctagagactgagcaacaacctaagtacaatctgggcagcatgtttcaatcctacctcttgctccttagcctcaaaatattctcaggtaggactctttcttcaggtaggacttttctcaggactctttcctcctccctcacttgggaatatctgacttgctaccagatcccagcaaatttcttttatcccctaatccagcccatgaaaggcctttgtcctttctcttctagaaaaccatgttggtcaggatccaattttcattactaaaattttcacatctgtgaattttatcctacttgtaagctaacaagttagcctgcgatgctttcatggatgttgccagaagacatgagattcctgggtcagagacaaataactttattacttatggtatagccagcaacatgagcatgatgtttgcaccagctgcccatggcctacacccccaagtgccacagggtaggcctagatggatgactacatatgcagacccccagcttgtgaggggaggggtgctcaaaacttttacagtgagcaacaggcaaatttgctcatttcaaggtagcttactgctaacagaacactgaggtacagcccaagaagaatggtcagtcttacattcacatgaggcaagaatatacatgcaggaacattcagggctcatggcagattgcctctcccaagtttctctttctccagtgggtcacctttgacagtattaaccaactctgtggcactaagagcctgacaactactcaatcctcatcaattgcttcccagaacagtttgtcacagagaaatccctctgaaagggctaatgatcttttatggcagccaagaaaaatctgagacttttcctg

SEQ ID NO: 75444 - DNA, 899 bp, Homo sapiens
tgaaagaataaatgactgcttgaggaaatgaaagtgtacaatcaatctttttacaaatctgtctaatggttatttgcaaaagaagtgaaaatgctgaaacacttttggtttttaaggacacagtaagtagaaaatatgcctaaggatccaaataagtattggtctgaccacagtgagttaatgacataactgtacttcttcatttaagatttcctttaattgttgctaactttatttgttagtattactttaatctgtgattcttgtactttagctaacaccagagttgcctgcagggcttgtcaaaatacagattactgctgggccccacttgcagaatttctgatttgggcctggggtggggctcaaaaatgtgcatttgaaataaattcctgggtaatattgatgtttctggtccagagaccacactttctcamagtgtgattctcacatctgactgaaacgatctttattcatatatggctccccacccacacgttcctaactctaacacctccttaaaatatttcatgaaattctaggtaattcatcccctggtaaaatacttaataccatagtcgtttatagttgaattccatttatcattaacaaatgtacaactaaaaataaataaatgtaaatcagaagcgattcagtggataatgtcacatgatcaaaatgtaaaattgtttcaaaccataggcctttttaccaaatcaataactcaaaatgatttactatgtatatttaatacaaatcagtccacttcaataaatagaattaaattatgccttttcagataagcaaaaatatcgtatagcattattgtatctaaagtgatttcaccttcggggtaggggcagagaaggcaccaggatctccgaagggagaatatctaa

SEQ ID NO: 75445 - DNA, 988 bp, Homo sapiens
tgttatttctagtcctggaactcacccctgtcaaactaatctagtgtctcccaaactctctcctgctgtgacacatttgataatttaggcctctcgtatcacaaagaaatatctaaggtcgtagtgtgctggtaaatattgaacaacgagctccctggaggggaaaaaaaaaagccctgatttgtagtattcaccaatatctatggtgtaaatgctcccactgtgccaattcaaagctaccaaaaacaaaatcacagaacagagttcaaaagaaaactataatcagctttggtgatccttaactggctccagcacagcagtacgagatgatttaggggcatccaccactcccaccattcactcctttcttgttccctgttttttctgtcttttcttcctttctatgattgtcttccacaacttcttttcctttccccatgtgtctgtcaattcttgggactatygactactcagaaaccccaccaacttttctaagccctgctcaagtcccaagtaataaaatttgatctctacaaataatacacaccaccaagatagtactgaactattaccactgaatgagttaagagtttattctgtggcctcatataaaacttgctaggtattaaaaccaaagaatctctggccatgaagttggtatgtaaaatgagccaataattgccactcaatgccttttatttgcacaaagggattataaaattttcctgataaagcaggagaaagcagtaatggtagagcaaagagacctgggatgaaattagctcttcaagccccaggctgggattaaattttcattgtaaaattttttatgcatattccatccctttgaattctaaatgaattagaagtgtctcctatagataggattatttctgggacagatatcaggccataccacattctaaaggattattcctcccaccaaatataacctcttctcagcactcctccaaaagtctttgtaatt

SEQ ID NO: 75446 - DNA, 1134 bp, Homo sapiens
aggtataaagagctaaatttaccactttaacagctgggattttacaagttgacttttcacaaggtgtttttgtggtttcttaaaatgtgttaggctctcttcttttttcttctcctgagattttaaaaatttaacatcaaatttaaacataaaaaggctgatgtggtaaagaccattactgcagaattactttacactggcaaactcaaatcatgggcagtgaattcgagcttgcattagtgtracatcaaatcacctcctttgtgaaatagtgtttaaataatgtaatcagaagccaaatcggccacctgaaggccctgctgaaatcgcacaagtgggtgtttctctccatacctgattagagggaattcactttgaagtcggtgggaactgagaactggggccagccccacagtgacctggggatctaagcagcaccactcctaccactactcatggtatgggatgagttagtgagcaggtaatttagttcaaagatccatgatacgcatccccaacccatgagggaatgagctcctactggaaggcagatgcccattgagaacacaggtgtggcctagaggggttcaatggtcctcacacaggagttccatttcccaccaagcttcaactcaccttccttctctggtatcccctcagctcatcatcagcacaaccattcaccacacagaatgtgctgggaactgagttggacactctgttggagacctccctccagtggttgaccatctgataagagagccaaggcacgtacacaaaaggctaaataattacaaccctagcataaccaaagcaccagtgaagctagtgaagccataaataattatggagttcagagaagggtattgtggtaaattacaatgaactatgaggcccttttttcctttgacggaatctgaatccttttccacatttgattatatttcattatttagggcaggtttatggtccaccttcatttcaataagaaaggaggaagaaagcagaagaatctgaattataaaacacgagttgaacacctactgcaactacgtggtaggcactggaataaaaagacaattggaacatgatgcccagtgttgtaattgaacctcaccttaagggttatatccc

SEQ ID NO: 75447 - DNA, 1134 bp, Homo sapiens
aggtataaagagctaaatttaccactttaacagctgggattttacaagttgacttttcacaaggtgtttttgtggtttcttaaaatgtgttaggctctcttcttttttcttctcctgagattttaaaaatttaacatcaaatttaaacataaaaaggctgatgtggtaaagaccattactgcagaattactttacactggcaaactcaaatcatgggcagtgaattcgagcttgcattagtgtgacatcaaatcacctcctttgtgaaatagtgtttaaataatgtaatcagaagccaaatcggccacctgraggccctgctgaaatcgcacaagtgggtgtttctctccatacctgattagagggaattcactttgaagtcggtgggaactgagaactggggccagccccacagtgacctggggatctaagcagcaccactcctaccactactcatggtatgggatgagttagtgagcaggtaatttagttcaaagatccatgatacgcatccccaacccatgagggaatgagctcctactggaaggcagatgcccattgagaacacaggtgtggcctagaggggttcaatggtcctcacacaggagttccatttcccaccaagcttcaactcaccttccttctctggtatcccctcagctcatcatcagcacaaccattcaccacacagaatgtgctgggaactgagttggacactctgttggagacctccctccagtggttgaccatctgataagagagccaaggcacgtacacaaaaggctaaataattacaaccctagcataaccaaagcaccagtgaagctagtgaagccataaataattatggagttcagagaagggtattgtggtaaattacaatgaactatgaggcccttttttcctttgacggaatctgaatccttttccacatttgattatatttcattatttagggcaggtttatggtccaccttcatttcaataagaaaggaggaagaaagcagaagaatctgaattataaaacacgagttgaacacctactgcaactacgtggtaggcactggaataaaaagacaattggaacatgatgcccagtgttgtaattgaacctcaccttaagggttatatccc

SEQ ID NO: 75448 - DNA, 1134 bp, Homo sapiens
aggtataaagagctaaatttaccactttaacagctgggattttacaagttgacttttcacaaggtgtttttgtggtttcttaaaatgtgttaggctctcttcttttttcttctcctgagattttaaaaatttaacatcaaatttaaacataaaaaggctgatgtggtaaagaccattactgcagaattactttacactggcaaactcaaatcatgggcagtgaattcgagcttgcattagtgtgacatcaaatcacctcctttgtgaaatagtgtttaaataatgtaatcagaagccaaatcggccacctgaaggccctgctgaaatcgcacaagtgggtgtttctctccatacctgattagagggaattcactttgaagtcggtgggaactgagaactggggccagccccacagtgacctggggatctaagcagcaccactcctaccactactcatggtatgggatgagttagtgagcaggtaatttagttcaaagatccatgatacgcayccccaacccatgagggaatgagctcctactggaaggcagatgcccattgagaacacaggtgtggcctagaggggttcaatggtcctcacacaggagttccatttcccaccaagcttcaactcaccttccttctctggtatcccctcagctcatcatcagcacaaccattcaccacacagaatgtgctgggaactgagttggacactctgttggagacctccctccagtggttgaccatctgataagagagccaaggcacgtacacaaaaggctaaataattacaaccctagcataaccaaagcaccagtgaagctagtgaagccataaataattatggagttcagagaagggtattgtggtaaattacaatgaactatgaggcccttttttcctttgacggaatctgaatccttttccacatttgattatatttcattatttagggcaggtttatggtccaccttcatttcaataagaaaggaggaagaaagcagaagaatctgaattataaaacacgagttgaacacctactgcaactacgtggtaggcactggaataaaaagacaattggaacatgatgcccagtgttgtaattgaacctcaccttaagggttatatccc

SEQ ID NO: 75449 - DNA, 1004 bp, Homo sapiens
tcatgtcccatgatttcaatgccttcttctggaatactttctgaaggacctgagatcctctctaatctagcatctttaccagcaacacctcttcctcatgtccacggacagctgtaccatgggcagagaactaccctggtctttggctatcactgtgtgtcaatttgtcccaaaggttacaacatgcaaatcccagagagaagcaatctgagatagccctgccttcagcatgcttgggagaataaatatcagygaataagatcaacataggtctgctagactgagaaattatgttttgttgttgttgttgttgttgttgttgtttttgagagggagtcttgctctgtcgcccaggttggagtgctggagtacagtggtgcgatctcagctcactgcaacctccgcctcctgggttcaagcgattctcctgcctcagcttcccaagtagctgggattacaggtgcccatcaccacacccagctaatttttgtattttagtagagatagggtttcactctgtaggtcaagctggtctcgaactcctgacctcaaatgatctgccaacctcggcctcctaaagtgctaggattacaggtatgagccaccgcacccagctgagaaattatgtcttaatcatattttaaaatgaatatcactcctaaaattattttattaataaatccttttactgactgtaactccagcatttcacgcaatgatccaaaatgatactaaattaccagcatcacatttttcagaattttttgaaagattaaaaaattaaaaatagaattattattttatacaatacccaacaaatatttttgctgccttggagtacactaggtataaagaagaaaaggaaatacaaatttaatattcatttcaaaaaaccttccataaagcactggaaatacttgccacttcaaaatatgtattttctgtgtaatataagctttgacattcttatcttcaaaattatttacatagaaaaataatacaca

SEQ ID NO: 75450 - DNA, 1296 bp, Homo sapiens
cctgaagactctctrataattatatattgatattataatatatttctggactccagtgatgaataccttactatgtacttttatatctatcttataagtgagattactttctagacctttaattcatttttctcagttgtttaatgcctgaattttactagctcattttactaattttctttatttcactgcagtgatttgactatgatcagatttacttgttattaaaatatttgaagcttgtttatggaaacaggaaacatatggtattgacaatattcgggaaattagttgtttttccattcctttacctggctttatttcttctctttctgcctttatttttttttctctcccatatttttagtcgacacataatacagttgacccttgaacaacgctggggttaggggtgctgactccttgtgccattgaaaatctttgtatagcttttgactcccgcaaaactgaattactaataggctactattgacttaaagccttcctataacataaagagttgattaatacatattatgtatgtgttattttctgtgttcttagtagagaacacagaaagtagagaaaagaaagtgttatacacagaaaatagagaaaagaaagtgttatttaaaaaatcataagaaaaaacatttacagtgctgtgctatatttatggataccataagtttacatagtctatttaaaagatgaattacctgtatgcaatggtgagtaactgcaactgcacacctcagtctacagtacatatcaagcaattcaactttttcttgtaatgtcatgacttttcttctgcttcttaggagcactttcatcatctctagtggcactttgtatgggtcccttggtgtcattcaagttttatggtattgcactaaacacaatgaaaattacgtgagaactgaaagaggccaattttttactataatacgcaatttactggagagatgaactgttcatgcagagatgattagcatctcacagtattctaagcagaaacttgcacttgcaacacttgagttcaccacaacagcagcaggaggtggctatgacattattatagtattacagtagtactacagttaattttttgcagttatgatttaatactgcaactttgtttgtttacatttctctctactgcaaatggcatcacatacagtccataagtgtttatgtgcataagtttcaataaatataaactttgtattatagacgtgtgtattttatggtagcaatgataatgtaaactagtacctacatatattttatgca

SEQ ID NO: 75451 - DNA, 1296 bp, Homo sapiens
cctgaagactctctgataattatatattgatattataatatatttctggactccagtgatgawtaccttactatgtacttttatatctatcttataagtgagattactttctagacctttaattcatttttctcagttgtttaatgcctgaattttactagctcattttactaattttctttatttcactgcagtgatttgactatgatcagatttacttgttattaaaatatttgaagcttgtttatggaaacaggaaacatatggtattgacaatattcgggaaattagttgtttttccattcctttacctggctttatttcttctctttctgcctttatttttttttctctcccatatttttagtcgacacataatacagttgacccttgaacaacgctggggttaggggtgctgactccttgtgccattgaaaatctttgtatagcttttgactcccgcaaaactgaattactaataggctactattgacttaaagccttcctataacataaagagttgattaatacatattatgtatgtgttattttctgtgttcttagtagagaacacagaaagtagagaaaagaaagtgttatacacagaaaatagagaaaagaaagtgttatttaaaaaatcataagaaaaaacatttacagtgctgtgctatatttatggataccataagtttacatagtctatttaaaagatgaattacctgtatgcaatggtgagtaactgcaactgcacacctcagtctacagtacatatcaagcaattcaactttttcttgtaatgtcatgacttttcttctgcttcttaggagcactttcatcatctctagtggcactttgtatgggtcccttggtgtcattcaagttttatggtattgcactaaacacaatgaaaattacgtgagaactgaaagaggccaattttttactataatacgcaatttactggagagatgaactgttcatgcagagatgattagcatctcacagtattctaagcagaaacttgcacttgcaacacttgagttcaccacaacagcagcaggaggtggctatgacattattatagtattacagtagtactacagttaattttttgcagttatgatttaatactgcaactttgtttgtttacatttctctctactgcaaatggcatcacatacagtccataagtgtttatgtgcataagtttcaataaatataaactttgtattatagacgtgtgtattttatggtagcaatgataatgtaaactagtacctacatatattttatgca

SEQ ID NO: 75452 - DNA, 1296 bp, Homo sapiens
cctgaagactctctgataattatatattgatattataatatatttctggactccagtgatgaataccttactatgtacttttatatctatcttataagtgagattactttctagacctttaattcatttttctcagttgtttaatgcctgaattttactagctcattttacwaattttctttatttcactgcagtgatttgactatgatcagatttacttgttattaaaatatttgaagcttgtttatggaaacaggaaacatatggtattgacaatattcgggaaattagttgtttttccattcctttacctggctttatttcttctctttctgcctttatttttttttctctcccatatttttagtcgacacataatacagttgacccttgaacaacgctggggttaggggtgctgactccttgtgccattgaaaatctttgtatagcttttgactcccgcaaaactgaattactaataggctactattgacttaaagccttcctataacataaagagttgattaatacatattatgtatgtgttattttctgtgttcttagtagagaacacagaaagtagagaaaagaaagtgttatacacagaaaatagagaaaagaaagtgttatttaaaaaatcataagaaaaaacatttacagtgctgtgctatatttatggataccataagtttacatagtctatttaaaagatgaattacctgtatgcaatggtgagtaactgcaactgcacacctcagtctacagtacatatcaagcaattcaactttttcttgtaatgtcatgacttttcttctgcttcttaggagcactttcatcatctctagtggcactttgtatgggtcccttggtgtcattcaagttttatggtattgcactaaacacaatgaaaattacgtgagaactgaaagaggccaattttttactataatacgcaatttactggagagatgaactgttcatgcagagatgattagcatctcacagtattctaagcagaaacttgcacttgcaacacttgagttcaccacaacagcagcaggaggtggctatgacattattatagtattacagtagtactacagttaattttttgcagttatgatttaatactgcaactttgtttgtttacatttctctctactgcaaatggcatcacatacagtccataagtgtttatgtgcataagtttcaataaatataaactttgtattatagacgtgtgtattttatggtagcaatgataatgtaaactagtacctacatatattttatgca

SEQ ID NO: 75453 - DNA, 1436 bp, Homo sapiens
tgagaatgagacacatgcacacgtatgtttattgcagtacatcgtaacttttaaatgccctgtctttgaatcagtaagttcctaaacatttaatccaatttttttctcactaattagaaatatgcttatatatttgccttataataaatgaattgtttatgcattaccaactcatcacttaattcagtgcacttagtccctcaactctgttaagatgctgcttttgaaattcactaatgacctcttaggaatcaaaccaacaacttcctttcagatcataatccacttgatctatattcattttttgatcttgatagcagatttatctataaaattcttatcttccattgacttttgatctacaattgtcctctgacctggctcccctccattctctcaccttctgaacaagggcactctccattgtcttgtcagctatccttttcttttgccatctttctgagcaccctccccagttggcatactttcattataacctccacatgcatttctcaatactcagcctttgctgatgttcagccggactgcctggctttcttggagcatacactaagcctttaaatgttattcccacacacttcccttctattttacaagcctaactttgatctcactstctcctctacccatgagacttttttttattatacaaacaagatgaaatgtctatctcctctgacaccacatggtactttatctatacttctgtctcatactaatataaatacctgtgcactataacaaccatgatattttgcacattataggcactcaacttggtgacagtaaaataaaaatagggatgagcagaggataatacaaataagtggtacagaagaggacagaagtcaaaggaaaagggctgacacataatattggtaatactaaaagctaaaagaagtatcagacatgtggaaagtgctctgcattttaccaaaatgtgaaaagagtaagaggaaggctgtcctctacttgagagaattgtttttgggaaatagtttcaggagaaaatgagaagttataatttattgagggtagtagtgatggcagggtcagcctatgtggagccaccactgccatgatgctggctgcagtgggggaggtgcactgcatgggagtggggcagcatgctccataaggccagtgggagccaggagcaggcaggagccctgccctccaggtcacagctgcatttgcccaagccctaactgcagacccaggtatccctgtgctcttgggggccaggagctagcaggagccccaccctcccaggcagagctgcagacacccaagcttcccaaaccactgctgtggacctgggcatccctgtgctcttgggttcgggagccagcaggaatcctgccctcccaggcacagctgtagctgcccaagcctcagctgcagacccaggtatc

SEQ ID NO: 75454 - DNA, 1436 bp, Homo sapiens
tgagaatgagacacatgcacacgtatgtttattgcagtacatcgtaacttttaaatgccctgtctttgaatcagtaagttcctaaacatttaatccaatttttttctcactaattagaaatatgcttatatatttgccttataataaatgaattgtttatgcattaccaactcatcacttaattcagtgcacttagtccctcaactctgttaagatgctgcttttgaaattcactaatgacctcttaggaatcaaaccaacaacttcctttcagatcataatccacttgatctatattcattttttgatcttgatagcagatttatctataaaattcttatcttccattgacttttgatctacaattgtcctctgacctggctcccctccattctctcaccttctgaacaagggcactctccattgtcttgtcagctatccttttcttttgccatctttctgagcaccctccccagttggcatactttcattataacctccacatgcatttctcaatactcagcctttgctgatgttcagccggactgcctggctttcttggagcatacactaagcctttaaatgttattcccacacacttcccttctattttacaagcctaactttgatctcactctctcctctacccatgagacttttttttattatacaaacaagatgaaatgtctatctcctctgacaccacatggtactttatctatacttctgtctcatactaatataaatacctrtgcactataacaaccatgatattttgcacattataggcactcaacttggtgacagtaaaataaaaatagggatgagcagaggataatacaaataagtggtacagaagaggacagaagtcaaaggaaaagggctgacacataatattggtaatactaaaagctaaaagaagtatcagacatgtggaaagtgctctgcattttaccaaaatgtgaaaagagtaagaggaaggctgtcctctacttgagagaattgtttttgggaaatagtttcaggagaaaatgagaagttataatttattgagggtagtagtgatggcagggtcagcctatgtggagccaccactgccatgatgctggctgcagtgggggaggtgcactgcatgggagtggggcagcatgctccataaggccagtgggagccaggagcaggcaggagccctgccctccaggtcacagctgcatttgcccaagccctaactgcagacccaggtatccctgtgctcttgggggccaggagctagcaggagccccaccctcccaggcagagctgcagacacccaagcttcccaaaccactgctgtggacctgggcatccctgtgctcttgggttcgggagccagcaggaatcctgccctcccaggcacagctgtagctgcccaagcctcagctgcagacccaggtatc

SEQ ID NO: 75455 - DNA, 1436 bp, Homo sapiens
tgagaatgagacacatgcacacgtatgtttattgcagtacatcgtaacttttaaatgccctgtctttgaatcagtaagttcctaaacatttaatccaatttttttctcactaattagaaatatgcttatatatttgccttataataaatgaattgtttatgcattaccaactcatcacttaattcagtgcacttagtccctcaactctgttaagatgctgcttttgaaattcactaatgacctcttaggaatcaaaccaacaacttcctttcagatcataatccacttgatctatattcattttttgatcttgatagcagatttatctataaaattcttatcttccattgacttttgatctacaattgtcctctgacctggctcccctccattctctcaccttctgaacaagggcactctccattgtcttgtcagctatccttttcttttgccatctttctgagcaccctccccagttggcatactttcattataacctccacatgcatttctcaatactcagcctttgctgatgttcagccggactgcctggctttcttggagcatacactaagcctttaaatgttattcccacacacttcccttctattttacaagcctaactttgatctcactctctcctctacccatgagacttttttttattatacaaacaagatgaaatgtctatctcctctgacaccacatggtactttatctatacttctgtctcatactaatataaatacctgtgcactataacaaccatgatattttgcacattataggcactcaacttggtgacagtaaaataaaaatagggatgagcagaggataatacaaataagtggtacagaagaggacagaagtcaaaggaaaagggctgacacataatattggtaatactaaaagctaaaagaagtatcrgacatgtggaaagtgctctgcattttaccaaaatgtgaaaagagtaagaggaaggctgtcctctacttgagagaattgtttttgggaaatagtttcaggagaaaatgagaagttataatttattgagggtagtagtgatggcagggtcagcctatgtggagccaccactgccatgatgctggctgcagtgggggaggtgcactgcatgggagtggggcagcatgctccataaggccagtgggagccaggagcaggcaggagccctgccctccaggtcacagctgcatttgcccaagccctaactgcagacccaggtatccctgtgctcttgggggccaggagctagcaggagccccaccctcccaggcagagctgcagacacccaagcttcccaaaccactgctgtggacctgggcatccctgtgctcttgggttcgggagccagcaggaatcctgccctcccaggcacagctgtagctgcccaagcctcagctgcagacccaggtatc

SEQ ID NO: 75456 - DNA, 1436 bp, Homo sapiens
tgagaatgagacacatgcacacgtatgtttattgcagtacatcgtaacttttaaatgccctgtctttgaatcagtaagttcctaaacatttaatccaatttttttctcactaattagaaatatgcttatatatttgccttataataaatgaattgtttatgcattaccaactcatcacttaattcagtgcacttagtccctcaactctgttaagatgctgcttttgaaattcactaatgacctcttaggaatcaaaccaacaacttcctttcagatcataatccacttgatctatattcattttttgatcttgatagcagatttatctataaaattcttatcttccattgacttttgatctacaattgtcctctgacctggctcccctccattctctcaccttctgaacaagggcactctccattgtcttgtcagctatccttttcttttgccatctttctgagcaccctccccagttggcatactttcattataacctccacatgcatttctcaatactcagcctttgctgatgttcagccggactgcctggctttcttggagcatacactaagcctttaaatgttattcccacacacttcccttctattttacaagcctaactttgatctcactctctcctctacccatgagacttttttttattatacaaacaagatgaaatgtctatctcctctgacaccacatggtactttatctatacttctgtctcatactaatataaatacctgtgcactataacaaccatgatattttgcacattataggcactcaacttggtgacagtaaaataaaaatagggatgagcagaggataatacaaataagtggtacagaagaggacagaagtcaaaggaaaagggctgacacataatattggtaatactaaaagctaaaagaagtatcagacatgtggaaagtgctctgcattttaccaaaatgtgaaaagagtaagaggaaggctgtcctytacttgagagaattgtttttgggaaatagtttcaggagaaaatgagaagttataatttattgagggtagtagtgatggcagggtcagcctatgtggagccaccactgccatgatgctggctgcagtgggggaggtgcactgcatgggagtggggcagcatgctccataaggccagtgggagccaggagcaggcaggagccctgccctccaggtcacagctgcatttgcccaagccctaactgcagacccaggtatccctgtgctcttgggggccaggagctagcaggagccccaccctcccaggcagagctgcagacacccaagcttcccaaaccactgctgtggacctgggcatccctgtgctcttgggttcgggagccagcaggaatcctgccctcccaggcacagctgtagctgcccaagcctcagctgcagacccaggtatc

SEQ ID NO: 75457 - DNA, 1271 bp, Homo sapiens
atgcccaaaggagaaatatcatcatcagcttttacattttcagaagggtgcatatgcgttttgcttctcttttttatgaagctctttttactgctttctcttaagaaaatattatgaaaaatccaatwtccctacagatatgtcagaccgtgctgtttcttgagagctagaacaaaacctactttcaagatgacttatgtaatttggaaccaaataggtgggtgttcagcttaaaaaattccatagaattatcacttgcaatatttccgcaatctcgaacagttactcatttatcatttctcatctgttgtgcatccactaatgaggagtaaggcaccacactgagcagagattgaacaaactcatgaattgttctgcactaaacagctgagccaaagaggaaatcataaggagattaaacaaatggcgctataatggagatatggaagaggtaggaaagggacagtggttcagggagtcgtaagaaagttccaaagaaaatgacattatcatcttccttctcaactcaccatttgttggtgtgcgtatttacatatttgtttatgtttaataatgtaaggtattacattttaatgtaatagtatttgatccatgaaaaagtgtaacatacctgtatcatatactaaagcacaataataaaatgaatatccatgaaacctccatctaatttataaagtaaaattttacaataccatttcatccaagtgttcctccttacaattgcctctcccacaaatgtgagtgcactatgaatgctatctttatatccttttttatttttatttacatacaatacttatatattcattcataaacattcaattgccagtttatcttcttttggacctttgtaaaagcagtatcttactgtaagtaggtctcctggattgattatatcatattcatgcgtattgtaccacatatctttatttcattcatttacacatgcaaaatagctgaatgggtgaatgaatccttctacatgcccatttttttctgaacatttgaggtctctctttccttatttctctttcccttctttctttcctgcatctctctctttctctcccttcttctttctttctctttattttctccccttccttccctctcttcttccttttttcttttctttccttctttgtttcattccatcctttcttccttccttctttttttccctttttttctttttcttattacagcagttttacaataagcattcttatagctgtcttgatacttgacag

SEQ ID NO: 75458 - DNA, 1271 bp, Homo sapiens
atgcccaaaggagaaatatcatcatcagcttttacattttcagaagggtgcatatgcgttttgcttctcttttttatgaagctctttttactgctttctcttaagaaaatattatgaaaaatccaatttccctacagatatgtcagaccgtgctgtttcttgagagctagaacaaaacctactttcaagatgacttatgtaatttggaaccaaataggtgggtgttcagcttaaaaaattccatagaattatcacttgcaatatttccgcaatctcgaacagttactcatttatcatttctcatctgttgtgcatccactaatgaggagtaaggcaccacactgagcagagattgaacaaactcatgaattgttctgcactaaacagctgagccaaagaggaaatcataaggagattaaayaaatggcgctataatggagatatggaagaggtaggaaagggacagtggttcagggagtcgtaagaaagttccaaagaaaatgacattatcatcttccttctcaactcaccatttgttggtgtgcgtatttacatatttgtttatgtttaataatgtaaggtattacattttaatgtaatagtatttgatccatgaaaaagtgtaacatacctgtatcatatactaaagcacaataataaaatgaatatccatgaaacctccatctaatttataaagtaaaattttacaataccatttcatccaagtgttcctccttacaattgcctctcccacaaatgtgagtgcactatgaatgctatctttatatccttttttatttttatttacatacaatacttatatattcattcataaacattcaattgccagtttatcttcttttggacctttgtaaaagcagtatcttactgtaagtaggtctcctggattgattatatcatattcatgcgtattgtaccacatatctttatttcattcatttacacatgcaaaatagctgaatgggtgaatgaatccttctacatgcccatttttttctgaacatttgaggtctctctttccttatttctctttcccttctttctttcctgcatctctctctttctctcccttcttctttctttctctttattttctccccttccttccctctcttcttccttttttcttttctttccttctttgtttcattccatcctttcttccttccttctttttttccctttttttctttttcttattacagcagttttacaataagcattcttatagctgtcttgatacttgacag

SEQ ID NO: 75459 - DNA, 1308 bp, Homo sapiens
tcattatttttccattgttttatcttttttatcaagcaaaatataaaacttctggatgaatatatagtactattcccagaggcaaatatgccagcatatataaatgtgtttgcaaaaatgttttatatttacacccataaattactatttttaatactttcaaaatcacattttcacctctgtgatctatgcaatttttacttcattttctaaataaggatgaggtctgtttgttattaattatattgaatgaggtcacataacattttgtttaacagaagtgcagaagtgtgttataggttgttttagtactatagtaaacacttgacaatacaccagwcatcttaataagatatgaatgatttaataagatatgaataactatacaaggaaagcaaaatataacttcacaaggagtgaggaatatgtaatgtatagagttgagtacctgcagtttttattcagttaaaacttggtgtaggtgaattgaaggatcacaaaaccacactaccatatgacttactgaaacattttctctttttttgttacatacgtgaaaaaaccgtctgtctattttctagtttctagtaatgttgtctcctagacaggtgctttagaaataataggcctatttgttctttataccttgcactcagaacagaactactttgctgaattcattgccattttgaagatactgtacctgaaagttacaaactacctaataactctaaattgactcttatttttcataacttagttgctcaccacagctccctgtgctcattactctgccaacatctgtgattgctaagaggttggagagaaaattttgagcaacagaaaaatgtcatattgttcttccaataatacgtgcctaggaaacactaaagaaaaactattaggcctatgtctataataaaagaagtttcacataaaaatagaggtgaattagtattttgcaattgcacttttatatttagttcttcatgtaaatgcaattgatgattttaaaattatgacattgtttatattaatgatgtttaataatatggtatatgatattaataatattaatatattattagtatatcattttaagactttatattacttagagaatgttttcctttgtaagctggttatactagtacaccagaataatgattattagacattcagatataacctgtaaaaattactgcaaaattttcatgtattatgttacataaatatgtatatattaatttatatacacataaactgatttcagctgttcttatgaatatataaatgtatatatatgca

SEQ ID NO: 75460 - DNA, 1308 bp, Homo sapiens
tcattatttttccattgttttatcttttttatcaagcaaaatataaaacttctggatgaatatatagtactattcccagaggcaaatatgccagcatatataaatgtgtttgcaaaaatgttttatatttacacccataaattactatttttaatactttcaaaatcacattttcacctctgtgatctatgcaatttttacttcattttctaaataaggatgaggtctgtttgttattaattatattgaatgaggtcacataacattttgtttaacagaagtgcagaagtgtgttataggttgttttagtactatagtaaacacttgacaatacaccagtmatcttaataagatatgaatgatttaataagatatgaataactatacaaggaaagcaaaatataacttcacaaggagtgaggaatatgtaatgtatagagttgagtacctgcagtttttattcagttaaaacttggtgtaggtgaattgaaggatcacaaaaccacactaccatatgacttactgaaacattttctctttttttgttacatacgtgaaaaaaccgtctgtctattttctagtttctagtaatgttgtctcctagacaggtgctttagaaataataggcctatttgttctttataccttgcactcagaacagaactactttgctgaattcattgccattttgaagatactgtacctgaaagttacaaactacctaataactctaaattgactcttatttttcataacttagttgctcaccacagctccctgtgctcattactctgccaacatctgtgattgctaagaggttggagagaaaattttgagcaacagaaaaatgtcatattgttcttccaataatacgtgcctaggaaacactaaagaaaaactattaggcctatgtctataataaaagaagtttcacataaaaatagaggtgaattagtattttgcaattgcacttttatatttagttcttcatgtaaatgcaattgatgattttaaaattatgacattgtttatattaatgatgtttaataatatggtatatgatattaataatattaatatattattagtatatcattttaagactttatattacttagagaatgttttcctttgtaagctggttatactagtacaccagaataatgattattagacattcagatataacctgtaaaaattactgcaaaattttcatgtattatgttacataaatatgtatatattaatttatatacacataaactgatttcagctgttcttatgaatatataaatgtatatatatgca

SEQ ID NO: 75461 - DNA, 1308 bp, Homo sapiens
tcattatttttccattgttttatcttttttatcaagcaaaatataaaacttctggatgaatatatagtactattcccagaggcaaatatgccagcatatataaatgtgtttgcaaaaatgttttatatttacacccataaattactatttttaatactttcaaaatcacattttcacctctgtgatctatgcaatttttacttcattttctaaataaggatgaggtctgtttgttattaattatattgaatgaggtcacataacattttgtttaacagaagtgcagaagtgtgttataggttgttttagtactatagtaaacacttgacaatacaccagtcatcttaataagatatgaatgatttaataagatatgaataactatacaaggaaagcaaaatataacttcacaaggagtgaggaatatgtaatgtatagagttgagtacctgcagtttttattcagttaaaacttggtgtaggtgaattgaaggatcacaaaaccacactaccatatgacttactgaaacattttctctttttttgttacatacrtgaaaaaaccgtctgtctattttctagtttctagtaatgttgtctcctagacaggtgctttagaaataataggcctatttgttctttataccttgcactcagaacagaactactttgctgaattcattgccattttgaagatactgtacctgaaagttacaaactacctaataactctaaattgactcttatttttcataacttagttgctcaccacagctccctgtgctcattactctgccaacatctgtgattgctaagaggttggagagaaaattttgagcaacagaaaaatgtcatattgttcttccaataatacgtgcctaggaaacactaaagaaaaactattaggcctatgtctataataaaagaagtttcacataaaaatagaggtgaattagtattttgcaattgcacttttatatttagttcttcatgtaaatgcaattgatgattttaaaattatgacattgtttatattaatgatgtttaataatatggtatatgatattaataatattaatatattattagtatatcattttaagactttatattacttagagaatgttttcctttgtaagctggttatactagtacaccagaataatgattattagacattcagatataacctgtaaaaattactgcaaaattttcatgtattatgttacataaatatgtatatattaatttatatacacataaactgatttcagctgttcttatgaatatataaatgtatatatatgca

SEQ ID NO: 75462 - DNA, 1308 bp, Homo sapiens
tcattatttttccattgttttatcttttttatcaagcaaaatataaaacttctggatgaatatatagtactattcccagaggcaaatatgccagcatatataaatgtgtttgcaaaaatgttttatatttacacccataaattactatttttaatactttcaaaatcacattttcacctctgtgatctatgcaatttttacttcattttctaaataaggatgaggtctgtttgttattaattatattgaatgaggtcacataacattttgtttaacagaagtgcagaagtgtgttataggttgttttagtactatagtaaacacttgacaatacaccagtcatcttaataagatatgaatgatttaataagatatgaataactatacaaggaaagcaaaatataacttcacaaggagtgaggaatatgtaatgtatagagttgagtacctgcagtttttattcagttaaaacttggtgtaggtgaattgaaggatcacaaaaccacactaccatatgacttactgaaacattttctctttttttgttacatacgtgaaaaaaccgtctgtctattttctagtttctagtaatgttgtctcctagacaggtgctttagaaataataggcctatttgttctttataccttgcactcagaacagaactactttgctgaattcattgccattttgaagatactgtacctgaaagttacaaactacctaataactctaaattgactcttatttttcataacttagttgctcaccacagctccctgtgctcattactctgccaacatctgtgattgctaagaggttggagagaaaattttgagcaacagaaaaatgtcatattgttcttccaataatacgtgcctaggaaayactaaagaaaaactattaggcctatgtctataataaaagaagtttcacataaaaatagaggtgaattagtattttgcaattgcacttttatatttagttcttcatgtaaatgcaattgatgattttaaaattatgacattgtttatattaatgatgtttaataatatggtatatgatattaataatattaatatattattagtatatcattttaagactttatattacttagagaatgttttcctttgtaagctggttatactagtacaccagaataatgattattagacattcagatataacctgtaaaaattactgcaaaattttcatgtattatgttacataaatatgtatatattaatttatatacacataaactgatttcagctgttcttatgaatatataaatgtatatatatgca

SEQ ID NO: 75463 - DNA, 670 bp, Homo sapiens
tggaaaaataaaagtctaacaaagttaaaggaaaatacatgttagcacaatgtagrctttattaaggattctactgtcctgctctgaagtaggacaaaattttctaaggcattatattagagttacagagaattcagtttgggaacaagagtttgaaacttttgaaagaaatgcaacatttttttccaactgtgtagtttaaaataagtatggaaaataaattgattcgatttattttctttaaaggagcatcagaaaaaataaatagcatgttttagtaacaagtgaaaatatagccaataaattacaaaattttaaaaaatcattttgacaattattttattattaaatagtagatgggttttgaattaagacaaaggcaaacatatcacagagttgaaattagagaaatttttaaatgacatagttcattgtctatcttctagcgctttgaaaacttcctttaaaataagtcaatcgcgcaagttttattattgctgtccaaaatacacttatcaattattcctcaagaatacccccaggccaaattctaaggacctgcagtttctacctctctaggggaaaaagtgacactgatgctatgaccttaatatcttaaaacagagaccacttcttatataaaacaggataggtagtaagcccacatgca

SEQ ID NO: 75464 - DNA, 670 bp, Homo sapiens
tggaaaaataaaagtctaacaaagttaaaggaaaatacatgttagcacaatgtaggctttattaaggattctactgtcctgctctgaagtaggacaaaattttctaaggcattatattagagttacagagaattcagtttgggaacaagagtttgaaacttttgaaagaaatgcaacatttttttccaactgtgtagtttaaaataagtatggaaaataaattgattcgatttattttctttaaaggagcatcagaaaaaataaatagcatgttttagtaacaagtgaaaatatagccaataaattacaaaattttaaaaaatcattttgacaattattttattattaaatagtagatgggttttgaattaagacaaaggcaaacatatcacagagttgaaattagagaaatttttaaatgacatagttcattgtctatcttctagcgctttgaaaacttcctttaaaataagtcaatcgcgcaagttttattattgctgtycaaaatacacttatcaattattcctcaagaatacccccaggccaaattctaaggacctgcagtttctacctctctaggggaaaaagtgacactgatgctatgaccttaatatcttaaaacagagaccacttcttatataaaacaggataggtagtaagcccacatgca

SEQ ID NO: 75465 - DNA, 548 bp, Homo sapiens
aatggaacttcatttatcccagtctgaacacaaaataatggtatgatatggtatggtaaccactattttaagtggtaaatacaaaggaaccaaaattaaacactgattaatagrtttgttttatagtttatcaagttgttctctaattctcgttaaattgagagcgaatatgggtaaacacaattatgaagttcaacactacataaactaaaaatataatggtatggtttggctttatgtccccacccaaatctcacctttaattataataatccccacatgtctaggtcaggaccagatggaggtaactgaatcataggggcagtttcccccatgctgttcttgtgctagtgagtgatttctcaagatatctgatggttttataagtgttttggcattccccctgcttgctctctctctatcctgctgccctgtgaagaaggtgcctgttactcctttgccttctgccatgattataagtttcctcaggcctccccagcaatgtggaacgtaagtcaattaaacctctttcctttgtaaattaccca

SEQ ID NO: 75466 - DNA, 548 bp, Homo sapiens
aatggaacttcatttatcccagtctgaacacaaaataatggtatgatatggtatggtaaccactattttaagtggtaaatacaaaggaaccaaaattaaacactgattaataggtttgttttatagtttatcaagttgttctctaattctcgttaaattgagagcgaatatgggtaaacacaattatgaagttcaacactacataaactaaaaatataatggtatggtttggctttatgtccccacccaaatctcacctttaattataataatccccacatgtctaggtcaggaccagatggaggtaactgaatcataggggcagtttcccccatgctgttcttgtgctagtgagtgatttctcaagatatctgatggttttataagtgttttggcattccccctgcttgctctctctctatcctgctgccctgtgaagaaggtgcctgttactcctttgccttctgccatgattataagtttcctcaggcctccccagcaatgtggaacrtaagtcaattaaacctctttcctttgtaaattaccca

SEQ ID NO: 75467 - DNA, 656 bp, Homo sapiens
atttttacttaaactaatagattgagtcatttatttatgagtaaagtatccacttgctactgtggtgaacaagctaaaaccttgggttacagttgcaattccccattttgtttgtattctatggcttgctagctgtgtgatctggagkaagttatttaatatgactgtgcctccttttctcagctgtaaaatggggagcaataaagcacttgccacataagcttgctcagagtattaatacaggcaatccctgtaagaggcttagcacagggcctggcatactgtaggtttttcagtagttgtgaactattattttaccaagtttacacatggaaataaatatgacaacttttttttcagtttacacaaacttcctttcaaacatcaacaaatagtattctatttctcaataacaagtatctgatgtcagagactaagggagagacacatggactaagtataaaagaatggattttgcttcaaagcactctttttcagtgtcttacattatctctcggccctaacgtcggtgttgaaaatagctaggagggtctacccctgtgccttctgggttctccccattcttttttctctggtggattttttggcatcacatgagttgctgtttctaagaaagtaaacgagtgacaagtaga

SEQ ID NO: 75468 - DNA, 1166 bp, Homo sapiens
tgtttctttttttttaaaacccaaaccccaaaacctcctcttgcctaatttaaccattaatgtgcctcaggcctgcctccatttgtatgcaaataaaatataatgcccaccttagtgatttctcacatagtgtacattgcttgattagatttttaaaaatttattaattaatttatttttgaggcagggtcttgcttgcccaggctgaagtgcggtgacatgatcatggcttactgcagcctcgaccttgtgggctcaaacaatcctcccacctcagcctcctgagtagctgggaccacaggcatgtgccaccacatctgactaatttttttttttacattttttgtagcgacagggtctcaccatgtcacccaggctggtctcgaactcctgrgctcaggcaatcctcctgtctcagcctcccaaagtattgagattaaaggtgtgattcggccaggcacgttggctcacgtctgtaatcccagcactttgggaggccaaggtgggcagatcacgaggtcaggaaatcgagaccatcctggtcaatatggtgaaaccatgtctttactaaaaatacaaaaagtagctgggcgtggtggcattcacttgtaatcacagctactcaagaagctgatgcaggagaattgcttgaacctgggagatggaggttgcagtgagctgagatcacacccgggcactccagcctggagacagagttaaaaaaaaaaaaggtgcgaatcacggtgcccagctcattgcttgattttagatgcagagacaggtcaattgtcttcctaacctcagcatggctgcccagtgtttttatttttgtattttaaaatgtaattatgataatagtttaatctcagtgtctcaaccatagatgcatctacacaaagggtattttttatagtcacccattttaaagattatggcattgtgatgggtaagactgagtccatctgctttgctgacaatgtgagctgctgggctgccagagaccagctggtgaaacaaggagtccaagtggccatgtgcagacatgtgtgagggacatttcggctgtttcactgctcaccataagtgacttttatggtttatgtcctgggaaatagctgggaaacagctattctacagcaccatgcaagtatagactccagaaccca

SEQ ID NO: 75469 - DNA, 1166 bp, Homo sapiens
tgtttctttttttttaaaacccaaaccccaaaacctcctcttgcctaatttaaccattaatgtgcctcaggcctgcctccatttgtatgcaaataaaatataatgcccaccttagtgatttctcacatagtgtacattgcttgattagatttttaaaaatttattaattaatttatttttgaggcagggtcttgcttgcccaggctgaagtgcggtgacatgatcatggcttactgcagcctcgaccttgtgggctcaaacaatcctcccacctcagcctcctgagtagctgggaccacaggcatgtgccaccacatctgactaatttttttttttacattttttgtagcgacagggtctcaccatgtcacccaggctggtctcgaactcctgagctcaggcaatcctcctgtctcagcctcccaaagtattgagattaaaggtgtgattcggccaggcacgttggctcacgtctgtaatcccagcacyttgggaggccaaggtgggcagatcacgaggtcaggaaatcgagaccatcctggtcaatatggtgaaaccatgtctttactaaaaatacaaaaagtagctgggcgtggtggcattcacttgtaatcacagctactcaagaagctgatgcaggagaattgcttgaacctgggagatggaggttgcagtgagctgagatcacacccgggcactccagcctggagacagagttaaaaaaaaaaaaggtgcgaatcacggtgcccagctcattgcttgattttagatgcagagacaggtcaattgtcttcctaacctcagcatggctgcccagtgtttttatttttgtattttaaaatgtaattatgataatagtttaatctcagtgtctcaaccatagatgcatctacacaaagggtattttttatagtcacccattttaaagattatggcattgtgatgggtaagactgagtccatctgctttgctgacaatgtgagctgctgggctgccagagaccagctggtgaaacaaggagtccaagtggccatgtgcagacatgtgtgagggacatttcggctgtttcactgctcaccataagtgacttttatggtttatgtcctgggaaatagctgggaaacagctattctacagcaccatgcaagtatagactccagaaccca

SEQ ID NO: 75470 - DNA, 1166 bp, Homo sapiens
tgtttctttttttttaaaacccaaaccccaaaacctcctcttgcctaatttaaccattaatgtgcctcaggcctgcctccatttgtatgcaaataaaatataatgcccaccttagtgatttctcacatagtgtacattgcttgattagatttttaaaaatttattaattaatttatttttgaggcagggtcttgcttgcccaggctgaagtgcggtgacatgatcatggcttactgcagcctcgaccttgtgggctcaaacaatcctcccacctcagcctcctgagtagctgggaccacaggcatgtgccaccacatctgactaatttttttttttacattttttgtagcgacagggtctcaccatgtcacccaggctggtctcgaactcctgagctcaggcaatcctcctgtctcagcctcccaaagtattgagattaaaggtgtgattcggccaggcacgttggctcacgtctgtaatcccagcactttgggaggccaaggtgggcagatcacgaggtcaggaaatcgagaccatcctggtcaatatggtgaaaccatgtctttactaaaaatacaaaaagtagctgggcgtggtggcattcacttgtaatcacagctactcaagaagctgatgcaggagaattgcttgaacctgggagatggaggttgcagtgagctgagatcacacccgggcactccagcctggagacagagttaaaaaaaaaaaaggtgcgaatcacggtgcccagctcattgcttgattttagatgcagagacaggtcaattgtcttcctaacctcagcatggctgcccagtgtttttatttttgtattttaaaatgtaattatgataatagtttaatctcagtgtctcaaccatagatgcatctacacaaagggtattttttatagtcacccattttaaagattatggcattgtgatgggtaagactgagtccatctgctttgctgacaatgtgagctgctgggctgccagagaccagctggtgaaacaaggagtccaagtggccatgtgcagacatgtgtgagggacatttcggctgtttcactgctcaccayaagtgacttttatggtttatgtcctgggaaatagctgggaaacagctattctacagcaccatgcaagtatagactccagaaccca

SEQ ID NO: 75471 - DNA, 809 bp, Homo sapiens
ttttctctcagctagacttgaagtagagaaaacaaggaatttggacttagccacatccctctgcagtctgactccctggaatctcaaagggaaaagaagcaaagggaaaagagtcacactaataaaaaattatctatccattcatctgaagttggacacttacgtcaatttcatagcttgactattgtgactagtgctataatgaacatgggagtgcaggtatctctttgacacactgatttcatttgccttggatatatacccagtggtgggattgctggatcacataatagtcccatttttaattttttgaagaagctccatactgttttccataatggctgtcctactttacaatcccatcaacagtttgtaattgttcccttttctccacatcctcaccaacactttttttttttgtcttttgatgataggcyattttaactggagtgagatggcacctcattgtgtgttttacttgcatttccctgttgattattgatgttgagcacttttccatgaggtgataaatctaactgccttgattatacaacacatatatgtaccgaaacatcaaattgtgccccataaatatttacaattaaaatgtgtcaattttgaaaaaattcccaatgggattggaatgtgattttaagtttacccacattggtagtctcccatgtgttctttgatgccttaaattcctttcctaaggaaggaagcagccattacaataaaaactcaaactgcaaatatctgtgggtaggtctaagttcccttcttagtgaaggatgagtcaggccaccacc

SEQ ID NO: 75472 - DNA, 1549 bp, Homo sapiens
aggcaggcagatcacttgaggtcaagagttcgagaccagcctggccaacatggtgaaacctagtctctactaaaagtacaaaaattagccgggcgtggtggtgcatgcccagctactggggagactgagtcaggagaatcacttgagcctgggaggtggaggttgcagtgagctgagatcttgccactgcactctagcctgggcaacagagcaagactccatctcaaaacaaaacaaaacaaaaacctgtagcttcctagacaatcctgataaacattcatgtgtgagaaccactggaaaagaccttgcaaacttggcctcctctgggggcagattaaataggtaacacggttacaaggaggcaytgtgctgtaacgccataacaacctggatgcagagggaacccgattctagtaattccttggccagcgggggtcaattctcagaaggttgaaatgctagtctatttttcactgttggagtctgacttagtaactcagagttagaatctttctttcctccttgaacaatcagaccactgagccaagagtttctttatggtgttgatttatcaaataagtcacatcaatctaagattagccccgtcaagaactgtgtgttatttattgataactttagttaagaagagctcataaaaattttgatacttccctaacacaagcagagggtaacttttttatgatgcaataaactctcattcctcagcatggcagataaggttgcatgagtgctaagggatccttgcagtgatcaaatttgtactgttgaacatttcaaataaaattaccatagtgaaaacctttttgcacaggctaatgagactttaagtgagatcaagcaggaggcaaatccaatcattcacgtaagccttcatatgtaactcagggctctctggtttaagaaacagactgctcaatgagaaaaagaccaacaacccaatggaaaaacgagtatagcacttgggaaaaaacgctcaacttcacttataataaaataaaagtaaacttcaagaaactatttttacctgtcagattgataaagatcaagaagttgtgataggcaagagtcctgtacgtcgttgctgagaatataaattgaaagacaggttttggaaggacggttgacaatgtctatcaaaaatttaagtgtaatgaaatagactcagcaatttcacttctatgaattctttattcttttagaatgtatgcacagtagtactagcgttctttataatagtaaatgtctggaaacaatctagatgtccatcaatgggctacgggttaaatacacttttgtatttccatatgatagagcagtattcagccagtaaaaacaaagagctacatctcaacaaacgagtataggaaaaattccaagatctatagtgtacgaaagaaagctaccatttatgttgcaggcactgttctaaatccttcacacttgttaattaatttaatcatcaagtcatatgaagtagtaccatactaatggtacatctcagtttctgtgatgaggacactaaggccca

SEQ ID NO: 75473 - DNA, 1132 bp, Homo sapiens
gagtcattaattccctgcacaagcactggttctttagcttaccaatatgactgccaccttcctacatgcaaggcagcagagcatgatgatgtgaagagatcaggggaagccaactgcctaggcttgaatcccatttctcccatcaaccagctgtataatcttcagtaaattgcttaaaccctttgcccatgctcttatctacaaatggggatgataaaaccagtactcatctcaaagtgtcgttgtgatgagattaaataggttaatacatgtaaaacacctagcacagtccctaggcatggttagcattcatttagaattatgctttttttaaaaaaattattgctgtgattcttaataataacaaattgacaccttgtcagcttgcacactattcgtgtgtgtggtttctcccaagactaatacgtttttacaaactactatttgcatggtgcctgatgagctgtattaacaatcctctccttttctcagagaggcatttttattttatttatttatttatttattttttgagtcggagttttgctctgtcacccatgctggagtgcaatggcacaatcttggctcactgcaacctctgcctcccaggttcaagtgattctcctccctaagcctcctgagtagctgagattacaggaatacaccacgacgcctggctaatttctgtatttttagtagagacagggtttcagcatgttggtcaggctggtctcaaactcctgacctcaggtgatccacctgcctccacctcccaaagtgctgggattacagacataagccactgtgcccagcctcagagaggcatcttatagtcaagtaagagaggtacagagatgacaaaaagtarcttgtctaaaattatcaactgatactaaaattatcagatgaatgactgaactggcacccaatatttgtaggctggcaccatgaataacaccttacaatcaggtttctatcatgtgatttaaaaaatgtaactagaaaatggaagggtcagactatcacagccctattctagagggtgccaatattagcatcactatcggtagactaactagatgttatgtatttcctgctctgatgctacatgaagtactaacatcacttatta

SEQ ID NO: 75474 - DNA, 1009 bp, Homo sapiens
attcactggctatatttcatctcacatctgcaaacttaatttttcctttcttggtcatcagaagattaggaaataaattttagtccaggcaatagatcctacttggcaagctcaaaataactcaattattaaaaagcagcacacaaagaccagtagtgacttccaaaggattgttaacaatacttaaaaaaaaaaaaaaaaaaaaaaaaagagaaaaaagggtccaactgtctaaaagaagactagagatacatgaataagaaaatacgatgttttggaattatgtgcaaaatagtaatgctgcatattacccatcctttaagttttagcaataattagaaaaaatagtttcccaacaataaaagttataaaataatgtcatcatatcacctagaagagattatagatttttataaacaaaatatgtgttattatgaatatttgtatgtactctccaagaactaaaagatgaagttcccctttcaggatcccctgtgcctgagaaggaaactttccagtgaaagcctactagctagttaaaaatttcttaaaaaagaaaatcttcttagttgtatacttgggagcatcctttctcttgggcggatccctgttagacatatacaacttttaatgtttgcacctttaactgtagggatggtctctgagtatgcccacattcgtatctaagatattcaaygcctgtccttcagacacttaacaaggactctgagttccaaatctcccttgagtgctgcagtgcatgctgacgctctttaaaagccatagcactccctcactgtgaaataaaactgctctgtctcttgctggttggctctcctcttagcaatgctgggcttgctcatgaaggtttcagagaccgtggacttgacggactccatggagttgctgtactggaagcagtcagacacatcgaagtcctcgacagtcacaatgtcctggatggtttgcagggtggcctccattgtcttctttacctgccacgacaagg

SEQ ID NO: 75475 - DNA, 613 bp, Homo sapiens
tgttgcagtaaatacagatcatgggtgaagaggttctagattcagagataggaatagatgttataacactgaggagagaggagagtgaagaatgactgcacagtgtgggacctcaagactggaagaaagaagactgatgaaggtagaccagatagccagtttggggtaggggagggctgattccatttgggcatgatacctagctgccgtgggccatctatatggagatgtcatggaggtaatggagctggggagttggagcaagcacaatagagacaggtggcatttatatgtgacaacacaagtgccatgagagcagggactttactcactgatgtatcccaaacaccagaacagggttgagcacatagtaggtgctcagtaaatgtgttgacygaagcatcaacataaaggtaattgaagcttttaaaatatgcatatttgttcaccaagagaatagcggcaagcctcaatttcagcaagggccgcaggagaactcaggagaaagccctcaagaggcccagaattccaagtgtgtgagggacgggagacgtattggcagattcaaatcctgtagcaggccaaagagaaggaaatttgaggcaaggacctt

SEQ ID NO: 75476 - DNA, 568 bp, Homo sapiens
gcccaggctggtcttgaactcctgggctcaaacaatcctcctgcctcagcctccaaagggctgagattacaggcacaggccactatgtccagcttgagtttgattttttttaaagagaaaatcaacaatcccttaatgagcctgattttaagacttaatgtgtcaaaatatgcagttcttaagacaaagggggaataggtgtaaaagaggtccttggtgttcacagcctaaacctggactcagggttggctgstatcagggttgaggggtccctaccgctggacaccttagatggcctgagaaccaagcccacatcagtgctatggtctagccattctccctcaaagggacccagcctccctccagccagcctgaggcccactggcatgcagggacctctgagaacgactgactcccagggattccttggctccttaccttccagcattctcctgcaaccaagcccagggcacatgggactgtccctgagccaaggacccaggcatgctgtgagccaggggaaggggagtaaagagactggtggcttttaccctccatctgagggtgg

SEQ ID NO: 75477 - DNA, 569 bp, Homo sapiens
tcatggataagctcaggctttgtgcttaytgatgaatatggaatcaatatgcctaaaacgggcatggggatactggaatatatccccatacactggatactggaagtttatcacagtggcccaaaccactgatggctgtccagttattgggtttgatttattcacataatcataacaccaactggaattctttaaaactttttaaaaaagtgtagataataggaagatgatccttactactcatccatgcagagcaaatcacatttacaacaatcattttagagtttctctttctggacttttcttcataggttcataggttttttttttttagatggactttcgctcttgttgcccaggctggaatgcaatggcacggtctcgactcactgcaacctctgcttcctgggttcaagagattctcctgcctcagcctcctgagtagctgtgattacaggtgcgtgtcaccatgtctggctaattagagacgggatttcaccatgttggccaagctggtctcaaactcctgaccccgtgatccacccgcctcggcctcccaaagtgctggg

SEQ ID NO: 75478 - DNA, 2104 bp, Homo sapiens
tctgccttagcctcccgagtggttgggaccgcgggcttgcaccaccatgcccagctaatttcttttgttttttggtagagatggggttttgccatattgcccaagctttattctttttatagtggcgtttgggttaggtttgttccacttgccataatctgaacatggatcactatcttagccttgggttccggaaagcagagcctgaagcttatgtgcagataccttgttaggtagtagggagtgatcccatggagrgaaagagggagagccactctaaggatgcattattgaattagccactgctaagggcagctgttgctcagtcccttggaactgagaaactttttgaaatactccttaaagtgtctgggcgtggtggctcatgcctgtaatcccagcactttgggaggctgaggtgggcggatcacctgaggtcggaagtttgagaccagcctggccaacatggtgaaaccccgtctccactagaaatacaaaaattagctgggcatggtggcgggtgcctgtaatcccagctactcgggagactgaggcaggaaaattgcttgagcctgggaggcggaggttgcagtgagctgagattgcgctacagcactccagcctgggcgacagagcgagactccatctccaaaaaaaaagaaaagaaaagaaaagaaatactctttaggactgtctggatgaatagctattttctagagaaaagaagaaacctttatctgccactcccatcccacaatggtcaaagattccaaagacttaccccaggctgggtatggtggctcaccagcactttgggaggccgaggcaggcagatcacttgaggtaaggagttcgagaccagcctggccaacatggtgaagtcccgtctctactaaaaatacaaaaattagccgggcatggtggcgcatgcctgtaatcccagctactcaggaggctgaggcaggagaattgcttgaacccaggaagtagaggttgcaatgaaccaagatcctgccactgcactccagcctggacgacagagcgagactccatctgaaaaaaaaaaggccgggcgcagtcgtcacgcctgtaatccctgcgctttgggaggctgaggtgggtggataacctgaggtcaggagttcgagaccagctgaccaacaagggaaaccccatctctgctaaaaatacaaaatatagctgggtgtggtggcaggtgcctgtagtcccagctacttgggaggcggagacaggagaattgcttgaacctgtgaggcagaggttgcagtgagctgagattgtgccactgcactccagcctgggtgacaaagcaagactctgtctcaaaaaaaaaaaaaaaaagaaaagaaagattgacctcatgggataactccgctccgctactagttcacacatgcatagtcactgcagccatcaatagcaaaggcccaggtgtggcacaggcctgaagcaagaatctatccagtagaactgcagtaatggctggagtaagagatagtgaatcaagaacatttgaaatgattcaaaagaaatgtctagtataccagttttggccaagccagagtccagaacaaggtagcctggggaaaggtttactgtatgttctatggagtgtgagtcagccttatcccttccttctttgagggcccttccactctccagtgggcccagggccgagcttcatccatcttagtctactcggtcctgctgtgggagcagctgagctcttacaaatactggtttccctggagtctgaattaagccagggtatgagagctcaataggccttacatacaatcctgtccagcccaggagactgcagagaaggaaactgaggcaggagtgggagtgtcatgcactgaggtctcagatagtcagtggctgagctggcgttataacctagggcactgcccaccatactgccttgcacttgagactactggagcctccagatgctgagtgcaaccccagctgatctgagcttagatacgtaacaagctgcaaaactacccgttttgtctcattttctagcagtaggatgggttcaggtcagaaatgggagagcattcagaataatcccaga

SEQ ID NO: 75479 - DNA, 2104 bp, Homo sapiens
tctgccttagcctcccgagtggttgggaccgcgggcttgcaccaccatgcccagctaatttcttttgttttttggtagagatggggttttgccatattgcccaagctttattctttttatagtggcgtttgggttaggtttgttccacttgccataatctgaacatggatcactatcttagccttgggttccggaaagcagagcctgaagcttatgtgcagataccttgttaggtagtagggagtgatcccatggagggaaagagggagagccactctaaggatgcattattgaattagccactgctaagggcagctgttgctcagtcccttggaactgagaaactttttgaaatactccttaaagtgkctgggcgtggtggctcatgcctgtaatcccagcactttgggaggctgaggtgggcggatcacctgaggtcggaagtttgagaccagcctggccaacatggtgaaaccccgtctccactagaaatacaaaaattagctgggcatggtggcgggtgcctgtaatcccagctactcgggagactgaggcaggaaaattgcttgagcctgggaggcggaggttgcagtgagctgagattgcgctacagcactccagcctgggcgacagagcgagactccatctccaaaaaaaaagaaaagaaaagaaaagaaatactctttaggactgtctggatgaatagctattttctagagaaaagaagaaacctttatctgccactcccatcccacaatggtcaaagattccaaagacttaccccaggctgggtatggtggctcaccagcactttgggaggccgaggcaggcagatcacttgaggtaaggagttcgagaccagcctggccaacatggtgaagtcccgtctctactaaaaatacaaaaattagccgggcatggtggcgcatgcctgtaatcccagctactcaggaggctgaggcaggagaattgcttgaacccaggaagtagaggttgcaatgaaccaagatcctgccactgcactccagcctggacgacagagcgagactccatctgaaaaaaaaaaggccgggcgcagtcgtcacgcctgtaatccctgcgctttgggaggctgaggtgggtggataacctgaggtcaggagttcgagaccagctgaccaacaagggaaaccccatctctgctaaaaatacaaaatatagctgggtgtggtggcaggtgcctgtagtcccagctacttgggaggcggagacaggagaattgcttgaacctgtgaggcagaggttgcagtgagctgagattgtgccactgcactccagcctgggtgacaaagcaagactctgtctcaaaaaaaaaaaaaaaaagaaaagaaagattgacctcatgggataactccgctccgctactagttcacacatgcatagtcactgcagccatcaatagcaaaggcccaggtgtggcacaggcctgaagcaagaatctatccagtagaactgcagtaatggctggagtaagagatagtgaatcaagaacatttgaaatgattcaaaagaaatgtctagtataccagttttggccaagccagagtccagaacaaggtagcctggggaaaggtttactgtatgttctatggagtgtgagtcagccttatcccttccttctttgagggcccttccactctccagtgggcccagggccgagcttcatccatcttagtctactcggtcctgctgtgggagcagctgagctcttacaaatactggtttccctggagtctgaattaagccagggtatgagagctcaataggccttacatacaatcctgtccagcccaggagactgcagagaaggaaactgaggcaggagtgggagtgtcatgcactgaggtctcagatagtcagtggctgagctggcgttataacctagggcactgcccaccatactgccttgcacttgagactactggagcctccagatgctgagtgcaaccccagctgatctgagcttagatacgtaacaagctgcaaaactacccgttttgtctcattttctagcagtaggatgggttcaggtcagaaatgggagagcattcagaataatcccaga

SEQ ID NO: 75480 - DNA, 1274 bp, Homo sapiens
acaacaaaataaggcaggttggacaagctgggtttagaaggcctctgtggcaggtttgctgtgctttccttgcagggtgggctgaaggccgtcatctggacagatgtgttccagacactggtcatgttcctcgggcagctggcagttatcatcgtggggtcagccaaggtgggcggcttggggcgtgtgtgggccgtggcttcccagcacggccgcatctctgggtttgagtaagtatacccctactcctggctggggtctgcagtgcctgggcgctgagcccatcctagaggctggtctcggctatagtaagcagaaggtaaactgggaagcctgaggtgtaacagcagacagtgggaaactggtcctgcagagatggagggtgattacaggtgcccggctagtgtttatagagagtcaggacattacctgggatgagtacctggaatgagcctggggtggaagaatggagcctccctctaactggctgtgctgtctctcgagtgcacccagcttcttgctttcagtgtcccccttggccctagcagtggtgtctctcctttcctgtccactgactcctgttgccaagagggcaggaaggctgtgtctctcaggctttgcacaatgactgggtggtgtctgttacaggctggatccagacccctttgtgcggcacaccttctggaccttggccttcgggggtgtcttcatgatgctctccttatacggggtgaaccaggctcaggtgcagcggtacctcagttcccgcacggagaaggctgctgtgctgtgagtgcagggacaggaagggagtggagcaaggtctaggggaaggggttccccagagataattggggtggggcaggatgccagagtgcatacacatccactgtggtcaggatgtgggtctcctttctggaggtcaggggcacacacctgagggtgtctgttaacgccggctctcctcctggcactgacctcttttgcagctcctgttatgcagtgttccccttccagcaggtgtccctctgcgtgggctgcctcaytggcctggtcatgttcgcgtattaccaggagtatcccatgagcattcagcaggctcaggcagccccagaccaggtgagaaggcgctgttctgttcccatgagggcaggcctggccccacaacaggagtgtctaggtaggaaaggactgactgcagaaaggactcccaccctgggtgggagacggttgtaaaatcctttcccactctgagatgctaggaatctagcatg

SEQ ID NO: 75481 - DNA, 829 bp, Homo sapiens
aataaccacaacgtgttatatccatacaatggaatattactcagccttaaaaatgaatgaagtactgatacacacttcaacatggatgaaccttgaaaacatcgtgctaagtgaaaaaagcccatcacaaagggacacatattgtatgattccgtttatgtgaaatgtccaaaacaggcagatttatagagacagaaaatacataagtattcaccaggggctgagtgtgggaagaaygagaacaactgtgaataggtacaggattctgggatcttcctaaaactagagaatggtgatgattttacagttctgtgaatatactaaaactcaaaaatattacacattaaaagggtggattttttgggtatgtgaattatatctcaattaagctgttattttaaaaatacgatacccatgaagctatcatatactattttggtctacatctctctttccataaatattagtttacataaatgagttctaacttacacagacgtttgtatcttgccttactctccgttaggttttaaggctcttcagtgttattacaaacacttcattgatattattgttcacagttgcctaatattccatcatatagttataactataacttaattctctactactgtgttactgggtgtttgaattcttttcccaggttttgttgttataaatagcatctttgttgaacatctcttcatataaactcttatctgcagtgtttcttttttttttttttttttggattgccttttttttttaggatagattcctaaagttgagatttctgggacaaaacagtcagctttaagatccctgctat

SEQ ID NO: 75482 - DNA, 829 bp, Homo sapiens
aataaccacaacgtgttatatccatacaatggaatattactcagccttaaaaatgaatgaagtactgatacacacttcaacatggatgaaccttgaaaacatcgtgctaagtgaaaaaagcccatcacaaagggacacatattgtatgattccgtttatgtgaaatgtccaaaacaggcagatttatagagacagaaaatacataagtattcaccaggggctgagtgtgggaagaatgagaacaactgtgaataggtacaggattctgggatcttcctaaaactagagaatggtgatgattttacagttctgtgaatatactaaaactcaaaaatattacacattaaaagggtggattttttgggtatgtgaattatatctcaattaagctgttattttaaaaatacgatacmcatgaagctatcatatactattttggtctacatctctctttccataaatattagtttacataaatgagttctaacttacacagacgtttgtatcttgccttactctccgttaggttttaaggctcttcagtgttattacaaacacttcattgatattattgttcacagttgcctaatattccatcatatagttataactataacttaattctctactactgtgttactgggtgtttgaattcttttcccaggttttgttgttataaatagcatctttgttgaacatctcttcatataaactcttatctgcagtgtttcttttttttttttttttttggattgccttttttttttaggatagattcctaaagttgagatttctgggacaaaacagtcagctttaagatccctgctat

SEQ ID NO: 75483 - DNA, 549 bp, Homo sapiens
cctcagcaagatggggggtggagctgcggggggcatgaagacaagacctggtggtcagggaggggtgactcaccttgcgatatacctctgacctcagaaagtccttaatcttgttcctgtgctgccccctgtaattctagtccacagctgttggttctgagctgaaaaatgagctttttgtgggtactctgagtctttttgtgggagkgggcctgaaggctcagactctaagaaaatggcctcctcccccacgctggcctctgggtagtgggtgggaggctgagggtggtaattgacagatggtgcggtgtttaacagatgacgggaaacaaaattactcagctgccgtgtctctccatcttccccatggaaggagatggccttcggactggaaacagacaatgacctcaatcaggaggctgtcagaggacagggaaagagagaagcgacggggtattaggggtattagggcaccatgaacaggtgtacaaaagacctgactcagaatcccatccctgccacacaccagctgggtgatcttcagcagat

SEQ ID NO: 75484 - DNA, 780 bp, Homo sapiens
caaacaaatgggagaacagccccttataaaaccatcagatctcatgagaactcactatcacaagaacagtaagagggtaaccacctgcatgattaaattacctcctactgggtccttttcatgacacgtgaggattatgggaactacaattcaagatgagatttgggtggggacacagccaaaccatatcaaacatcatttattaaatagtttttgccttggtgattttagatgccaccttaataatatacaatactaaaacttcatctgcacttggatctgtttttgaactttctgtattattctgttggtttgtctgtctattcatgtgtcagtaagacacttttcatcatggaggctttagactgtgatttaatgtctggaagaactcggccttccctctagtgtgttagtgttttcctggctgttactgcacatttatttttcaatacaaggctcagtatcaattgtatgtctccattaaaaaaacttggtttatttatgaggattacattaaatttctaaatttatgatgaactgacatttttatgttaacttgttctatctgaatataagagatgtctgtggttaaactcttcatttgtgtctttttaagaatgctttaaagttttcctcagatgtgttttatacatttcttttaaaatttattcttaagcactcaattttctttgtgcaacttgctttgtttccatttaatgtatcatatatagctgaacaggtcagtacatgttgayctatttcattttaaaaaatggatcc

SEQ ID NO: 75485 - DNA, 604 bp, Homo sapiens
caggcccccgacagctaaccatgtgcctctgcagagcagggggtgagtctagatgtccaaggggagtctccttttcttctccacccagccccagatcttgtccctccctaggttttttgtttggttggttggttggttgatttttggagatggagtctggctctgtcacctaggctggagtgcagtggtgcgatctctgctcactgcaaactctgcctcctgggttcacgccattctcctgcctcagcctcccgagtagctgggactacaggcgcccgccaccacgcccggctaatttttttgtatttttagtagaaacggggtttcaccatattagccaggatggtctcgatctcctgacctcgtgatccacccatcttggccccccaaagtgctgggattacaggcatgagccaccacacccggtgtccctccctaggtgtttttaatcagccatgccagtaacctggcagtgccactgggcattctgtaccccttattcccttcccctgctggggctgtgccaggagccacctgctcgtctcttcagggctgtaggactgccgtgttactgcaaaatgatcttcaaamtcagattggatcc

SEQ ID NO: 75486 - DNA, 694 bp, Homo sapiens
gcgtaacttcgtaacttcgagaagagtctggctgtcacactggctcttcaccctggctggtggaaggcagccgcctcatgtgaaaagtcagaggccccactgagctattaacactaatgcggactamggactgcggacagcagagctaaaagagcactgtaacgtgccctctggggctctgagagtcgcaggcacccccggttggagtctgctgtggggcctgcatggagttcaatcctgccggttctaaagcgtggggtcagttcctacacctgctcacctgtgcgctccctcccatgaggggtggaacgctgcaggtccgagtgagtggggttgggtcctaccagcgccaagtggccagccgattccagcactcattcattccagctcccgtactcgttcgctcgtgcactccctcccgcgaggagctgagagcagcgagcggggctgagtaaatgaggcacccctgtcaggaattccgcgaaggggtcagggaaatatcctgcttcattaggacaattaacacaatacaattttcagtgtcgaaaccatctgaatatcttataatggagaactgataaaaacaaattacacctttgcatatgaagagatactctgcagccattataaaaatcctatttaaaagaatatatatacaaaaagattaaaatagagatcacaatattttgagtgt

SEQ ID NO: 75487 - DNA, 694 bp, Homo sapiens
gcgtaacttcgtaacttcgagaagagtctggctgtcacactggctcttcaccctggctggtggaaggcagccgcctcatgtgaaaagtcagaggccccactgagctattaacactaatgcggactaaggactgcggacagcagagctaaaagagcactgtaacgtgccctctggggctctgagagtcgcaggcacccccggttggagtctgctgtggggcctgcatggagttcaatcctgccggttctaaagygtggggtcagttcctacacctgctcacctgtgcgctccctcccatgaggggtggaacgctgcaggtccgagtgagtggggttgggtcctaccagcgccaagtggccagccgattccagcactcattcattccagctcccgtactcgttcgctcgtgcactccctcccgcgaggagctgagagcagcgagcggggctgagtaaatgaggcacccctgtcaggaattccgcgaaggggtcagggaaatatcctgcttcattaggacaattaacacaatacaattttcagtgtcgaaaccatctgaatatcttataatggagaactgataaaaacaaattacacctttgcatatgaagagatactctgcagccattataaaaatcctatttaaaagaatatatatacaaaaagattaaaatagagatcacaatattttgagtgt

SEQ ID NO: 75488 - DNA, 742 bp, Homo sapiens
gcatgtgtatacaaaagcacacatcaatgagttaaaagaaggtgaaatcctgtggttaagccaaggtccagtttaaaatcatgtcattcctaagtgctcattctttattcttaaatcaaagtagagccatcaaaaattcgtcatactatctgtgttaacaaataccattttggtggatggattgtggctacttttattatttcacttaatttagggagacacttcttgaaatattggctgatacaaagcaatgtcacagagtaagaaaatgttgccaatactgatagcattatcaatgctgagcccttctccagtttgtagaattaatcataggcatcattcacaattagtagacatttggctgyccaaacaaacttgctgtctcttccacatcttattatgcaaactttcctatttggttttactgatcggtgtctccatctcctctctctcttgttttatttatttgtatagtacaatccctctaaaagaagataaatgagacccaaataataaaaaagaatcatgcaaaacctaagactgtattattgcaaggttaatgaatgaaatcacaagggctatcctgtcatctagccagctggaagttctgggagatccatccacccaaagaatccaaattggcgtcagtttcatctgtggtttggcgccatcttgtggcacttgtttacattagcttaattagagatggggaccatgctgcctttcgtggccacctggtact

SEQ ID NO: 75489 - DNA, 547 bp, Homo sapiens
gaagctggaagaggtaaggaaaaggattcctctctggatcttccagaaactatttcagccctgtcaaccccccgatattagcccagtgaagcccatgttagacatccaaygtgcagaactgtaagataataagtgtgtgttgttctaagccactaaatttatagtaatttgttatagcagcagcagtaaattaattccccaacctaggatagaagttgaagaaaacaaagcttaattgaggaggcggtgaattatagtaacagaagcagatggtaacttgaggaaggaacgataatttggggaaggaacagaagttaattctcatgtaggatccatcccagatgttggggaacaatagtgggtactatcagataattttattttttcctctttggcctcttgctcatgatagatctgagaagacacttccacattgcttatgctggctggatattaaaatatgttgcaagtgtctcattctccaattagtagaaagggttataaccagatacaacaagcaagtatgtaaccaaagctgctaaataat

SEQ ID NO: 75490 - DNA, 547 bp, Homo sapiens
gaagctggaagaggtaaggaaaaggattcctctctggatcttccagaaactatttcagccctgtcaaccccccgatattagcccagtgaagcccatgttagacatccaacgtgcagaactgtaagataataagtgtgtgttgttctaagccactaaatttatagtaatttgttatagcagcagcagtaaattaattccccaacctaggatagaagttgaagaaaacaaagcttaattgaggaggcggtgaattatagtaacagaagcagatggtracttgaggaaggaacgataatttggggaaggaacagaagttaattctcatgtaggatccatcccagatgttggggaacaatagtgggtactatcagataattttattttttcctctttggcctcttgctcatgatagatctgagaagacacttccacattgcttatgctggctggatattaaaatatgttgcaagtgtctcattctccaattagtagaaagggttataaccagatacaacaagcaagtatgtaaccaaagctgctaaataat

SEQ ID NO: 75491 - DNA, 734 bp, Homo sapiens
gaaaaatccaaacctggatggctgcctgcagggtggacccaagaacagctttacggatatgaaaagtacagcagccaaatttagcaactagaaacagctagacgtcagagaagtggacaaggcaaaatactgcctgtccttaatgcctggaaatatttgttgaaatcttaaaagattagaaaagggattctgtttttaaccagggtacaatttttaaactaggcaatagtagcaactaaatgatatagctacacatcaggtatttgtacaaaatgttcttttgttttcgtgtgtgaaaagtgttttggtaatgtatttttctattcaatataggggtagctatattcactagcatattccattacttccagtcattcctaatacattacagagaacaaataaccactctgttcctcggttcactcaatctcttgaccactggagtttttccttyctttctttttttttttttttaattttttctcccctacttagaataaggataatccctctcctggttaaatccataaatatactattggaataaattcagattattgggagtaagtaaaccatttttttgtgttgtaaagcaataaaatatttcgaattcattttcttctttttcttaatattattaaatatcaagttttgcctacaggaatgaattgagaaggagtattttatacaaaaagaaattttattttggattctgtattttaaaatattttgta

SEQ ID NO: 75492 - DNA, 645 bp, Homo sapiens
caatctagatgtaagaggaaaacggtaggttaaagtgggaagagagtgagtgtgtggcagaagcaccctctgagaagctgagctggggtggcaggagcagggaccacagatggcaaatgcacttgcacccgtgtctgctcataccccagccttcatcctttccaggcagccagacgtcttgtctattgggtttttcagttgagctgatcctttactgactcagcaactatttttttsacaacctattatgtgccaaatggtgttctaagtactcgtgttgaacacgtcggaaaagtttcctggcctgaaggggcttatatttctggaattttgcattgctctatgccccaggtatacacataggagaagcacgtgggaacaaaaacgaaaaagcaagcaaagaagagagggaaaaaaataagactggtggaaataagctgaggctttctctttccaagcagaccatttctaaaccaagtgagtaaaagatttcctgaactgaattcaatcctacagctatgagtgatctctcttttctcttcctttctgtctttcttcctcccgttctctttttctctctctctttctccccatggagaccgagaaaggacaaactcttttctgttgccaactgcatttccccac

SEQ ID NO: 75493 - DNA, 598 bp, Homo sapiens
atttactagaaatttgagcaagatacagaattatcaattcttaaaaaacattatgtaccttaacattggattccaagaaatgatgcatttttaatcactaatgtgatgtgacacatgtcaacagcagggaaagggttacatcagttatgctgttctaggagtagtcagcactgaagaattcctgcacctcaggaaaatctaaacacgttcatagcaaaaaaaaaagagataggatttacatattttcaaacaataaaaccaacatgtttcactaagtaagctaaaaggacaattaaaaaatataaagagaataagaaagtcacgtataatcccactctctaaagaaaactgctgtttctattttattgtatttcatttaaagctctctttgatttatatgttgtatatatatgttctgtctctatgcatgyctatatatatatatatacatatatatgcatgtttatacatgtacatagtgtggttatataaaagctgaaggacttttttttttttgcttttaactaaaaaatcatttaaaataaagatctgtaatagaaccctcccaattacaagaaaaagaaattaagaagcccaa

SEQ ID NO: 75494 - DNA, 598 bp, Homo sapiens
atttactagaaatttgagcaagatacagaattatcaattcttaaaaaacattatgtaccttaacattggattccaagaaatgatgcatttttaatcactaatgtgatgtgacacatgtcaacagcagggaaagggttacatcagttatgctgttctaggagtagtcagcactgaagaattcctgcacctcaggaaaatctaaacacgttcatagcaaaaaaaaaagagataggatttacatattttcaaacaataaaaccaacatgtttcactaagtaagctaaaaggacaattaaaaaatataaagagaataagaaagtcacgtataatcccactctctaaagaaaactgctgtttctattttattgtatttcatttaaagctctctttgatttatatgttgtatatatatgttctgtctctatgcatgcytatatatatatatatacatatatatgcatgtttatacatgtacatagtgtggttatataaaagctgaaggacttttttttttttgcttttaactaaaaaatcatttaaaataaagatctgtaatagaaccctcccaattacaagaaaaagaaattaagaagcccaa

SEQ ID NO: 75495 - DNA, 995 bp, Homo sapiens
cagggtaaattgtctttccttccttttcactgcctcggtgtctggctcttaacaaacaagacgtggtctttggcccagttgcaattagttgtactttcttatttcgcacacagcactttcatgagctgtgaacatatgcccctttcagtgtggccggtccacctgggttctctatgagcaagarccacttcattcacatttacagggcattgtgattgttagtatcattgtcaacctggctgtttcccgcaatgaactgtgagcccatggagcacatatcacggcgtgcctccatctccagtgtttgcaatggcggtactcttgctgccaggtaggtctcatctcaagcatcacctcctttcttctgacctcttaaagtattacctccaggttgcatttcttcactgagttcatcaatataaaatcacctcctatgtgtctgctgcctgtttattatccgtctcccctccggagctctggcttgcttgcttcagtgctctcagcatgcagaaccgtgccttgtgtatgaagtgcttgaaaggattattgcaaaccattaataattttttattgtttgtaaagaataaataaacatgattttttgaacagcaaaaataccatggatatttgatgttaactgcctccatatgccatgttcacatgttcacatactgtgtcctgttgtcacttaaagaccagatataagtggcctcccctgggtttgtttacaagaatgggggaggccccatggaagaggtagtatgtgcacactttcaatgagttttgagatcaacgttactatcccattgtacatatgtgaaaatgaagctcatgtattttgaaaaacttgccaggatgcacctgtcactggaaacagctaaatgtaaatctcaggttgcaatgactccaagtgcaaagttgttcagctctccatgctaggttagggaaatactgaggggcagatggcctcccagtcagctccaccagggctggct

SEQ ID NO: 75496 - DNA, 1393 bp, Homo sapiens
aatgaaagaaggagctttgtgtgtgttttctacctattagtttcttaacttcctggaacttcagcttcctcacctgacaaggtaatgacagagtgagaagatgtggaaaccaacagtgtttgctttatgattaattgtaatcacatgtttatttttctttttttaattgtagaatgaggagtaaagatgctcttgtacttcctttcatatttcttttatccaggctttggccattttatatcatatccttatgatatttgaaaaaactaggctggacacagcccatacctgtgctktgtcagcacttcggaaggctgaggcaggcggatcacgtgagtccaggagttcaagaccagcctgtccaacacagaaaacgcatctctattaaaaatacaaaaaattgagtgttgtggcacacatctgtgattccagctactcaggaggctgaggcataagaatcacttgaacctgggcggtggaggttgctgtgagccaagatcatgccactgcactccagcctgggtgacagagagatactctgtctcaataaataaataagtgagaacaactaaatgctactaatttgggcaatttatatgtacccgaggtagagagagacagcttctatattgattccttttgaatctatgaaaatttcaaagagaatagcattatgttgtcaggatcccattttaatagttctaattttggacatttccaacttgaagttttaatgttttgctaaagtgattatactaattttgaatgcagcaacatacttttgcaaaaccgtaactatataataagacatacttgattctttaaccccaactgcatggtctagttcaaacaatacattgataatgaaaactggccagtttagtaagtgtgacaaaaaaagcagatatttcagtttccttatagaagtaaaataaggataataaaaccttgtcagaatcattgtgaatatcataaataatgtatgtaaatttcttggcaccatttagtagtcaatatattgtaattcttacattatttaggggaaagagttctctaaagtgcagaaagaaacaagaatttttgttgaatatttagcaaacatacaaacacaatgaagaagtagggagaataataaggactaaaggaaggagaaagaggagataaaagaaaaaaggagaaggccaactatcgttttccaattgcctaagtcatagatcgtgaacaacaaaggatgcattattttcctgtctccttgaaggatgcttgaaattcaatgagttcttcttttcccactgttcgtatgtgttcatgaaggtggattatcaagtaaaagtagaggtaaaatggcatttctggaattgcatataggatgctggaaaaccaaatcacagga

SEQ ID NO: 75497 - DNA, 1393 bp, Homo sapiens
aatgaaagaaggagctttgtgtgtgttttctacctattagtttcttaacttcctggaacttcagcttcctcacctgacaaggtaatgacagagtgagaagatgtggaaaccaacagtgtttgctttatgattaattgtaatcacatgtttatttttctttttttaattgtagaatgaggagtaaagatgctcttgtacttcctttcatatttcttttatccaggctttggccattttatatcatatccttatgatatttgaaaaaactaggctggacacagcccatacctgtgctttgtcagcacttcggaaggctgaggcaggcggatcacgtgagtccaggagttcaagaccagcctgtccaacacagaaaacgcatctctattaaaaatacaaaaaattgagtgttgtggcacacatctgtgattccagctactcaggaggctgaggcataagaatcacttgaaccygggcggtggaggttgctgtgagccaagatcatgccactgcactccagcctgggtgacagagagatactctgtctcaataaataaataagtgagaacaactaaatgctactaatttgggcaatttatatgtacccgaggtagagagagacagcttctatattgattccttttgaatctatgaaaatttcaaagagaatagcattatgttgtcaggatcccattttaatagttctaattttggacatttccaacttgaagttttaatgttttgctaaagtgattatactaattttgaatgcagcaacatacttttgcaaaaccgtaactatataataagacatacttgattctttaaccccaactgcatggtctagttcaaacaatacattgataatgaaaactggccagtttagtaagtgtgacaaaaaaagcagatatttcagtttccttatagaagtaaaataaggataataaaaccttgtcagaatcattgtgaatatcataaataatgtatgtaaatttcttggcaccatttagtagtcaatatattgtaattcttacattatttaggggaaagagttctctaaagtgcagaaagaaacaagaatttttgttgaatatttagcaaacatacaaacacaatgaagaagtagggagaataataaggactaaaggaaggagaaagaggagataaaagaaaaaaggagaaggccaactatcgttttccaattgcctaagtcatagatcgtgaacaacaaaggatgcattattttcctgtctccttgaaggatgcttgaaattcaatgagttcttcttttcccactgttcgtatgtgttcatgaaggtggattatcaagtaaaagtagaggtaaaatggcatttctggaattgcatataggatgctggaaaaccaaatcacagga

SEQ ID NO: 75498 - DNA, 1393 bp, Homo sapiens
aatgaaagaaggagctttgtgtgtgttttctacctattagtttcttaacttcctggaacttcagcttcctcacctgacaaggtaatgacagagtgagaagatgtggaaaccaacagtgtttgctttatgattaattgtaatcacatgtttatttttctttttttaattgtagaatgaggagtaaagatgctcttgtacttcctttcatatttcttttatccaggctttggccattttatatcatatccttatgatatttgaaaaaactaggctggacacagcccatacctgtgctttgtcagcacttcggaaggctgaggcaggcggatcacgtgagtccaggagttcaagaccagcctgtccaacacagaaaacgcatctctattaaaaatacaaaaaattgagtgttgtggcacacatctgtgattccagctactcaggaggctgaggcataagaatcacttgaacctgggcggtggaggttgctgtgagccaagatcatgccactgcactccagcctgggtgacagagagatactctgtctcaataaataaataagtgagaacaactaaatgctactaatttgggcaatttatatgtacccgaggtagrgagagacagcttctatattgattccttttgaatctatgaaaatttcaaagagaatagcattatgttgtcaggatcccattttaatagttctaattttggacatttccaacttgaagttttaatgttttgctaaagtgattatactaattttgaatgcagcaacatacttttgcaaaaccgtaactatataataagacatacttgattctttaaccccaactgcatggtctagttcaaacaatacattgataatgaaaactggccagtttagtaagtgtgacaaaaaaagcagatatttcagtttccttatagaagtaaaataaggataataaaaccttgtcagaatcattgtgaatatcataaataatgtatgtaaatttcttggcaccatttagtagtcaatatattgtaattcttacattatttaggggaaagagttctctaaagtgcagaaagaaacaagaatttttgttgaatatttagcaaacatacaaacacaatgaagaagtagggagaataataaggactaaaggaaggagaaagaggagataaaagaaaaaaggagaaggccaactatcgttttccaattgcctaagtcatagatcgtgaacaacaaaggatgcattattttcctgtctccttgaaggatgcttgaaattcaatgagttcttcttttcccactgttcgtatgtgttcatgaaggtggattatcaagtaaaagtagaggtaaaatggcatttctggaattgcatataggatgctggaaaaccaaatcacagga

SEQ ID NO: 75499 - DNA, 782 bp, Homo sapiens
  misc_feature (1)...(782): n = A,T,C or G
ataaataaagttgatttccttgtttgtaatgtgcacatcatcccagtccaaagtgttcttgaattggcaaggatctccaagacagtgttaagaccatgggaaaaccttgcaccttggcactgagagctgagctgcccgtgtccagggaaaggctctgtgaaactgttagatactggctgttggggtttgagtgtagaacagagtccagtggttgaagagagcacattcccttctgttagaaaatagtgctcttccctcacttgaagatgttgcagataccactgccctacaagacaatgtgtatccacatcaatagccggtctctcctgcactcctggccagcagaccaatcactggggaaaggcagggcctaccrtggaggaaagagaccgtgcatcgtcagggctgcaggacccagctgtgttccaccagggagaacctgaaaagtacggacaggactgcacattgaagatgctgaatcacaggggtgcaaaatgaaggtggataagacataatttatccatatgggagaattctactaagataaacacaagatgtagcactctgtcaaggccctcggaagattattctaacgttttgctacgatggcttttggaagctaggctaaagaagaactcgtacgacatgaagtttctatcatcaaatggtacaagaaggaannnnnnnnnnnnnnnnnnnnnnnnnnnnnnnnnnnnnnnnnnnnnnnnnnnnnnnnnnnnnnnnnnnnnnnnnnnnnnnnnnnnnnnnnnnnnnnnnnnnat

SEQ ID NO: 75500 - DNA, 730 bp, Homo sapiens
gtactgggcaaaagggaattaagactatttgtcagacttagtacgtgacctgagttaagacactgtatatatgcaggtacatatataaacctgtatgtatcttgggagatctcctctgtttgtcttcactggacaacaaaatcatagagaaaaaatgcttgtgacacacacaacaacctctcccagccttgcacaaacaggcacaccctagagaaacaacatggttagaaaggcagccttgasgtcaaggtgacgaaaggataagtataagaccagaggtaagatcactgcttgagaagttgttaaaataatctgtcaagaaagaatcaatacctggactatgatagtgacaactcaagtggagagaagtcaagaaagttgagaaaccaaagtcagtggaataacaggacgcagaagaaagagggtggaattcaagagcagtcagggaccaggtgtttcatgatgctactcaacaagataaaaaagatataaaaaggaaagggtgatggggaagacaatgactcagttttgcataagttcaatgtaagatacttgtgggacacactaataatcactcttagcaatgcttttgatagttttagacattcagattgtccaaggtcactgaaacaatggaagtcaatgagacaggctggaggactaaataaattggatgcagggtgtgagacacggtatgcacaaaagagaacttatttgtcattttaagtgg

SEQ ID NO: 75501 - DNA, 1725 bp, Homo sapiens
ttacccatttttaatatatttcataatcatccatattttaaaagtccatgtattcacataaatacacacagagcacacccagccacacacacacacacacaccaaatcaccaaagattagtacatttacccagtgtcccgatataattggaagacaagcaaatgacaacttcaatttaatactgaagtctgtgatgatgcctttgacaccattccatcagtgctgtgtccatctctcttacacaagaggatagtttgggtggcagcaatactgttttgcagatttgaagactttccaggcctctttgttatctctccatgccagcatggaaatttcgtcctccgctcactccctggatgagctcatccttattcatggctttgcacaccataattgtaactctagcttcaatttctgtcctgagcatcaactcatatttctatctgcctatacaatgtctcatctaaacatcagaaatacattgcagacttacatatctaaaaacagacctcttttgtttcccatctcctatctcaacatgacacttcactagccttcctcatctcaataaatataatcaatattcatccaattgttagtccaaagcccaggagtcttgatttctccctttctttcacatccatttttaagtccaccggcacattctgttgactctacccttaaatattcctggaatcagtttgctttttggcactttctccattgtcaccatcatcccagtcactatcatctctcatctcaactactggggacatctctcaaatggttctccaagtccactcttggcttctacactmtctccttcaccctgaagccattgtgatattttggaaatataaatcagtttatgtggctccctttactcctccaccatcatttaaaacaatgacacttaaaatccagtctctctagcctcatctcttcccccaactcagtccacagcatcctgctgttactcacatatagcaagttctaagggcttttcacttgctcttctctctacctaaaatattcttccccacatgcatgataatgtatatctgtgctctactgtcaccccttagagtttgtcttcattactctttccaaaataacattcctctttgtatatttccttattttgtttcttttctgaagtggcatttatgttttcacatggtaattttcttgctcattcactaaaatatatgccttatgagatgtttttatctcctatatctaaaacaatgcttggcaaagagtaagaggtaaaatattggtcaaattgatgtacaaatgaataacacaaaagtctatcacctatcacagagaagccagaggaagcatctaccaggtgagccaataccaggatgtcattgggaaactacagcgattcctcatggcatagccatgatcacggacaatctactttacagggtgaagcagactggaggaaacttctccacatcatgggggaagacagtagaaactaccagagaatccatgaagactaaagaacaaacagaaagagtccaagagaatttctgcagagatgtgttattttgttttctgtggtgtattttgggggccagtcctaagtcaaggcacaaagtcaggtcagatgacacttcttgtcccttcataccccaaggcatgttggtcaatcagttcttgctgatcttatgaagaaggagtcctgccagcttcagaaaactgtctttgggt

SEQ ID NO: 75502 - DNA, 669 bp, Homo sapiens
attatggcacaggttgtacttttctaaagaataggcattgttaaaccataacctgccatggcttagcttgttttcctgtaagttgtttgctgccccaaagtcatgtaactgggcttgggtaggtggggggtgttacttcccacctacatcatcaccatagacaacatcaccactgagatatttttcagatttagcatttcagcagaccaagagctgccaccaagttctgagactccctcccaaaaactgactcagctgcatgaaggctgttttagacacctctgtgatttcatcagttgtttcagtttcccagccccctgcttgccaaagtaccctaaaaaacccacaccttcaaattctcatggaasggtgggtttaagaagtttctccctgttctcttcacttggctggcattgtgatattaaactcatttctttgctgtaatacctgttcttctcagtacatttgactttctcggcagcaggctagatgaacctgttgcactattaccactcctctatccaaaatccaccagggcagttatgggtcagaactttagaagatgacagaaggcgaaggtcatctttactttggatcccagaggacaacaactaaccagttagcagtgccattgccacgctggtttgttctatactaacccataaggaa

SEQ ID NO: 75503 - DNA, 578 bp, Homo sapiens
aaacaggaaacaactctctggggtacagatgaccaaggctggtgagcagtcatgcagagggactcagagtcccactgtaggatgagtastgtatagtacatggtacaagggagacaagccccttcttcctgaaatgagcctccagcatattttactgacaaagcttaacattgttctcactgtaaagaagtccttaaatggtgcaatcattataatgaaagagatactgaagaatgaactctttgctaagaggcaacacattgataaactggcacgctaagatactgaacacttttatattttgtcttaaatataaggattctattttttaaaatattaggccaaacagcaaatctctgattttggttttttgctttgcttttttgaattgaattatttccaataggtgatgcaatgaaagttcagacattttgcaaactattaaattagttaattggtgtttcagtgaatgcaatgcttgtataagaaccattaaatataaaaacataaagaaatacctatttcctcttgtataattttttagaagttgtctcagacaaagagggtatagtgaaata

SEQ ID NO: 75504 - DNA, 1043 bp, Homo sapiens
aacttcttcataccccagagaagttctataatatggctggcagtaaactgagaaaaacaaaaattggggaatgcagaagtagaagcactccaaaaatcacactttcacccacacagactcctttttgggctctttttaaaaacaacaaagtatcatattgaacaatctagctggtgtccaaaaatagtggcctggggagtcactgccggagcatgctggcctcagacacaggaatgtacaccctggagactcccaggggaagtccccattttagcttcacacggtggccataatgaaacctcacctcgtgcttctcatggtgaggattaagtggtgaagtccagatgtgcaccagcagcacaatttccaagtcatgttatttttgttaaaaatgaactagccaggttgtgctgtggtttttcaatagaagttggtgaggggagacagtagttagtaaggaaaataactaatagctgaatgaaaccccacaaaattgttttttagtctcactaactccaaatcccccaaaacagaaaatgattctgtaattataagagatataatttttcttcccttagaagaagcaaggtraacaaggaatattgctttctaagaaataaagtattttcttatgctggacaaatcatgtttccttaacataaagaactttatagttacatgtaaattagttaactctggattttattagagttttacttaagaagattatgtaaaatatgaataacatctcaattttatgtaatcatagctttactatgagccttcactcaaaccagactgagctcaaacagttgctaaagtatcagaagcaagccctcacaaccctgctgttcctgtcgcctggagagaagatgacaggaacagcaaggttgtgaggacaacaagctcatgctgttcctgtcacctggagagatgagaaattttatcaagcatattttacatatcccagatgccacgctttcatattcccacacagtagctaagaaaaccatcaggatgactttgtgaggaaggaattcttt

SEQ ID NO: 75505 - DNA, 1043 bp, Homo sapiens
aacttcttcataccccagagaagttctataatatggctggcagtaaactgagaaaaacaaaaattggggaatgcagaagtagaagcactccaaaaatcacactttcacccacacagactcctttttgggctctttttaaaaacaacaaagtatcatattgaacaatctagctggtgtccaaaaatagtggcctggggagtcactgccggagcatgctggcctcagacacaggaatgtacaccctggagactcccaggggaagtccccattttagcttcacacggtggccataatgaaacctcacctcgtgcttctcatggtgaggattaagtggtgaagtccagatgtgcaccagcagcacaatttccaagtcatgttatttttgttaaaaatgaactagccaggttgtgctgtggtttttcaatagaagttggtgaggggagacagtagttagtaaggaaaataactaatagctgaatgaaaccccacaaaattgttttttagtctcactaactccaaatcccccaaaacagaaaatgattctgtaattataagagatataatttttcttcccttagaagaagcaaggtaaacaaggaatattgctttctaagaaataaagtattttcttatgctggacaaatcatgtttccttaacataaagaactttatagttacatgtaaattagttaactctggattttattagagttttacttaagaagattatgtaaaatatgaataacatctcaattttatgtaatyatagctttactatgagccttcactcaaaccagactgagctcaaacagttgctaaagtatcagaagcaagccctcacaaccctgctgttcctgtcgcctggagagaagatgacaggaacagcaaggttgtgaggacaacaagctcatgctgttcctgtcacctggagagatgagaaattttatcaagcatattttacatatcccagatgccacgctttcatattcccacacagtagctaagaaaaccatcaggatgactttgtgaggaaggaattcttt

SEQ ID NO: 75506 - DNA, 1423 bp, Homo sapiens
ggagagagaaataaaatctttaatagaccaagttctatgagagcacaaaattaaagtcttttatttgaagatcttagcctgttttccaaattcagtgcagccagttagacactgawtctgtctggtgaaacaagcatttttgtattttgggggactgctgctgcttctgactccaaattaaggattttttttttttctaaaaaagatggctcatgcaaaaatcactctttggtgtaaatatctagtcttcaagcaattcttgtaatgcaatcagaaagaaaaaaatccatggtttgggaggcaaaatttttgtgttctaaattctatataactgagttcatttgcttaactgcaaagcaggagctgctagtgcctgtctgtactgaggttcagagagactgtgggaatatgggggaattagaggctatctgaggctcttcaacacaataacccaagaagctatttaaatgctctttaaggtatttacataaatattactattctcattgtgcttttattttgtgttatcatgattataattgaagtgtctactgttactgcctcctgatctttgctagctatggagcatggactgggcttttagagcagcagccccaaaggaacctaaacattaaagcagagctgccctcaatggtttaacctgtgtgactctgcctatgacagccccacccacccatcttcactggatccaaatcaggagcaaggccgttggggtacctggtgggggtgatgctgtcaggggaggagcccaaaagggcaagctcaaatttgaatgtgaagggccaatgcactgtcagactaagacagagaaccatcattaattgaagtgagatttttctggcctgagacttgcagggaggcaagaagacactctggacaccactatggacaggtaaagaggcagtcttctcgtgggtgattgcactggccttcctctcagagcaaatctgagtaatgagactggtagctatccctttctctcatgtaactgtctgactgataagatcagcttgatcaatatgcatatatattttttgatctgtctccttttcttctattcagatcttatacgctgtcagcccaattctttctgtttcagacttctcttgatttccctctttttcatgtggcaaaagaagtagtgcgtacaatgtactgattcgtcctgagatttgtaccatggttgaaactaatttatggtaataatattaacatagcaaatctttagagactcaaatcatgaaaaggtaatagcagtactgtactaaaaacggtagtgctaattttcgtaataattttgtaaatattcaacagtaaaacaacttgaagacacactttcctagggaggcgttactgaaataatttagctatagtaagaaaatttgtaattttagaaatgcca

SEQ ID NO: 75507 - DNA, 1423 bp, Homo sapiens
ggagagagaaataaaatctttaatagaccaagttctatgagagcacaaaattaaagtcttttatttgaagatcttagcctgttttccaaattcagtgcagccagttagacactgaatctgtctggtgaaacaagcatttttgtattttgggggactgctgctgcttctgactccaaattaaggattttttttttttctaaaaaagatggctcatgcaaaaatcactctttggtgtaaatatctagtcttcaagcaattcttgtaatgcaatcagaaagaaaaaaatccatggtttgggaggcaaaatttttgtgttctaaattctatataactgagttcatttgcttaactgcaaagcaggagctgctagtgcctgtctgtactgaggttcagagagactgtgggaatatgggggaattagaggctatctgaggctcttcaacacaataacccaagaagctatttaaatgctctttaaggtatttacataaawattactattctcattgtgcttttattttgtgttatcatgattataattgaagtgtctactgttactgcctcctgatctttgctagctatggagcatggactgggcttttagagcagcagccccaaaggaacctaaacattaaagcagagctgccctcaatggtttaacctgtgtgactctgcctatgacagccccacccacccatcttcactggatccaaatcaggagcaaggccgttggggtacctggtgggggtgatgctgtcaggggaggagcccaaaagggcaagctcaaatttgaatgtgaagggccaatgcactgtcagactaagacagagaaccatcattaattgaagtgagatttttctggcctgagacttgcagggaggcaagaagacactctggacaccactatggacaggtaaagaggcagtcttctcgtgggtgattgcactggccttcctctcagagcaaatctgagtaatgagactggtagctatccctttctctcatgtaactgtctgactgataagatcagcttgatcaatatgcatatatattttttgatctgtctccttttcttctattcagatcttatacgctgtcagcccaattctttctgtttcagacttctcttgatttccctctttttcatgtggcaaaagaagtagtgcgtacaatgtactgattcgtcctgagatttgtaccatggttgaaactaatttatggtaataatattaacatagcaaatctttagagactcaaatcatgaaaaggtaatagcagtactgtactaaaaacggtagtgctaattttcgtaataattttgtaaatattcaacagtaaaacaacttgaagacacactttcctagggaggcgttactgaaataatttagctatagtaagaaaatttgtaattttagaaatgcca

SEQ ID NO: 75508 - DNA, 1220 bp, Homo sapiens
gcccaggagggtaagttaatataagagggatttattggtaagagatgatgcttaatctgtttaacactgggcctcaaagagagaatttcttttcttctgtacttattaagcacctattatgtgttgagcttatatatacaaagggttattatatgctaatatagtaatagtaatggtggttggtcctatggtaattaccataaaaattattatccttttaaaataaagctaattattattggatcttttttagtattcattttatgttttttatgtttttgattttttaaaagacaatctcaccctgttacccaggctggagtgcagaggtgcaatcatagctttctgcagtcttgaactcctgggctcaagcaatcctcctgccttggcctcccaaagtgttgggatacagtcatgagccactgcatctggcctaggatccatttagattaaaatatgcattttaaattttaaaataatatggctaatttttaccttatgtaatgtgtatactggyaataaatctagtttgctgcctaaagtttaaagtgctttccagtaagcttcatgtacgtgaggggagacatttaaagtgaaacagacagccaggtgtggtggctcacgcctgtaatcccagcactctgggaggctgaggtgggtggatcgcttgagccctggagttcaagaccagcctgagcaacatggcaaaacgctgtttctataacaaaaattagccgggcatggtggcatgtgcctgtggtcccagctactagggggctgaggcaggagaatcgttggagcccaggaggtcaaggctgcactgagcagtgcttgcgccactgcactccagcctgggtgacaggaccagaccttgcctcaaaaaaataagaagaaaaattaaaaataaatggaaacaactacaaagagctgttgtcctagatgagctacttagttaggctgatattttggtatttaacttttaaagtcagggtctgtcacctgcactacattattaaaatatcaattctcaatgtatatccacacaaagactggtacgtgaatgttcatagtacctttattcacaaaaccccaaagtagagactatccaaatatccatcaacaagtgaacaaataaacaaaatgtgctatatccatgcaatggaataccaccctgcagtacaaagaagctacttggggatgaatcccaaagtcatgacgct

SEQ ID NO: 75509 - DNA, 1220 bp, Homo sapiens
gcccaggagggtaagttaatataagagggatttattggtaagagatgatgcttaatctgtttaacactgggcctcaaagagagaatttcttttcttctgtacttattaagcacctattatgtgttgagcttatatatacaaagggttattatatgctaatatagtaatagtaatggtggttggtcctatggtaattaccataaaaattattatccttttaaaataaagctaattattattggatcttttttagtattcattttatgttttttatgtttttgattttttaaaagacaatctcaccctgttacccaggctggagtgcagaggtgcaatcatagctttctgcagtcttgaactcctgggctcaagcaatcctcctgccttggcctcccaaagtgttgggatacagtcatgagccactgcatctggcctaggatccatttagattaaaatatgcattttaaattttaaaataatatggctaatttttaccttatgtaatgtgtatactggcaataaatctagtttgctgcctaaagtttaaagtgctttccartaagcttcatgtacgtgaggggagacatttaaagtgaaacagacagccaggtgtggtggctcacgcctgtaatcccagcactctgggaggctgaggtgggtggatcgcttgagccctggagttcaagaccagcctgagcaacatggcaaaacgctgtttctataacaaaaattagccgggcatggtggcatgtgcctgtggtcccagctactagggggctgaggcaggagaatcgttggagcccaggaggtcaaggctgcactgagcagtgcttgcgccactgcactccagcctgggtgacaggaccagaccttgcctcaaaaaaataagaagaaaaattaaaaataaatggaaacaactacaaagagctgttgtcctagatgagctacttagttaggctgatattttggtatttaacttttaaagtcagggtctgtcacctgcactacattattaaaatatcaattctcaatgtatatccacacaaagactggtacgtgaatgttcatagtacctttattcacaaaaccccaaagtagagactatccaaatatccatcaacaagtgaacaaataaacaaaatgtgctatatccatgcaatggaataccaccctgcagtacaaagaagctacttggggatgaatcccaaagtcatgacgct

SEQ ID NO: 75510 - DNA, 1220 bp, Homo sapiens
gcccaggagggtaagttaatataagagggatttattggtaagagatgatgcttaatctgtttaacactgggcctcaaagagagaatttcttttcttctgtacttattaagcacctattatgtgttgagcttatatatacaaagggttattatatgctaatatagtaatagtaatggtggttggtcctatggtaattaccataaaaattattatccttttaaaataaagctaattattattggatcttttttagtattcattttatgttttttatgtttttgattttttaaaagacaatctcaccctgttacccaggctggagtgcagaggtgcaatcatagctttctgcagtcttgaactcctgggctcaagcaatcctcctgccttggcctcccaaagtgttgggatacagtcatgagccactgcatctggcctaggatccatttagattaaaatatgcattttaaattttaaaataatatggctaatttttaccttatgtaatgtgtatactggcaataaatctagtttgctgcctaaagtttaaagtgctttccagtaagcttcatgtacgtgaggggagacatttaaagtgaaacagacagccaggtgtggtggctcacgcctgtaatcccagcactctgggaggctgaggtgggtggatcgcttgagccctggagttcaagaccagcctgagcaacatggcaaaacsctgtttctataacaaaaattagccgggcatggtggcatgtgcctgtggtcccagctactagggggctgaggcaggagaatcgttggagcccaggaggtcaaggctgcactgagcagtgcttgcgccactgcactccagcctgggtgacaggaccagaccttgcctcaaaaaaataagaagaaaaattaaaaataaatggaaacaactacaaagagctgttgtcctagatgagctacttagttaggctgatattttggtatttaacttttaaagtcagggtctgtcacctgcactacattattaaaatatcaattctcaatgtatatccacacaaagactggtacgtgaatgttcatagtacctttattcacaaaaccccaaagtagagactatccaaatatccatcaacaagtgaacaaataaacaaaatgtgctatatccatgcaatggaataccaccctgcagtacaaagaagctacttggggatgaatcccaaagtcatgacgct

SEQ ID NO: 75511 - DNA, 1220 bp, Homo sapiens
gcccaggagggtaagttaatataagagggatttattggtaagagatgatgcttaatctgtttaacactgggcctcaaagagagaatttcttttcttctgtacttattaagcacctattatgtgttgagcttatatatacaaagggttattatatgctaatatagtaatagtaatggtggttggtcctatggtaattaccataaaaattattatccttttaaaataaagctaattattattggatcttttttagtattcattttatgttttttatgtttttgattttttaaaagacaatctcaccctgttacccaggctggagtgcagaggtgcaatcatagctttctgcagtcttgaactcctgggctcaagcaatcctcctgccttggcctcccaaagtgttgggatacagtcatgagccactgcatctggcctaggatccatttagattaaaatatgcattttaaattttaaaataatatggctaatttttaccttatgtaatgtgtatactggcaataaatctagtttgctgcctaaagtttaaagtgctttccagtaagcttcatgtacgtgaggggagacatttaaagtgaaacagacagccaggtgtggtggctcacgcctgtaatcccagcactctgggaggctgaggtgggtggatcgcttgagccctggagttcaagaccagcctgagcaacatggcaaaacgctgtttctataacaaaaattagccgggcatggtggcatgtgcctgtggtcccagctactagggggctgaggcaggagaatckttggagcccaggaggtcaaggctgcactgagcagtgcttgcgccactgcactccagcctgggtgacaggaccagaccttgcctcaaaaaaataagaagaaaaattaaaaataaatggaaacaactacaaagagctgttgtcctagatgagctacttagttaggctgatattttggtatttaacttttaaagtcagggtctgtcacctgcactacattattaaaatatcaattctcaatgtatatccacacaaagactggtacgtgaatgttcatagtacctttattcacaaaaccccaaagtagagactatccaaatatccatcaacaagtgaacaaataaacaaaatgtgctatatccatgcaatggaataccaccctgcagtacaaagaagctacttggggatgaatcccaaagtcatgacgct

SEQ ID NO: 75512 - DNA, 973 bp, Homo sapiens
acttcgcaaattctctgcacttctgccccgtaccattaggtgacagcactagctccacaaattggataaatgcatttctggaaaagactagggacaaaatccaggcatcacttgtgctttcatatcaaccatgctgtacagcttgtgttgctgtctgcagctgcaatggggactcttgatttctttaaggaaacttgggttaccagagtatttccacaaatgctattcaaattagtgcttatgatatgcaagacactgtgctaggagccagaaaacaaagaggaggagaaatcagtcattatgtgggaacaacatagcaagatatttagatcattttgactagttaaaaaagcagcagagtacaaaatcacacatgcaatcagtataatccaaatcatgtaaatatgtgcctgtagaaagactagaggaataaacacaagaatcttaacagtcattgtcattagacactaagtctaattattattattagacactatgatatttgagatttaaaaaatctttaatattttaaaatttagagctcttctatttttccatagtattcaagtttgacaatgatcaagtattactctttcyttttttttttttttttttttttttgagatggagttttggtcttgttgcccatgctggagtggaatggcatgaccatagctcactgcaacctccacctcctgggttcaagcaaagctgtcgcctcagcctcccgggtagatgggattacaggcgcccaccaccacactcggctaatgtttgtatttttagtagagatggggtttcaccatgttggccaggctggtctcaaactcctgacctcagaggatccacctgcctcagcctcccaaagtgctgggattacagatgtaggccactgcgcccggccaagtattgctcttatacattaaaaaacaggtgtgagccactgcgcccagccaggtattgctcttataca

SEQ ID NO: 75513 - DNA, 516 bp, Homo sapiens
cattgcacagataatgtgtaaatgacgtgtaacattttttaaacggctttgagatataattcacatattgtaaaattcatccatttaaagtacagaactgtggtttttagtattttcactgtattatgcaaaatagccacaattttagaacatttcccttatcccaatttgtttaagtttctccacttaattctgtgaaagaggctgtttcctcatctgcataatggtaatatcacctcccttataagatatgagagttaaataatacataaaaaatgtaaaaaaaaaaagaaaaaaaaaaaagaaaaaccctcctagaaatgcctgaatatataggagacacatcaacaaaaagtstgaaaaatttttaaattagatttaacactacaggggaaaagtaagcttctgaagatttttaaaacaatattaagatgataaaagttgtgtttaatgaagatgtgaaaatgctagagaggaaaacacaattttgaaaaagaaagagctactgaggtggga

SEQ ID NO: 75514 - DNA, 735 bp, Homo sapiens
aaataaataattaacaaactctatttctcatgaaatcttaaaaataattattgttggctgggcacggtggctcatgcccgtaatcccagcactttgagaggccaaggtgggtggatcacttgagatcaggagttcgagaccagcctggccaacatagctaacccccatctctatgaaaaatacaaaaaattaccggggcattgtggtacatgcctgtagttccagctactcaggaggccaagacaggagaatcacttgaacccaggaggcagaagttgcagtgagctgagatcacgccaccgcactccaacctgagcgacaaagcaagagtctgtctcaaaaaataataataataataatagtcattgtctctattacaaagtgattctcagtaatgtataagaaacagtgaacattacagactattgcaatagactaagcaaaagttattgatggcttgaactaaagcgtgtcaatggcttccagcctaaaggcaccaggagcacacctagcgttgaacaaattgggtctattactcattgcagtgaggggagagcacacatcatggggagacatgagctatgagttgtctcagtgagaggktgttagaaagaacgagtaatagaagttggactttggtaagcgtatagagcacccttcatgtaactaactccagccgggcgtggtggctcatgcctgtaatcccagcactttgggaggccaaggcaggaggat

SEQ ID NO: 75515 - DNA, 1025 bp, Homo sapiens
ataactgtttgtatttttggtggagacagggtttcaccatgttgcccatgcttgtctcagactcctgagctcaagtgatctgcccatctcagactccaaagtgttgggattacaggcgtcagccgccatgcctggccaatattgggagcctttcatgttacttaaattctgcatttagtggacatatttgtaaccttgttatttcatttgcattggactgtctgctccctgagtgtaggaactgtcttctttctctgtgaatgtgtgggagtcacctaggcagaccttagtgtggagtgacgtccaatcatgaagagggaacagcatttgcaaacacacaagagaaagcatagttactttgatccctaagaatagttttacatgatcaaagaatgtcatgtaaaaagctgggtattggtaaatggtaaataataaggtacggaatagggaatatagggtactaggatgattggtataatagggtgaagagtaaatgagtgcgtgtgggtacctaacagtaagtctgaagaagtaaatgtaatagaagtggaggtaaaggaaaatattcagtaaatacatgaaatactcattaaataaacctgatttagtagtaggagaggcataccatgagccataatttctgttttaggtgaatagtggtgatattcactgatacaattaacttgttttggaaactattcattgaaagaggaactagttttttatttgtttgtttatctcttgttgccctgtcacctgtggccttgacctccgagtccaagtggcagctgttacaagcagtgagaatcaggcagtgacaaagaagaaaagacaaataatgtgtgtgcactctcccttgagaaaggtttcagtttgcctcatgagttttaacrcatatatagacctaagcccctgggccagtgtttggtcatggccctgcctatctgcaaagaagactgagtctaaaacacaatttttgttcttggtggccacatgcaaagctaacaattctatttctgtaaagg

SEQ ID NO: 75516 - DNA, 639 bp, Homo sapiens
tggatccatctttatcgataaaggagcatctgtttcggtctttcagatcatactattagctccaaaattttttaacttccaaaattaaatacatattagtcagagaaatggtccttacttaagtcaaattgaaaaaatgaataaacgaggcacagtggctcacgcctgtaatcccaacactttgggaaggtaaggaaggagaatttcttgagcccaggagttcaagaccagtctgggcaacatggtgaaactccgcctctgcaagaaatacagatatacaaaaattacccaggcatggtggtacatkcctgtagtcccagctattcgaaaggctgaggtgagagagttgctggaacctgggagtttgaggctacagtgagccatgatcatgctgctgcactacatcctgggtgacagaaaaaaaaaaaaaagaaaaaaaaaaaagaaaaatgtgtaacttcactcaaatagactcttttagaatgtgtttttttgtgtgtgttcattttgtttgcaaaccccatgcagcttcccgttttgccttggttactaagaagttctgagaaaaatttgatcaagtttgaagtaacaaaaatatttaataaattctaatttgtttctcatctgcatttattgtgt

SEQ ID NO: 75517 - DNA, 648 bp, Homo sapiens
atgttgttgccaaatagtaacaactcttatttcttaaccatgcactgaagtcagccagccttttcaactggttctttttcaccagcaaattactctttacaataaaggagataattcaagcccttaataaggcctttaaaatgtcatcactgtttaaaactttcaatcaaatacctctagctgattatggaaatgtgttggcatgatttaaaattcaagtatttttatcaaaattgtcagtcggscccattcttgcccattcaaaaaagctcagaagaaaagtatcccaagggaaatgtgcattttaggagaatctaatacaatgggcacatgtggaggtttgctacaccagcgtgaagagtgaggaacagcaggttttcagtatgtatgatttcactggctcacataaaaaagtaaatgatagatggatttgtaatacctcatattatccactcctgttttcatagtagactctctattaacaaaaaaagagggaggtggtatcttaaatcgcaatgtatgggctcttacagaagaatccttttaaaggattcacaaagctttgaatcccctaaagttgaaaggttaaatagtcctctaaagtgtgccatgagggttaacatttgtaactttttttaaaacattcaa

SEQ ID NO: 75518 - DNA, 1109 bp, Homo sapiens
atggggtagatctgattctgtcagatcttagcaaagattatgttttctacagtgggtcaagggaggtgcatggaatcacagtagtaacaaaatgtttcttttagtacatagacactttaatttgaaaaattaagtttcaaatagtgttcttaatttgtatgaatattttaatgaaactttggaaaagacttgctcctatatccacatattcagtagacgatgaaaataaaaatgttggcraattccattcagtcagtaaactccttatcaaagaaagtaaaaagatcttgccagctaaatgtcctcgttaccttctacaacatgtagattaaaaggtgtgtgatctgcttgcgtgccatattagggctttcataatgaaagtttttggtcatttttagtgtcctcaaatatgaagaagcacataattatatttttgattgtataggtatagaaggaaatagcttcattaggcatgtgcctaaaagatggctatcattgttgcttgacatggaaaagatattaaaatggtggccttccataaaattataatttccaactgtggaacaagaaaaaaatccttctctaatttggagacatatgagagtaaaaatagataaaaggattacagtaaagcagaaatgtatatgctgtttcctaaaaatatttgataatctttgacaagaccataaggcaactagaaaaagatgaactgactacacctgagttttgtaaggttacatgtaggttgcaacaaaaactcatatagagaatatgactcatttttagaaataagactccttcagaatgcaaaaagatgttaccagaaaaaggcaatgagttaaacatagcttttcaaatttcattactaaaactgcaacttatttagaacccaattttgatttaacaaattcaaattacctctgtgccttaaaatgattccctgagaaacaggttaccttatgaaaacattcaatgtgctttgaaatgtttaaattatcgacatttgaaacaggagactatatgacaaataaatacatgcaaaggacctgattgattcatagctggattacatgaacaagcctgtaggtataaaggaggaggacatttta

SEQ ID NO: 75519 - DNA, 1020 bp, Homo sapiens
aaaccaatctgtaccccaaccacctcgggcaaattttgttaggacttcctaaggctgtgtcacaggcaagtcctcaacctcgacaaaataaactttctaaattaactgagacctgtctcagattttctgggttcacatcactatctagaaacccttctttacataatacagcttcttgaaactaaaaaattaatatatacattagcttttgctaataagaaataagtgaatggaaaataaagagaatatgtggatgatatgattagcctttgtgtccctactcaaatttcatcttgaattgtaatccccataatccccacgtgtcaagggagagaccaggtaggagtaattgaatcatgggggtggtttcccccatgctgttctcctgatagtgaatgagttctcatgagatgtgatggttttataaggggctcttccccctttgctcagctcttctccttcttgccgccttgtgaagaaggtgccttgyttcctcttcaccttccaaaatgattttaagtttcctgaggtctccccagccatgctgaactatgagtcagttaaacctatttcctttataaattacccagtcttgggcagttcttcatagcagtgtgaaaacaaactaatatagtggatgaaaatatgagatacaaattggcaatatttgttgattgattaaaaatgaaagatccagggaagagggaaattagcaatgatgccagatataagtggcttagaaggtgtaggtgacaataaattgaaaattgaggaaaaagctacttagggaataagagaatattacagcaatgctctaattcaaggaagaacaaagcaatgctaagttaaacttaaaataattttttttaagaattaagagttattcaaataaatgtttagtggtcaatctttttatgtctttaatgaattatttgattttttttttgtagtgagacttagctgtatcagttttcatagttagcataaatgtaattgcttctaaactgggtgaagcatgca

SEQ ID NO: 75520 - DNA, 757 bp, Homo sapiens
gtgatctcggctcactgcaccctctgcctccggggttcaagagattctcgtgcctcaacctcccaagtcgctgggactacaagcgcatgccatcacacccggctaactttttgtatttttaataaaaaagacaggtttttgccatgttggccaggctagtctcaaactcctggcttcaagtgatccacccgcctcggcctcccaaagtgctgggatgacaggcgtgagccaccgcgcctggccaacagaaccttcttttcaaacaaagtggtatgaggaaccctgatacattaaaaagaagaagaggagaaaagaaagagcagaactgctctggttgtaggttgagggagtgtcctggcttttccttccctttcaaaagcagctactcaggagcctctgagaactgagtttgaagccattgctatcaaaatcaaatttctctgcaaccccagatgaagtgggctaagcgagggggccctaagctcttgagaagcatctgttacaactgtgcctgggcataggggcagccctattgaagagcagagcaggtcgatgcaccagctgggggcctgtccttcattgctactaacaaagattagacagggagaaagatagacaaggataaaatcctctgtagtatagayggtcactttcgatgagtcagagtacatatctgatacaggaaaagggactggccgggtgtaatggctcacgcctataatcccagcactttgggaggctgaggaggcaggatccc

SEQ ID NO: 75521 - DNA, 807 bp, Homo sapiens
ttttttttttttttttttgagacagtctccctctgtcgcccaggctggagtgcagtggcgccatctcggctcactgcaagctccgcctcccaggttcgcgccattctcctgcctcagcctcccgggtagctgggactacaggcgcccgccaccacacccggctaatttttttgtatttttagtagagacagggtttcaccatgttagccaggatggtctcgatctcctgacctcgtgatccgcccacctcagcctcccaaagtgctgagattacaggtgtgagccaccacgcccggctgagaagccatggagttttcgaccattattttagaaggtaaccaagcaggaagttgaaggtctctgcatccaacagcacataagaagaatttaaaaataggtattcggagatgatgacaatatttggcttcaaccaggctttgagctagtcccacattgctttcataccggataaccaacctcatcaactgggccatgggaccaccttatggaaactgtcctgtggcggtctcccgcccctcattccctgactcattcttgcctcaaatcccagaaagcctcagaaagtagaaggtgaaawgttggtcctagttcccaagccgtagtccacccaccaaccatctcaacaattagcaatgatttgcagatttgcagttttcaaagtgttttcctctcctttgtctcctcactgctacctgctgtgataggtgaagaaattggagctcagaggatttcagtgatttgcacgggatcacacagcaggaaacggcatcgttaatatttggatcc

SEQ ID NO: 75522 - DNA, 597 bp, Homo sapiens
cagttctggagtctgacattggctgggtgaccatgagcaaatcatttaaccgttctggatctcagtttcctgatctgtaaagcagaggcaatggccttcactctcaagtatgttgtttagattgatttgttcttcaggtgccaggtggcacatagcaagccctcaataaacggaagcccttatttgtatgtttctgaggagtcttcatttcctccaacctagactggatgtcagtgcttcttgctaatccaggtaccattccctcctgccatttgcctggcctgcatggctgtctttgataataacacttagtgtatctcgagcatcactatcttatttgcatctcacaacaaccttgcaggatacatattatcatcattcccatttacagataacaaaactgagattcaggaggaggttgagtcacttgcacaggggcaaacagcttgtaaatagcagaactggggtttgcccccagacctgtctgatctcaraacctgcctgttctaccactcgttttatctccttaattatctgtcctgtctctttgtgccctctgccaagagtaactcttctgcactctatggacataatagc

SEQ ID NO: 75523 - DNA, 597 bp, Homo sapiens
cagttctggagtctgacattggctgggtgaccatgagcaaatcatttaaccgttctggatctcagtttcctgatctgtaaagcagaggcaatggccttcactctcaagtatgttgtttagattgatttgttcttcaggtgccaggtggcacatagcaagccctcaataaacggaagcccttatttgtatgtttctgaggagtcttcatttcctccaacctagactggatgtcagtgcttcttgctaatccaggtaccattccctcctgccatttgcctggcctgcatggctgtctttgataataacacttagtgtatctcgagcatcactatcttatttgcatctcacaacaaccttgcaggatacatattatcatcattcccatttacagataacaaaactgagattcaggaggaggttgagtcacttgcacaggggcaaacagcttgtaaatagcagaactggggtttgcccccagacctgtctgatctcagaacctgcctgttctaccactcgttttatctccttaattatctgtcctgtctctttgtgccctctgccaagagtaactcttctgcactctrtggacataatagc

SEQ ID NO: 75524 - DNA, 1689 bp, Homo sapiens
tgcccctgctcaaacacctctcccgatgggaaacctgccacccttgggggctccgggccatccccagacagctttggcttggtggaaattatgccactggtggaactaaggtctgcctctctccttcttttctgccttcattcctttcttcctccccttccttcagcttccttcccttcctttctctctctacacatctgttgagcaccacctttgtgtcagatgagggtacaaaaacaaatttacatgacccctgccattaagctgctcacagtccgagaggagcagatacacactagatagtcacaacactgggcagtgggtattgtgatagatgctaagaaagcacaaaggaatgggagggggcttcctggaggaagtgctatctgtgttgatcctcaatggatgagcagttacaggggagagaagggagtttccaggggtagggagcagcatgtgtgaaacatcctgtctattctagagatgactgcacatcacgctggccaggcacagggtaagagacatgagagacgtggctggtcagcagggttgggtcaygaagggtctagcggacacttcagggtgaggctgaggactctggttcttatctcacagtcactgaaaaactatcaccagccccaattctgctgtctgccacacaggatgccatcaaagctgcaattccctggagaacttctcttgtccttcacagcattttcaatagactttccttttggtagaaggactttccctcctctttgggatccactgtgacaatggccctgggctggagattaggcaagtgggacaaggggcctgagcacctaggcttgtccaggtctagccgaggccaggaagttgtagataacacattatttagcatgaagaaaatatgcttagggtctttcaatgcaaggacaaatttgttcataaccagcacaaggttccatgcttcctagatcccagatctttgactctcaggactggaggcatcctcagcagccctttgcagctccctggcagcctgattcttctccctccactgtggatgacagggctctccctgtcttcatctggctgctggtgcatcagacccaccactggaggaagacctggggacatggccattccaacatgccccagagagcccttcatcacacagtcagctttcgtgagaggtagaggacccagggccacaataacatgctgcccgaccttaagcagatcactttacctgctgggtctcagacctttcatctttcctgcctgcctcacagtcaaacagaaaagtctaagaagtgcacacaaatttctcagagcaacaggagcattttatgaggctgggcacaaagaacgtttctggaagaaatgtcagttagtggtggatagatcgtgtcaaaggtgtgggttgctgcttatggaatggtggttctctggcccaggatgagagaattcaagtgccccagacatgcagattcctgcatatgtgcctcaagtcttttgggtcataagtcagcaagttgagttcatttcagaccctggccagctggtggtcctcagagatcagtgaactttggcaacagatgtctgaccacattggctcttgctctcctgtaggtacatgtctactccatcggttagtctagccatctttctttaaacacttgaattagggtaagggagagttta

SEQ ID NO: 75525 - DNA, 1036 bp, Homo sapiens
aatcagctctgacttctgaatcctggacatgttatcatttatttggtctgattagccattcagcaatgttaatacttatgtatttctcataagtattaatatgaggtgttataggacttgatggtgcaggccatatttctttaacaaagagacaaaaatgttggtggcttaaataagatagaggtttatttctcttttatgtgagagatcagaggcaggcagaaagctcaggttgtcagtgtggctcaaaaataagagatcattcagggacctygattccttccatcttttttctcctgtattcctctatgatattgttgccatccatgtggttggagcctggccatgggtccacccacatggaacaatgcggaagaatggtgaaatagaaagggaggatttcctttcaagcaagcacacatcatttttatttgcaattttgggtgccaattaattgccagccactctaagatccaagagacgccaacaaatatctaacctccagcctgtgacctgggcctggccactgttttcttactagggaagaaaggcatggaactctggggccaactagtagtgtcccatggcttttctggtggcttcctatggtgaggggacatgtgtgagtcttctgctctgtgaagcatcagcacttctcggggtgctcttgagagcctgtgattagagtgcatgtccaggctctttccacagagtctctttctgggtgacagtatcctgcacaattcctcaggcacagcgggcactgcctcagtcctccagaagtaattgctttgttctcttctgggaccctggccttgtgacacatctcagcctgatagatgatgggctctggagacggatggtttgaattcaattccccagtctgcccatcggtcatggtttgctgcactatcctggacctgtgcttcagtttccatagatgtggtaagataggaatggtgatgatacgtgtctcatactgcggtcaggagaggttggttatgagggacaaattagacactctcaggaaattggt

SEQ ID NO: 75526 - DNA, 937 bp, Homo sapiens
attccttttcacacaagaagaaataaaggcctattaatatttttcaacattacatcagtattacctttcatagtttttcaaagaactcaagagcagaaactaattcacatgtcttattcttccatgactgataaaatgaaaacagaatatgtctacattagtaacatgtatatgtgaagtcaaatttataagctttaatctcttagaggttggaatttgactgtgggtaaatctagcttcttacaatacctaataaggacaccttaattttctgcagtctgcatgaaaatagcacagtaaccactgaaaggagggctccacgactaaggtattccgctaccaactaccttctaaatctgccaaagttctgagtaaaatttgtggttttcatctggttgtctgcaggtacccaactgcagattctgatgtccagttaccraagttctggatgtctatggttacctggctgcagcttggctttttctcagtacccattccaacaagacctgggagtggatgtggggtagtggtggggagaactgggaggactgattagttacggttggtaaataattttatgatcttcagataaaaaagtatacagtagttacaaagtatttcattccttttacaaggataaatctttgagataatctgtatttcaacatactccaaaattctttccatcatatttatagagctttattattttgaatataaaattatactttaaagacacattttatggttaccaccttagtagtttttgactctttctgtatttacgtattgtctacccctttagaataaaaaaaggatgattttctactaaaatatatcctctttatttctcaagttgttttttctaactaatggcagaaatagcctccccctcacctccaaatcaaataggcttctttttaaaatgaacaatgca

SEQ ID NO: 75527 - DNA, 574 bp, Homo sapiens
tgtttcattttacatttaaagttcatagaaattctagacttacatgactggatggcttcctttaaaatcgtgttgtaaaagaaagaaagcacaggcactaggaacgagaggattggtatttaaatgaataacttctgcaaggaaggtcagaatgtgagattasagattttgctgaacattatttttggctaaaaaaaaaatctcagtggttctgtttatttgaatagtatttccaaatccactttcattagcaagagtgctgcaggacccatcagttcagggagggaatccatttccagtagcttacagagataatgataagccatcttaaagtttaggcttattagaaaggactgaaatgcattatagggcagcagtaactgtaatggttggtttgccaaccagtgttgtggaattaaaaatgcattaaaatttatacaaaagaaagtaaatagcagtgaatctctattggctttgacacagttaaatgaactgttctttttctttgtgtggctaatttaaaaaaagacctataaaaatagaagaaacattcccttttggaacttgattcatg

SEQ ID NO: 75528 - DNA, 616 bp, Homo sapiens
catgatgcataagatgaaccagatgctcacccatgattgctcaatgggtgacttcatcattgatagggaagaaaaaaaatccacaacaaatgatctctaaccatattactcccctacttctttttagaacacataaactacaattcagaaggaaaatgttagaagatattttaccacaggtagctggtgaggttttaggacacgataccctgtacagaatctgttaatggtagaatcagctacaggtcaataagagataccaaactcagttgacttcgtggtttactgatttgctggttgttctgaatttccaaactagtgtctaaggagacaatctgcaaacaggagaatggggagacataggtgtagaaaggtagttgtctaacttggtcaacactgaagtggagaggttttcaaagacaaatgcccaaattacccttaatttcaacatagtttttcaatccccaaatcttagcagttctgtgctctttatatcaccttattcccttttgggaaatgcttcttccccctactgmaagaaaggcattcttcccccaaactgaaaaacctttaagatttgctgtcctgatgactctcctcacggatcataaatttc

SEQ ID NO: 75529 - DNA, 554 bp, Homo sapiens
aatttgaagtacttgtcaaaaagattggaagagttcacagagaaatctgggttttccatctctctctccctctctctaaaacaatatccatgtcatggcctttccatgtctcttgaataggggatggcattctgcatgcagggagaagccctgaccagtgtacacagggctggggtccaggcaaaagtagcccctcttcccctttytgtcaatatcaccaagcccatttatcatcaatcttatccttttacgttgttttcctatagtaaagaggaaagtgtggccaagagcagtgtctcacgcctgtaatccaggcattttaagaggtggaggtgggaagatcatttgagcccaggagttcaagaccagcctaggcaacacagtgagacccccatctcaaaaaaaaaaaaaaaaaaaaggaaagtaaaattgttttttgtctccggttggttccctgcaggcccaaccctggacggacacacaaatatctgtgctgcccacatccagccaacacaggcagcaggatatttcctcctagtcagactggtgagttt

SEQ ID NO: 75530 - DNA, 573 bp, Homo sapiens
tccttctgcatctgtgactgatgagtagtaggttataaaagtgggtaaagggcatagagcgctttaaatctgcttagaagagagacgtgcattctccctttgttgctgcctgggaaggaaaatgagagtgaatccattccggcagatgactcaaggcattgmagtctgaggatgagggctggctgtcttgcaggcttgaggcctcacagccattgctgtattacaacacaatactgttcactgccatttaatagtcattactgtcattgccatttattgtcatataataagctgtcactattgggttaagtaagtattgttatctcagaggtgggtggtagttatcctcattttatagatgagtaaactgaggttcagaaaggtaaagaggtagaactggaactcaaatcccaaggtcacctcactctacacttggcttctgtattcatccatgcacacagaaacaggcatcttggcttcctttttattcatttaatatttagaacatatttactgagcactttctatgaaatcttttttccccaacaaatgtttattgagtgctttagttct

SEQ ID NO: 75531 - DNA, 573 bp, Homo sapiens
tccttctgcatctgtgactgatgagtagtaggttataaaagtgggtaaagggcatagagcgctttaaatctgcttagaagagagacgtgcattctccctttgttgctgcctgggaaggaaaatgagagtgaatccattccggcagatgactcaaggcattgcagtctgaggatgagggctggctgtcttgcaggcttgaggcctcacagccattgctgtattacaacacaatactgttcactgccatttaatagtcattactgtcattgccatttattgtcatataatwagctgtcactattgggttaagtaagtattgttatctcagaggtgggtggtagttatcctcattttatagatgagtaaactgaggttcagaaaggtaaagaggtagaactggaactcaaatcccaaggtcacctcactctacacttggcttctgtattcatccatgcacacagaaacaggcatcttggcttcctttttattcatttaatatttagaacatatttactgagcactttctatgaaatcttttttccccaacaaatgtttattgagtgctttagttct

SEQ ID NO: 75532 - DNA, 772 bp, Homo sapiens
cagccagggttggggaagaggcagggttgccctgtgcagggctagggtggagcaacatatctgcaagatgatgaatcatgctcctggacgctggcttaccaatcctttgagaatgtctgaagacagagggttcttgtttggcactatatatacgttggctatggaaatgggtggaggaggtcacagcctggcccatttatgtggcagtgtccacacttctccctagattgggctgctcggatatgcaaatatcttcagggctgtccgcagtatctatgtttttttatgaaacagcatgtttcaytggcatggatactcaggaactagatttgaactcacccattggtctgcactattctataaagatctgagtttgtaaatctatttctaaaaacattaggcctcttccccaatatgtcctcaagagttgtgctgatctaaccagatccataacccctgggaagctcccaaatttgaaacatcactaaaatccatccaaggatcaaaaatctgagtctgcgagcaagaacttccaaatgaactggcatcttgtctggtaatacacaagctctggacctatgaaagaaggcagagtgcaatggggcaagacagtggatttccctgggttcaggtctgagatactctcaatggttcagggctcgagccacatcttgggacacagtacgaccctgtaggcttgggcagacactgaactagacccatttgtggggaggggcacatctggaggaaacaactgctgtgagtaagtacc

SEQ ID NO: 75533 - DNA, 772 bp, Homo sapiens
cagccagggttggggaagaggcagggttgccctgtgcagggctagggtggagcaacatatctgcaagatgatgaatcatgctcctggacgctggcttaccaatcctttgagaatgtctgaagacagagggttcttgtttggcactatatatacgttggctatggaaatgggtggaggaggtcacagcctggcccatttatgtggcagtgtccacacttctccctagattgggctgctcggatatgcaaatatcttcagggctgtccgcagtatctatgtttttttatgaaacagcatgtttcactggcatggatactcaggaactagatttgaactcacccattggtctgcactattctataaagatctgagtttgtaaatctatttctaaaaacattaggcctcttccccaatatgtcctcaagagttgtgctgatctaaccagatccataacccctgggaagctcccaaatttgaaacatcactaaaatccatccaaggatcaaaaatctgagtctgygagcaagaacttccaaatgaactggcatcttgtctggtaatacacaagctctggacctatgaaagaaggcagagtgcaatggggcaagacagtggatttccctgggttcaggtctgagatactctcaatggttcagggctcgagccacatcttgggacacagtacgaccctgtaggcttgggcagacactgaactagacccatttgtggggaggggcacatctggaggaaacaactgctgtgagtaagtacc

SEQ ID NO: 75534 - DNA, 651 bp, Homo sapiens
cccccatgaccaaaacacctcccactgggccccacctccaacattagggatcacatttcaacatgagatttggaggatcaaacatccagactatatcatgtggcctagccaagttgacacataaaattaaccatcaccactggcctcccaatttaaatgtacttgttgtttaaatgtaccagaacctccaggacagggaccacagtctttccctatctaagcagagatgtatagyccagcaacctatccttagtgtggccagggcaaaagagagggaaggcacacaggctggccttaatggtacagtgactggttctttgtgcctgtttccctgcccaaggctccttttctctctgctcccctttaacaaagtcaccaagcaaacagaaaaaccaaagcaggagatcgtggtgggcagctgaattgcaagatggaagagttacaacaaatattttggtcaaccagccccaagtcatgaaagagagaccagccctccccactttgccctctcatctctggatgccccaaaagaaataatctggattatgtgggcagctgcctcctggagaaactccagtgttatctctggaaattctaggccctcctaagcagaggatataatatcaggatgtaaagaaattttgacaggct

SEQ ID NO: 75535 - DNA, 757 bp, Homo sapiens
ttgttttcattttgacccatttgtttcatgatgttattaggtactcttgaaagccaagggcaacactctaactctcaggcccaggctcaggaaatgggtggaagaggtcacaggctggcccatttatgtggcagtgtccacacttctccccaaattgcgcatcctcagggctgttcacactatctctgttttttcatgaagcagcatttttcactgacatggatactcagcaactagatttgaactcacccattggtctacactattttataaaggagggaagtgttcgggggttagaggggacatgtgatcagaggcgaggtggtcctggagagacaggggacagggcaggtcagcagagtagcagaaaatgtgctgaggcagaaaatgtcactgagrcaattttccagagggatggggtcactgaaagatcaacatgcccaattctagctctgtgatcttgaacaaagtgctaaacctttctgagccattatttcctcactggtaagtaaagagattaacatctacttcgttgggctttatggaataagctggtgtgtgtaaggtatcttacagtgcccagctcacaatgagtgctcaatcatggtagtttttaataatgatgaagatgacgatggttagaataataaaaagaatacctcgtgaggtggagatgggagccagaggctgggaccagcttgatgcagcaggtgggttgctggttttgcctgcagaccagggaggagcacacagacct

SEQ ID NO: 75536 - DNA, 757 bp, Homo sapiens
ttgttttcattttgacccatttgtttcatgatgttattaggtactcttgaaagccaagggcaacactctaactctcaggcccaggctcaggaaatgggtggaagaggtcacaggctggcccatttatgtggcagtgtccacacttctccccaaattgcgcatcctcagggctgttcacactatctctgttttttcatgaagcagcatttttcactgacatggatactcagcaactagatttgaactcacccattggtctacactattttataaaggagggaagtgttcgggggttagaggggacatgtgatcagaggcgaggtggtcctggagagacaggggacagggcaggtcagcagagtagcagaaaatgtgctgaggcagaaaatgtcactgaggcaattttccagagggatggggtcactgaaagatcaacatgcccaattctagctctgtgatcttgaacaaagtgctaaacctttctgagccattatttcctcactggtaagtaaagagattaacatctacttcgtygggctttatggaataagctggtgtgtgtaaggtatcttacagtgcccagctcacaatgagtgctcaatcatggtagtttttaataatgatgaagatgacgatggttagaataataaaaagaatacctcgtgaggtggagatgggagccagaggctgggaccagcttgatgcagcaggtgggttgctggttttgcctgcagaccagggaggagcacacagacct

SEQ ID NO: 75537 - DNA, 757 bp, Homo sapiens
ttgttttcattttgacccatttgtttcatgatgttattaggtactcttgaaagccaagggcaacactctaactctcaggcccaggctcaggaaatgggtggaagaggtcacaggctggcccatttatgtggcagtgtccacacttctccccaaattgcgcatcctcagggctgttcacactatctctgttttttcatgaagcagcatttttcactgacatggatactcagcaactagatttgaactcacccattggtctacactattttataaaggagggaagtgttcgggggttagaggggacatgtgatcagaggcgaggtggtcctggagagacaggggacagggcaggtcagcagagtagcagaaaatgtgctgaggcagaaaatgtcactgaggcaattttccagagggatggggtcactgaaagatcaacatgcccaattctagctctgtgatcttgaacaaagtgctaaacctttctgagccattatttcctcactggtaagtaaagagattaacatctacttcgttgggctttatggaataagctggtgtgtgtaaggtatcttacagtgcccagctcacaatgagtgctcaatcatggtagtttttaataatgatgaagatgacgatggttagaataataaaaagaatacctcgtgaggtggagatgggagccagaggctgggaccagcttgatgcagcaggtgggttgctggttttgcctgcagaccaggraggagcacacagacct

SEQ ID NO: 75538 - DNA, 1111 bp, Homo sapiens
  misc_feature (1)...(1111): n = A,T,C or G
tgagnnnnnnnnnnnnnnnnnnnnnnnnnnnnnnnnnnnnnnnnnnnnnnnnnnnnnnnnnnnnnnnnnnnnnnnnnnnnnnnnnnnnnnnnnnnnnnnnnnnnaattaaataaaaattatctgggataagcatggataggtggggataaaaatgcccattcaggatgagggttatgtttcaagtaagtaatagctatatcccttagctcagtcttgaaagctgcatagaaaatagttgatgtaactaccttctagtactgccataataaagtaccgcagactgggtggcttaaatattagtaatttatactttcacccttctggaagctaagaactccaagatcaagatgtcagcaggtttagtttctcctgatgtcactctgtttggcttgtagactgctgccttcttacatgttcttatatggcctatcttctgtgcttgtgtatatgtggtgtctctgtgtgttcaaatttcctctccttataaggacattagccatattgaattagggtccatgctaatgacgtaattttcacttaatcacctctttaaatcctctctctcccaatgcagtcacatgctgaggtactaggggtgagggcttcaacataggaattttgagagaatgctattcagccgcagatgataattgggtgagtttcagcctttctttaattcattcaagtacagttggttctgctataatgagaaatgtgtattctgaagcctcactattctctgaaaacttggcacaataaaagctacagggcttatgaggaaagtagggttgagacacaacactcaaatactttatcagtaacacatataaaaagagataggaacctagcaaaaatggcaaaacagttctacacattatatatgtttgaaaatatgtaaatactacaataaatatgacaatttattttgagaaagacctgaaakcatttgtggaaatgggtattggaaaggctgcagcttgggaattattgtgaagtggtaaaagatttatctgaaacaagatttatatgaaagggaaagttatgacaccaaatttggtaggggctggcttgtaatccacacagagaattaagatagctggtgggagtgtg

SEQ ID NO: 75539 - DNA, 895 bp, Homo sapiens
tcccacactccctgtccctccagcctgtttctcatcacctgagggttttgttttccgtgttccggttgaagagatgtctgtgccaggagggtycctcccttcccatttgcaacctgggatgggtgacgcagatttatccgagacttgggagtgaggctgagagtcagttctttcgtatcctaagaaaggctgaccgtcccatcaaggcccgtgtgctgaaactgtccgtgtgcaggctcaggtggagcaggtctctgtcaggcagccatttgtatttgggcggtgggtgctttgcctagcttagtgcctaccatgcccaggcttgcaaatggggctgtttgggctttgatgtgggctcaggctcagagggctgaagtggttgtggggaggggcttctggggactgtgtccatgtctctgtcgtttttccccatcacaccgtacactcccttgaggccagccgtccatcaccattgagtcatagtcgacagtttgatttacagcccgggtgtcaaacaaaatgaaaagcacgtgatgaatggagggagcacgtgctgtggagggaggggtgcgctccgctccgcaggtcaggggctaagcggccatgccttggcctgtctctacaggcacatgcatgccctggactatttttggggtgcctttctcatcttgaggagtggcaggttttttggactaaggacaaagtgacagaattggactgagaaaggttcatgggggagggctcgctgagccagccctgattaggagcattgctcacaaaaccagaggaaggacggcatcctgggaccttctgatcgcaggacagccgaggagacctcaaacagtggagtgtgatggggcgggtcaccatggaggtgaggtggagactttgggaa

SEQ ID NO: 75540 - DNA, 1382 bp, Homo sapiens
acagaagcagacaaaaatccagcacaggctgtccacatttaaaagcaggaaatgggtatgccataggccgatttttctgccctgtgtctgccagaaaaccgtgttacccgctaacttctgcagcctccctagggaagcgctcgctgtgggagacgtagagggcactgtggtggctccgtcctgggatgcagcaggcgctgaagagcctcctgagatgttatttccgctatcaccttcagagctgccctggccctttgtgttggtggaggcaggatcagggaatggaagcccaggcaggtgcaggacccccctggggaagctgttccttaagttccttcagttgggaacttaagttgcctcctgagaatgagctattccctgagaaggccttgagacaaacctggcagcccaccaagtgggcgggtgacaacacagttaagagggacacaccattgagccaaatggccctcatgttactgcaaccttcagactcactgatcccacctgttcttctttttctataaaagtgagaattagaccccagagtcatgttttctctctcatttcaagcagtttcctgcatgattattccaatgggaacatgaaatgcttgttggcagtttgtccaaagactgctccgtcggagggtacccactgatcatccccatcctggcctctcttcccagctcttctggaactgtctggatccatctctggaattgtctggatctctgtaggtctctgttgttaattgacaccttgtgtcgcacagggacttcagaattggctttgggtggacatcgcctctctccccgacacagctatgttacacaatcatcttatttttacttgacataatttctatagtgagggttttggcagaattaaaaaattaagcccgtgagatgtattactctaatgggtcccatctcacttttagtcaacatgagaatttttaagaaaagcagtcctttctaaaagactggagtgtggtgtgtgtgtgtgtgtgtgtgtggtgtttgtgtaaccagagtgtttggaaaagtgagtccagttacaggtgtttttacctagcgcaggaaaacatctgtcataatatttgtcaaatctcagagccaaggctgtgcgagtttgggtggtttccaagcagaacaggttgaaagttgatagaaatggaagctgggcctcctggttcaatgggaggctgatgctgccccaaagcgcatctgcccacatctgccctgctcctgcgatcaccccttggacaccagctcartaacctctctgaagaatcattactggtttcttaggcgctaccgggtaaacattcttctatagagccctgtttacatttgagaacttgctgagctgaaaaccagata

SEQ ID NO: 75541 - DNA, 2534 bp, Homo sapiens
aggtacttcttacaacatctgtgttagggcagctggtgacggcacccggcaaattccagcaactgccctcattccacagaggctccctcctgcaaggccactactgtgactctgagcagcggttcttctcatgaatgtgatagctcggtcagctctaagactgcaacctgcagggacttcatggggcaaccctggggtatgtggccagtgtctgtccttgggcagccgtagcccctgtcaggaacagggagtgactcaggcactggtgtcttgagactgctacggtgtcaggaaacttccataaaatctagtgcgttttaaaaaaagaggccagagccggccaggcacggtggcttattgcctgtaatcccagcattttgggagaccgaggcaggtggatcacctgaggtcaggggttcgaagccagcctggccaacatcgcgaaaccctgtctctgctaaaaatacaaaattagccaggcatggtggcacatgcctgtagtctcagctatttgggaggctaaggcaggagaatcacttgaacctgggaggtggaggttgcagtgagcggagatcgtgccactgcattccagcctgggcaacaaaagtgaaactctgtctccaaaaaaaaaaaagccagagccagcctttgcctcctatgtcagaaatgatcatttgcagctgctttgctttggggtagaagcctcaaatcctgaaaccctttaccctggggcaggttgtcttgtgctgtaagcaacagaaacccatttagatcatttttaaataatgagaatttctgttggaaggatgtcggcttagctcacacagtgtctaggaagactggaaaatgggtctcagaaacactgcaggcagctttgtgtggcaggatcaatccagttccttcttggtgactgctcaggggaacatcccatttgccttgcatggtactgagccagaaggtcaactccaggcctgtctgcctgtatccgagaaagcagcagctccccacaatgaaatgtagcgttttccagctccggatccttccgccatcctccctgagatctacctgccttaggatctgtgagatccrcgcactttgcttttcctgggtgtctggttactgttcacaaaagtccagcagtttggcctggtgttgtctttgtttttgactgagcatctctcatttcacaagtatttattgcagctgcagctctaagcaataccaggcccagggatgggcgtcagcactgccttgagctggtgcacagcacatcccggacggaggggcagggccgtcctggtgcacacgcaagcctgaaaccagatagtaattgataccaggggagccggcagggctttctgctctacacagttaatgtgggcaagctgtcaacagtaaggcactgatgtcatttccgtgatgtgtccagttgcagctggaattgtcctgaaatggacaaggcaggtttactggcgggagacggtagaaaggaaaaatagcgcatagagggcaccagggccctgtgaccctcgtccgcaagtgtctcctcatacctcgtggttgcgcaccgtggtacggggccaccctgagcgctgactcccgggctgtgaagtgggaagaacagcagcactgcaggactcttgtcagccttgtggtctgtacgcatggaaaaggccgtcagctgtgcatagcaactggaagccatggctttttagcataaagcccagttcttcggaagccctcattacgtactgcgccttgggctttctcctcgcaaattcccaatcctgccccactgggcctggggaccccacgtccctgaaagggtcgtgttccatcttaatgtatatgaatcttactctgtgtgtcagttacatcctaataggttaaaaacttgctcaaatggtcagaagcctgaaagaggcgtcaggaatcctgtgtgaggtaagatgggggatctgtttgcaccttcatctctccatatgagatcttccatatgagctcttccagaaacctctgccccaggctccagcaagcctgtagggcagcggctgctaggcaagggcttgaatttcagtccagattctctggtgtgtgggtggacagtttccttctgggactgaaggagcacttggaagatggtgctttcccttctagagcaaaccttggcattgtcccagctaagctctcatgcccagggcttgggggtctcctgtggcctccatatccctgcacctcatgcagggcacgcaagcatcccacccactcccaaccccccacctccagccgtcgtgcccggcatcttttcccagcatgagaacccgttggcttttctcttttcccgccttgccatgaaggacctgctgccaggattcgagcctcagaccttggacaggtctcgggccagcctcagccacgttctgcgtgcccggccatcagggagggtagagggtgggtttcaccaaggagaaaggcaacccgtgtcggggagggagccgatcgctaggcaacctggagtttgttaccctggtaac

SEQ ID NO: 75542 - DNA, 2534 bp, Homo sapiens
aggtacttcttacaacatctgtgttagggcagctggtgacggcacccggcaaattccagcaactgccctcattccacagaggctccctcctgcaaggccactactgtgactctgagcagcggttcttctcatgaatgtgatagctcggtcagctctaagactgcaacctgcagggacttcatggggcaaccctggggtatgtggccagtgtctgtccttgggcagccgtagcccctgtcaggaacagggagtgactcaggcactggtgtcttgagactgctacggtgtcaggaaacttccataaaatctagtgcgttttaaaaaaagaggccagagccggccaggcacggtggcttattgcctgtaatcccagcattttgggagaccgaggcaggtggatcacctgaggtcaggggttcgaagccagcctggccaacatcgcgaaaccctgtctctgctaaaaatacaaaattagccaggcatggtggcacatgcctgtagtctcagctatttgggaggctaaggcaggagaatcacttgaacctgggaggtggaggttgcagtgagcggagatcgtgccactgcattccagcctgggcaacaaaagtgaaactctgtctccaaaaaaaaaaaagccagagccagcctttgcctcctatgtcagaaatgatcatttgcagctgctttgctttggggtagaagcctcaaatcctgaaaccctttaccctggggcaggttgtcttgtgctgtaagcaacagaaacccatttagatcatttttaaataatgagaatttctgttggaaggatgtcggcttagctcacacagtgtctaggaagactggaaaatgggtctcagaaacactgcaggcagctttgtgtggcaggatcaatccagttccttcttggtgactgctcaggggaacatcccatttgccttgcatggtactgagccagaaggtcaactccaggcctgtctgcctgtatccgagaaagcagcagctccccacaatgaaatgtagcgttttccagctccggatccttccgccatcctccctgagatctacctgccttaggatctgtgagatccacgcactttgcttttcctgggtgtctggttactgttcacaaaagtccagcagtttggcctggtgttgtctttgtttttgactgagcatctctcatttcacaagtatttattgcagctgcagctctaagcaataccaggcccagggatgggcgtcagcactgccttgagctggtgcacagcacatcccggacggaggggcagggccgtcctggtgcacacgcaagcctgaaaccagatagtaattgataccaggggagccggcagggctttctgctctacacagttaatgtgggcaagctgtcaacagtaaggcactgatgtcatttccgtgatgtgtccagttgcagctggaattgtcctgaaatggacaaggcaggtttactggcgggagayggtagaaaggaaaaatagcgcatagagggcaccagggccctgtgaccctcgtccgcaagtgtctcctcatacctcgtggttgcgcaccgtggtacggggccaccctgagcgctgactcccgggctgtgaagtgggaagaacagcagcactgcaggactcttgtcagccttgtggtctgtacgcatggaaaaggccgtcagctgtgcatagcaactggaagccatggctttttagcataaagcccagttcttcggaagccctcattacgtactgcgccttgggctttctcctcgcaaattcccaatcctgccccactgggcctggggaccccacgtccctgaaagggtcgtgttccatcttaatgtatatgaatcttactctgtgtgtcagttacatcctaataggttaaaaacttgctcaaatggtcagaagcctgaaagaggcgtcaggaatcctgtgtgaggtaagatgggggatctgtttgcaccttcatctctccatatgagatcttccatatgagctcttccagaaacctctgccccaggctccagcaagcctgtagggcagcggctgctaggcaagggcttgaatttcagtccagattctctggtgtgtgggtggacagtttccttctgggactgaaggagcacttggaagatggtgctttcccttctagagcaaaccttggcattgtcccagctaagctctcatgcccagggcttgggggtctcctgtggcctccatatccctgcacctcatgcagggcacgcaagcatcccacccactcccaaccccccacctccagccgtcgtgcccggcatcttttcccagcatgagaacccgttggcttttctcttttcccgccttgccatgaaggacctgctgccaggattcgagcctcagaccttggacaggtctcgggccagcctcagccacgttctgcgtgcccggccatcagggagggtagagggtgggtttcaccaaggagaaaggcaacccgtgtcggggagggagccgatcgctaggcaacctggagtttgttaccctggtaac

SEQ ID NO: 75543 - DNA, 2016 bp, Homo sapiens
aagacacctcaaaactcttcaagtactggcataacacttggcatttacatctaccagggcacaggctgcacagaattacctgttcatttctctactttgctggagatttaatgaagaaagagccagtatctttacaattgtatcccttctcagcctagtgcatggcacacagtaaatgcacaataaatatctgttaattgaatgactaaagaatgacagatacatcccaggtttgtatgaaccaaacatgatgagtcaaacattgttgtgactattcaaatatttgaaagcatatacccttaaaaattaagtctcttaagtttaatgttatttttaaaagggggtaaaagaattcaaaacattttaaagctgcttagagaaacattataaaatcaaaaatgaaaactaaagaacaggtttctttaatataaaagaacatttaaccaaaacgccaaacttacctctgtaagcaatattgctagcatatcctgcctctgaaaacgtatagccaagtgtacaagagtatagccaacatcaaaggcagaaggacgattcagcaagcgtacttcatctgcggtgagctgacgtgcaatgtctcctcctgatgacttgtatgcttctatggcagctaaatcaccttctacaacccctaaaacaagcatcaagatagaaaagcatttaattctcattttcttcaaaaaacacaaaccgtagcaatcactccaaaatcttttaagtgtttctctgtgcttcctggatcctgatgcatcatttaaatgtcctataagagtaaggaaaataagttttttcctttccctttaaaaattttccttccagaactagaactgcctagacatttaccttaccatcagtgcaggctccaggctctggtgagatttagaggaactattaggctgcatgaattggatcgaagatcaataatctagtatgagaaaccagacgtaacaagagacactgagcccctggttccggtcctgcgttcatcctgactctgcagaaaccaaggagacagggatgtgcttccagctggtgttgagctcctcctgccctttacactgcattcttaaagcagaatcaaaacaaatgctgagctttccatactgctctttagctttgaaacaacttagagcaactgaaaccatcttcagtgtaagtaaacgttggcaacattttgatttcagattctcatagccaagtcttccttatatccattaagaattattaataacgtaaaaattggaccagatgatttcatataaaatacgctaaaataaaacattacaatccagttagagtaggggggaaacagaaatatcacttctgccaaatctataaagaacattccattaccactgaaccattttattaatcttaacacaaattaatgtwaggtaaacacagtaatactgtctactaagcagtctggtaaagtatgggtatcagcctgggcaaagaaacagtagattagcttccaatttaccacaaaaagtgtttaaaacaatttttaaaaaattatttatgggaccaaatacttttaagtgtttcctaaattacatcaagacaaatgtgtttgctggacagaacactaatactaggtaaaaaaatattcttagtgtacttttaaaagagtattttaattgccatcttgaactaggaattagatcagacatattccttagaatataacagattgataaaatgcaacaattttctaccattagtaaagataacaaggcttcaaaataattcccacatttactgaatcctcatcatatacaggaacgccttgccaggcaatatgagaagtacaaagacagtgaaaacatgactccaatattcaaaacagtcctttctgcaaatttcgatcctctcctcaaaaaaatgaccccctgccccgaacacagacatatacattcttcaggttgaaaacccattatattaagaatgccttcttacaggaattcttattttcacagcaatgtagcttgataaatt

SEQ ID NO: 75544 - DNA, 552 bp, Homo sapiens
cttattgctcatgaacgtttacatatttgtgactgaactttttttttcccctagaaatctcttaatcaagtgattcttccgtaagtgtttacatagagcttgggttaattctcacaggtcaaaaaaaattgcagattgaaacatcactattattaattcaagactacaaattacttcatttttctttccaatttatgcctgctgtgtatataattctaccatcctagatttgttacaaatagaagatttcattcaaccactggagaaaatactcaatttgaaaagactagttcttttcgtaactttttatacctcaatagttcaattgtatcatttccagcaatgcctgygagtttgtctgaagcaattttttttcacaaatggtgatgaaggtgcatgatggaaagagttatagagctcagaaaataattcccatgttaacctttttgtctgtgtctgtaaaaatagtttttcatgcaatctgtttcctctatggctgggccaaatatttgtgtacattaagttccaaactgtgtttttaagtcaaatagg

SEQ ID NO: 75545 - DNA, 552 bp, Homo sapiens
cttattgctcatgaacgtttacatatttgtgactgaactttttttttcccctagaaatctcttaatcaagtgattcttccgtaagtgtttacatagagcttgggttaattctcacaggtcaaaaaaaattgcagattgaaacatcactattattaattcaagactacaaattacttcatttttctttccaatttatgcctgctgtgtatataattctaccatcctagatttgttacaaatagaagatttcattcaaccactggagaaaatactcaatttgaaaagactagttcttttcgtaactttttatacctcaatagttcaattgtatcatttccagcaatgcctgcgagtttgtctgaagcaattttttttcacaaatggtgatgaaggtgcatgatggaaagagttatagagctcagaaaataattcccatgttaacctttttgtctgtgtctgtaaaaatagtttttcatgcaatctgtttccyctatggctgggccaaatatttgtgtacattaagttccaaactgtgtttttaagtcaaatagg

SEQ ID NO: 75546 - DNA, 998 bp, Homo sapiens
ttaatgatttgacgcagcataatttgagttacaattatattgtccccaaacaatgaagaccacaaaattaaagatcacaatgatgaattcttccttttcatatttgtatttctggaaaatacttgatataacatgatttaatatttttcttgtttatacttgtatacatattattcttgccaccatatcatgctctttccttccgttcatcagtcaccactgtcatttaccatttcttagttaacaacatgacactcacgccaaaccactccacttaaatccagtactcacaactattttgttatataaaacatttgtgtgtttataaatgcacccccaaaaccacagttaaaaccagtaagcggctttctgtgcatagtttttgaatgctgggaacatagaaaatgtatagttcagtctttgctttgaaattgagaatgctcagagtcagagattttgatttacccacttaatattacacagctggatggtcatcagacaagaataaactctcattttcagatatttagcctgtcatgaagaattatagatgaataaataaattatatatgtatatatttggtagcatgtaaaattgagatattccacagagttcccagggatatcgtattagtgctaaagaacaaactagaaataaaacttcaagtaaaatagtgaccttttttatactaaagtgctatgattatgtttctaatcaaattcaattcaaattgtcctcagattcttttttgcctgctgtcatcttgcaattacgttgccttttttttttctgtgtttagtctctttgaatgcaagttttatctaattaatacttttattgtccaatcagaacactcttaacattttggtatttcatcaataaaatgtcacagctctatcttggaggttcaagtctttaacttctaacaaygggagactcaattgtgaacttagtttctctaagtacaaaggttttaagtaagaccatgtcaatgaat

SEQ ID NO: 75547 - DNA, 720 bp, Homo sapiens
aagtaaaattttgtcacaaactcttctggttatgcacctctttgccttagtacagtgttaaatctggaggaaaacgatcaataaattccccccaaataaagtggcagaatatttatttgtgacaataatttattataaaggttaatgacgttttttactatctggaaggagaaaggtcctgacgaataacatccaaaagaaatgctgtgcagacatttttatttcctacacgttttaaacttgaatttaagttttcctcaaacagtttttagaaaggtccaatttggcatccagcacaaggttatctgagaaataattaagtgaggtggtaaacttgccaaaatatcagtgttcccaagaattttattcctgacttagcaaatagtcttttatttgtgactattyactttttttctctatcttatatctaaatattgtttccaagggagagccagtatgactacaagtaagtaatatgcagattagtgacttctctttcctactcatcaaatctcctactaaaatgagattcaaggattatttttatttttaaaataaactaaaccctggttatttgcagcaaccaagacaataacacaaatctcattgtatgtaatatgaaatcttaaaatctcatcttattaattggaaactgaaatcacttgaagaagagatttaaggattaatttttaaatcagtttttaatcttctttttcattt

SEQ ID NO: 75548 - DNA, 653 bp, Homo sapiens
ctcccagcacacccctagtttaagaaaatgggagaatgtctctgagtagaatctggccattttcccaggcttagaccctcatggggaaaatgctccagcgtccatacatccggacacttcccaacttcgcaagctcccttacacctctaaacagctcagacctgttactaggtacttaagaatggggaaagaggaagggcgcagtggctcaagcctttaatcccagcactttgggaggttgaggtgggcrgatcacgaggtcaagagttcaagactagcctgaccaacatggtgaaaccctgtctctactaaatatacaaaaattagccaggcgtggtggtgtgcgcctatagtcccaactactcggaaggctgagtcaggagaactgcttgaacccaggaggtggagcttgcagtgagctaagattgcacaactgcactacagcctggacgacagagggaggctccatctcaaaaaaaaaaaaaaaaaaaaaaaagaatggggaaagagttttctttctttcctcctccacacctcctcacccactccccatcggctggtccagaaaggcctccttcatgcctcaggaacatttccataaccatgtggcagacttgccaggcacagggctcggagcatacaaggtaaagcct

SEQ ID NO: 75549 - DNA, 363 bp, Homo sapiens
gctgcggagggccactgtgagggaggcctgatgaacctctgcccagcaacagtcccttccatcatttgtggctctgatctctaaaagtctgccctggagctccccgtccccctgttctttgacagaaaccctaagaaaggagggctcagctcaatttctcccttaaccacacagccctctaactgaactagggatgcttaactctgtttgawggttccatagtgttctttcctacttttccaacaagtcctgaacaggcttaacttctaaaagcattacttttttaaaatatgatataacttccttttttttgacttttaagttcaggggtacatgtgcaggtttgttatatgggtaaagtcg

SEQ ID NO: 75550 - DNA, 901 bp, Homo sapiens
acagggttttgccttggtgcccaggctggtctcaaactcctggcctcaagttatctgcccacctcagccactctaagtgctgagattacgggtgtgaggcaccgtattgcwccagatttggcagattctgactggctaatttttataccttgacaggcactaaccactaagacctgagtcatcatatactttaaaataagtatctacatttaaatttcctttttgaattggttattaggaaaatgtccaactccttaggcaaaacttcctactttctgtctacaaataaagagaaccgcactttgggaggccgaggcgggcggatcacaaggtcaggagatcgagaccatcccggctaaaacggtgaaaccccgtctctactaaaaatacaaaaaattagccgggcgtagtggcgggcgcctgtagtcccagctacttgggaggctgaggcaggagaatggcgtgaacccgggaggcggagcttgcagtgagccgagatcccgccactgcactccagcctgggcgacagagcgagactccgtctcaaaaaaaaaaaaaaaaaaaaaagagaaccatgtactccacattccccttttcaccttatgtgccaagaaattcaaagctaaattcagagttcaactacaataattaacttgtctcaggtgcttctaatagctactaacagtcagggtacagctccttttactggtttccaatctgctttaacttgtacttatccggttttatgttacccataaatgtagtgagctttcctcacattctgcattttggattttatggggtataaatcataaacaaacaaaaatacccaggtgtgcatttttctcacattcaaaggtttaacatttggctccacaaaagagcagctcagcaggaaatc

SEQ ID NO: 75551 - DNA, 1067 bp, Homo sapiens
tctgtttattttaggatgttaagacagttaaagagctaacacccgagcttaagaatcttgagacataatgtgactatgtaaatcacttagtagtrtatcatatgtataatatataatcctttcatagtagaatgtcaggcatctaatccaagaaaaataatatgcttaatgttatcacaatatgtggaagcataatttcaatgttacaaagtagaaaacattgaaatcaacttacatcaattcaagaactaatagcatcaaccctatttaaaagaggataatttaattactttgtttcctggaaagggaaacaagcactttacctttgatttatttcatggaataccacaagggattctgaatctaaatattacttggtaattttcttcttatgttgaaatatcaatcttttttctaaaatgtccaatactgtaattgttacattaatcaagaaataaaacccataaggcaaatgatttccttctcttcacattgaaaacagaatataaatcgtctgcttcttttcagtgatttttaaaaatctagataatcactatatatttttaaatcgagataatattctagtattattgtttatcatgctaacctatattttagggaattacgggatatatattatacaaatgaaaccaattggttagtaataaactacacaaaatatattttattatggagagtttaacattaatttcagctgaccttcctatgaatttatttatttctcctcccttccttcactccatctaaataaactctatgttaattacaaactgagctctggctcaggaaattactgatcctgctttttatctatttgtagtgagttacctagaactataaaattagtggaatagagcactgtccaggttccatgccaattacttttaaaatgaacctcttttaaaatgaacactgtgctaatatgtgtatttgatttagaaaatgatttgtaaaattagaagaaaaccttggcttagcttttgtaatgccctaacaatccaagtccattatcttcctcggattgatgagttccactgtgaatggca

SEQ ID NO: 75552 - DNA, 887 bp, Homo sapiens
ggttatagagtagaatattctgtaaatgtctgttaggtccatttggtctagagtccactttaagatgaactcatctttgaaagagcacaaaatccaaatgactctctcttgggaatgtctcaaacctctccctttctgtctattctgatttttatcagcctacttctaccaggattcattatctccatcttccctttaaaacatttttgttttgttttgttttgagacagggtctcattctgccattcagtctggaaagcagtagtatgatcatggcttactacaacctgggcctttttggctcaagcaatcctcctaccttagcctcctgagtagttgggactacaggtatgaggtcactatacctggctaattttgtcgttgttctagagatggagtcttcctatgttccccaggctgctctcaagattctcccacctcrgcatctcaaagttctgggattacaggcatgactcaccatgtctggtccttaaaaacttttatttcaaaatgcttctctgacagctagtcatgcagtttggaaatggtcttgcaaataaatatgagcagaaaaatttacccagcaaagtaaaagatattcaagggttttctgagaaagccaattatcttctctcacctgaagtttattggtctgtttgcaaaggaataaatatatgggttaacagtgaggttgtatttgggacacggataataagaataattaacatttattaatcacttactataggttaaaagatttatataatttatcccagcaactcccctcaataactcaatagagtacatggaatttcataccagaaagtacaaacagggaaactaagcctcagagaggcaaaataatatgtccaattaacaatcagcct

SEQ ID NO: 75553 - DNA, 654 bp, Homo sapiens
gcttgggctcctttgcacctgcatatttgtgcactagctgctttttatccctggaacactgcattcctttctttgctgggtaaatgccttctaaccccttagcactttgctgaaacagagcattttgttttgcaaactcccacctccactcatcccttgcagcttaggtgactaagtcctggccaataagatgtaagtgaaaatcactgggtggaactaccaagaaggctcattgaaaggagcgcagatggctgcatggcctttccacctttttctagtttttttatatataatggatgtgatggctggtgctccagcagccatcttagacacaaggtcaccttcagaatgaaaatcatgctctatggatrgagaggccaaagagagaagttgcctgggatattgctgatattgtggtgctaccatataccaaggctagactggctccctttggttcttttatgagagaggaagataaactcttatgtgtttaagccactgttattttagtttgttgttatatgcagaaaatcgaatcctagccaatataacagacatacaagtcatttcctgatttggctcctacacacctctctagccacacatttcccctccccacccccaaaccccatactccacacctactaatctaat

SEQ ID NO: 75554 - DNA, 1231 bp, Homo sapiens
gatgcaaaatgatcctctgaataatagtaagaaaattttaggacttcttattatattaattttacctcaatctttaaagattttattttagggaaagtttcaaaaaataaatgatataaaagtgtagtggtacatttatgttacatataaaaatacacaagtaataggctcaacatatctggagactcctggtctataccacaataattaagctaaaggaattctaggtagaaagtatgcagccacttattatgatactacaaatttataaatattgatgcaccaagtatccaaaattatgaaaatactatattctaaagagggggctacaactcctgattttacatactaatttttgattgggaagtaaaaataatacctctaaaggtaaggcctctaggtttttttttttttttgagataagaaaaaatgcagawtgagattttccatctacatagcttaaaaagacaagggagtggaacagacttgttataccttaaaacagtatttccaaggaggtactcttcaatgctattaggctttctagaggaagaggggggtttgttaaacaggtttctttcctagaagaattattagagctcctaataggagactctaataggcactatctaagaggcagacaaacttatttgaccattgcatcatgtttttgagaagcacttcctcgaatgaacctgtttttgaatgtacttggaaaatgctgactaaagtaaattgcagttttctgcctagggcccaaacttctacccattaaattagtgtccatccctgttcaagttaattccagtttaatttttgccttaccaagagtcagggtagtctggctcttttcccttgtaccttaatcctcttatattcaatatatatgggtggaggtctttccatttatgccagtgccgtgctaaggataaagagaaaattataaaaatacataatctttattctagacattatacacatacttattcacaattattataaatcagaagttataaataggtttcagagggaaactgtgcttggtttggtgcattagggaagcatccatgaaatgatatttctgctgagatatgaacgatgagttggaaatggacatttgaaaaacaagggagctcctaaaataaaggaaataaatatacaaatgctctgagtgtaggagagatttgttcatcatcaccattagattagcagggtagtgtggttggagcag

SEQ ID NO: 75555 - DNA, 1231 bp, Homo sapiens
gatgcaaaatgatcctctgaataatagtaagaaaattttaggacttcttattatattaattttacctcaatctttaaagattttattttagggaaagtttcaaaaaataaatgatataaaagtgtagtggtacatttatgttacatataaaaatacacaagtaataggctcaacatatctggagactcctggtctataccacaataattaagctaaaggaattctaggtagaaagtatgcagccacttattatgatactacaaatttataaatattgatgcaccaagtatccaaaattatgaaaatactatattctaaagagggggctacaactcctgattttacatactaatttttgattgggaagtaaaaataatacctctaaaggtaaggcctctaggtttttttttttttttgagataagaaaaaatgcagattgagattttccatctacatagcttaaaaagacaagggagtggaacagacttgttataccttaaaacagtatttccaaggaggtactcttcaatgctattaggctttctasaggaagaggggggtttgttaaacaggtttctttcctagaagaattattagagctcctaataggagactctaataggcactatctaagaggcagacaaacttatttgaccattgcatcatgtttttgagaagcacttcctcgaatgaacctgtttttgaatgtacttggaaaatgctgactaaagtaaattgcagttttctgcctagggcccaaacttctacccattaaattagtgtccatccctgttcaagttaattccagtttaatttttgccttaccaagagtcagggtagtctggctcttttcccttgtaccttaatcctcttatattcaatatatatgggtggaggtctttccatttatgccagtgccgtgctaaggataaagagaaaattataaaaatacataatctttattctagacattatacacatacttattcacaattattataaatcagaagttataaataggtttcagagggaaactgtgcttggtttggtgcattagggaagcatccatgaaatgatatttctgctgagatatgaacgatgagttggaaatggacatttgaaaaacaagggagctcctaaaataaaggaaataaatatacaaatgctctgagtgtaggagagatttgttcatcatcaccattagattagcagggtagtgtggttggagcag

SEQ ID NO: 75556 - DNA, 1610 bp, Homo sapiens
tttcctcttcaaagtttttttctccttcaatctttgttgctttttattacttatctacaatatataaattctgggatagtaactaatgtatggtaagataatatatctagttaataaaatcagatatattgacgtctccttttacagcatgatgaccttaatgcttttccatcacytgaacaggttgagaagcattgctctaccaaaatgaaccacgtgtttataattgcaattaccaatgccctttattttgaatatacaactagccaggttattcagagagtaagctcatgaagattatgatcaggttaaagagacaaaccatgtaatacacaagataaatacccaacagtaaaatcagtgatattaaatatgcctgagctgcagggaattctatcagaatttagcaaaatgagatagcatggtagggcagggtaaccaggaaagctttgaagtttgctaagaagttagaagagcaagggaaggtagttcagctgaggggaacagcaagacccaccattttgaattatcaaggatcttttcagcttcttaatgttcaaagggctttttctttcccggtggtgtattctattcatgtgagatattcaagtttttggtgtatgtagatttttcccttcattactgtatagtgcaagttttgtgaaggcagtatcttttttaaaatttatttttctctcctacaagctaacctcatgtctcaaaatagtgaccaactgatgataaatctagaattgtatgaaagttaaatctcaggcttaaaaatgaagattattgtttgcagttctgctttaaatatttacctgtgtaagtttagacaaattatctaacttctatgagcctcagttttttaaagctatacaataaggataatagaaccaacctcataaaattattgatgcacataaagtgcttagcagtttggtacaaggtagctattttttcattatttaaatgaaattttaaaggagtgcattaacaaatagatgcataaaatatatagaaattaataataaaaagaatgactactttatccattaaatgataaaaatgacaaaacctggtaaaaatactcagtatatctcctaaaaaagaaatcagatggcaagaacttcaacaattactcatataaacaaggcagagaaaaagatatcaaaataaccaatgttaaatacatttactatgattttgtaaaataattttacaagacaaaaatatcataggaaaatagcattgacctaggggatggggagaaaagcagatcagaaaatgttgagtaagataatagaataggcaaaatggtagaataatactcaagagggttttcaatttcccttagacaggagcgataatggaattgcaaaggcaaagcatatgatgctggaggtggtagagagctgtctttttcttgcatttatggagcagccagtaagtttagaggctattttggagtaagccctaagacttagaccaactatgatgaatgagactgaattgagcaaacaactaaggcttaatgctcaccatatcaattcttggctggcgaagccaggcttttaaagattttagattttttttttaaactagacttt

SEQ ID NO: 75557 - DNA, 664 bp, Homo sapiens
ttatctcagctctcaaatctttgagaacagaggcccttttggatgccttatctagaaagccatatcttgtattgatttatagcatttactttctaagcctatctggaaatgtctagccccatattggatattttgcaaattggcaatttcacatttcagtttattttttcttattaaattcccaaattcaggtttaagcccatttatagaaagatatgacaagactatacttcagctgktgggtatacacaaatatgctgcttgaaggttttctgaagtctattttctatctttattcagcctcccgagtagctgggactgcaagtgtgttccatcacacctggctaatttttgtattttttatagaaatagggtctcaccatgttgcccatgatggtctcaaactcccaagctcaagtaatcctcctgccttggcctcccaaagtgctgggattacaggcgtgagccaccatgcccagattcatttagtttactttgaatctttattcaacctctccttaaaagaaagccttctaaaattactttacataatatattttctatttttatatttaaattttcacaactgggttatataactcttctattttctgtgcttctttttttttttaccattttttcttatctaagaggattttagtta

SEQ ID NO: 75558 - DNA, 1000 bp, Homo sapiens
gaagggaaagcaaacacaaccttcatcacaaggcggcaggagagagaagtgccagcagggaaaatgccagatgcttataaaaccatcaaatcttgcgagactcactcactgtcacaggaacagcatgggagaaacctcccccatgatccaatcacttcccactggctccctyccacaacatgtggggattatgggagctacaattcaagatgagatttgggtagagacacagccaaaccgtgtcagatgtgtttggcagcaaagtgattagcatggacatgttattctccagaatgtaaatacatagatgtggcaatcatggcatgaaaagatcttggtaaccagtgggtcagatccctccgggatgagggccttacctcatggatgattctgacatcaaggtcaacagagatgctagcacaggtgcaagaaaacacaggcagctagtggagaagggagatgatgagtatctgtcacagacttgagaccagctgcaacagtgagggtcgtgccttgtcccaacaaccagaaccctggatggaaagaactcactgtgagaagcaagtgggcttggaggtataaggagtggactgcagtggatgctatggtaatttgtccaggtccctccctctgcaccgattcttccttccctagattctgagtatcagctgttgatggcttatagctatgtccctcattgggaattgagctctgctgcataaaacagccttgccgatgttgtctcagtgttgtctcatcccagcaggtgacctgaagccaatgacagactgatgcagggatacagagtcccagctcccttgccaatctgggacagttctgataggcaactcctgctcaaagcccctgaaggatcggttgaggtctcaattgtaaacacaatgaacacctattgcagtattcagcaagtccaaatgcttagacgaacacaaaatatgtagcctaggagagctcatcttctgaagaagaaaatcaaaatgca

SEQ ID NO: 75559 - DNA, 1000 bp, Homo sapiens
gaagggaaagcaaacacaaccttcatcacaaggcggcaggagagagaagtgccagcagggaaaatgccagatgcttataaaaccatcaaatcttgcgagactcactcactgtcacaggaacagcatgggagaaacctcccccatgatccaatcacttcccactggctcccttccacaacatgtggggattatgggagctacaattcaagatgagatttgggtagagacacagccaaaccgtgtcagatgtgtttggcagcaaagtgattagcatggacatgttattctccagaatgtaaatacatagatgtggcaatcatkgcatgaaaagatcttggtaaccagtgggtcagatccctccgggatgagggccttacctcatggatgattctgacatcaaggtcaacagagatgctagcacaggtgcaagaaaacacaggcagctagtggagaagggagatgatgagtatctgtcacagacttgagaccagctgcaacagtgagggtcgtgccttgtcccaacaaccagaaccctggatggaaagaactcactgtgagaagcaagtgggcttggaggtataaggagtggactgcagtggatgctatggtaatttgtccaggtccctccctctgcaccgattcttccttccctagattctgagtatcagctgttgatggcttatagctatgtccctcattgggaattgagctctgctgcataaaacagccttgccgatgttgtctcagtgttgtctcatcccagcaggtgacctgaagccaatgacagactgatgcagggatacagagtcccagctcccttgccaatctgggacagttctgataggcaactcctgctcaaagcccctgaaggatcggttgaggtctcaattgtaaacacaatgaacacctattgcagtattcagcaagtccaaatgcttagacgaacacaaaatatgtagcctaggagagctcatcttctgaagaagaaaatcaaaatgca

SEQ ID NO: 75560 - DNA, 1000 bp, Homo sapiens
gaagggaaagcaaacacaaccttcatcacaaggcggcaggagagagaagtgccagcagggaaaatgccagatgcttataaaaccatcaaatcttgcgagactcactcactgtcacaggaacagcatgggagaaacctcccccatgatccaatcacttcccactggctcccttccacaacatgtggggattatgggagctacaattcaagatgagatttgggtagagacacagccaaaccgtgtcagatgtgtttggcagcaaagtgattagcatggacatgttattctccagaatgtaaatacatagatgtggcaatcatggcatgaaaagatcttggtaaccagtgggtcagatccctccgggatgagggccttacctcatggatgattctgacatcaaggtcaacagagatgctagcacaggtgcargaaaacacaggcagctagtggagaagggagatgatgagtatctgtcacagacttgagaccagctgcaacagtgagggtcgtgccttgtcccaacaaccagaaccctggatggaaagaactcactgtgagaagcaagtgggcttggaggtataaggagtggactgcagtggatgctatggtaatttgtccaggtccctccctctgcaccgattcttccttccctagattctgagtatcagctgttgatggcttatagctatgtccctcattgggaattgagctctgctgcataaaacagccttgccgatgttgtctcagtgttgtctcatcccagcaggtgacctgaagccaatgacagactgatgcagggatacagagtcccagctcccttgccaatctgggacagttctgataggcaactcctgctcaaagcccctgaaggatcggttgaggtctcaattgtaaacacaatgaacacctattgcagtattcagcaagtccaaatgcttagacgaacacaaaatatgtagcctaggagagctcatcttctgaagaagaaaatcaaaatgca

SEQ ID NO: 75561 - DNA, 1000 bp, Homo sapiens
gaagggaaagcaaacacaaccttcatcacaaggcggcaggagagagaagtgccagcagggaaaatgccagatgcttataaaaccatcaaatcttgcgagactcactcactgtcacaggaacagcatgggagaaacctcccccatgatccaatcacttcccactggctcccttccacaacatgtggggattatgggagctacaattcaagatgagatttgggtagagacacagccaaaccgtgtcagatgtgtttggcagcaaagtgattagcatggacatgttattctccagaatgtaaatacatagatgtggcaatcatggcatgaaaagatcttggtaaccagtgggtcagatccctccgggatgagggccttacctcatggatgattctgacatcaaggtcaacagagatgctagcacaggtgcaagaaaacacaggcagctagtggagaagggagatgatgagtatctgtcacagacttgagaccagctgcaacagtgagggtcrtgccttgtcccaacaaccagaaccctggatggaaagaactcactgtgagaagcaagtgggcttggaggtataaggagtggactgcagtggatgctatggtaatttgtccaggtccctccctctgcaccgattcttccttccctagattctgagtatcagctgttgatggcttatagctatgtccctcattgggaattgagctctgctgcataaaacagccttgccgatgttgtctcagtgttgtctcatcccagcaggtgacctgaagccaatgacagactgatgcagggatacagagtcccagctcccttgccaatctgggacagttctgataggcaactcctgctcaaagcccctgaaggatcggttgaggtctcaattgtaaacacaatgaacacctattgcagtattcagcaagtccaaatgcttagacgaacacaaaatatgtagcctaggagagctcatcttctgaagaagaaaatcaaaatgca

SEQ ID NO: 75562 - DNA, 1000 bp, Homo sapiens
gaagggaaagcaaacacaaccttcatcacaaggcggcaggagagagaagtgccagcagggaaaatgccagatgcttataaaaccatcaaatcttgcgagactcactcactgtcacaggaacagcatgggagaaacctcccccatgatccaatcacttcccactggctcccttccacaacatgtggggattatgggagctacaattcaagatgagatttgggtagagacacagccaaaccgtgtcagatgtgtttggcagcaaagtgattagcatggacatgttattctccagaatgtaaatacatagatgtggcaatcatggcatgaaaagatcttggtaaccagtgggtcagatccctccgggatgagggccttacctcatggatgattctgacatcaaggtcaacagagatgctagcacaggtgcaagaaaacacaggcagctagtggagaagggagatgatgagtatctgtcacagacttgagaccagctgcaacagtgagggtcgtgccttgtcccaacaaccagaaccctggatggaaagaactcactgtgagaagcaagtgggcttggaggtataaggagtggactgcagtggatgctatggtaatttgtccaggtccctccctctgcaccgattcttccttccctagattctgagtatcagctrttgatggcttatagctatgtccctcattgggaattgagctctgctgcataaaacagccttgccgatgttgtctcagtgttgtctcatcccagcaggtgacctgaagccaatgacagactgatgcagggatacagagtcccagctcccttgccaatctgggacagttctgataggcaactcctgctcaaagcccctgaaggatcggttgaggtctcaattgtaaacacaatgaacacctattgcagtattcagcaagtccaaatgcttagacgaacacaaaatatgtagcctaggagagctcatcttctgaagaagaaaatcaaaatgca

SEQ ID NO: 75563 - DNA, 486 bp, Homo sapiens
aggggaaagaaatagtggaaagggataaataaaagacacaatactgtatgaatgaggcatgggtgagaattgatggaacagattcttcaagaaaaaacaaagagatggcatcaagaggatgtatgtttcagaccaacatagggtgaagaaaggggcaccttttttttttttttttttttttttttttgacagggtcttgctctatcatccagtccagtgcagtggtataatcttggctcacggcaacctcaacctcctggtctcaggcaatcctctcacctcagcctcccaagtagccaggaatacagacaggcacatgctacccatgcctagcaaacttttttattttttgtaraaacgaggtgtcatgatattgcccagattggtctcaatctcctagacacaagcaatcctcccacctcagcctcctaaagtgctaggatttcaggcatgagccactgcacccagcagaaagaggcacttctt

SEQ ID NO: 75564 - DNA, 958 bp, Homo sapiens
tacttggcttcatcgtgcttttgaccaacttttgtcaagggcaggaaacctcctctctctctattctaaatgaggaagttctattcaatgtccaagatctacctcaactattagctcctctgtatagccacctctctctattagatttggaactgagtgggttttttgtgctaaatttcccctgaagatagattgcaaagtccatcagagccagaatgtatattccctagcactatgggcaagattctcacataatagtaggcatttggatttattagagcgtgatcaccatttgtcattttttaaactgtgtagccaactgatcctatttgttttttctagtgatggtaaaagctatcaagattcagagagtcgagggcagtgtttttgtattctaattttgagacttacaatatattttctctgtaacctatattctcataattgataaactacttgacagcagggaagagaagaagggaactcactggcccacatgctaaagccaaaggtgagcaatgggggatagtaagccttcaacagtggaaggtctaggaaaagaagttgaatgctcaggtttcactttggcttgtctgtttgcttgtttgtttgtttcatggaaatatgtggaagggtgtttgcttaatcttttttagttcaggaatatggcaagtgatgaaactggtaacgggtaagaatggtaaggctgatacttggtattgtaggtccttcacagtgtgaaggattaataagctctaattcattttgagaagaaacttgagtatattacttctctgtatcttttggcggatgtctgcatgatagggccaaaagctcaagcataaaaacccacttcgtccaaaagtcttacttgattaacatgctccccattaccgttaccattttattatgcccagttgacccatcccttgrtttatatgatcatatgtgttatgca

SEQ ID NO: 75565 - DNA, 794 bp, Homo sapiens
agtatgaatgtgagtgacacctacaatttaaaagtgcctcagacggtcataatagtaacattgggctcacgatgattgtttttaaaatagccttaaattttaactcgacataacagactgataaattcctgcattcagaaaggcaattttatttagatttttacaaaaatgtaaaaacatatatctaggaattaaagatttagttcgtgtgtgtgtgtgtgtgtgtgtgtgtgtgtgtgtgtgtgtgtgtgtgtgatttcttttgtggagttaccttgttaaggaaatctccatttttcctatttactttgaggggacttcaagacttccttctctgaaaccccaagctaaaggtaaaaatgactagcatcctcagtgtttggaattcctggccccccaggccatgagcacagcctgtatatttaactctaaggaattcacataaaatactgacatgtttttattgtggatatagggcaactattccgaacttataaaattaactgctttcaaatatttacarggagaggaaatacggtttaacctcttctccatttgcgatcttcactggtgtttttgctctactaggattttatggaatttacttattcacaatgttatgctttaaaataaaaattaaaaccccaacatattgtttatataagcagattttatgattccgtctctgtctaccacatttcagagacatggaatctgacaactaggaatttagtttacattgcatctgaaaagtggtgcacaggcattttgtactttaaatcagaaataggaca

SEQ ID NO: 75566 - DNA, 1159 bp, Homo sapiens
ggagactccatcttaaaaaaaaaaaaagccaaagaagaaaaaggaaattctgtataaatatactgatacataacttttgattttgataatttgaaaaatattaacaagtcaagtgccatgtaaaagaaactgcacaatgcagatagattggaagtgatatagaatattagaacagtatgtcagctctagccttgccaggaaaaagctggaaaggcaagtctaacaacttctggaatgccaggaattgaaaagagcagagagcaaaaggacaaaatttattatcagttttctgagaagagtgaagacagggttaatacagagtttttttcccaggtaaggggcaccaggctagtaaccctgattttactaccaaatagatctaacgtaggagtgatagaacaggcttcaaccccagagacctactctaggagtggcatgatagttctttagagttaagggaatagttgatgggatgcaaattatggtggcgttttgtgtgatatagaaaactatactggcaccaccaaataggatttaaattgagccagttgctgcttagagttgttactttaattttttcaaagatttgaggtacagtttagaaatattccatttgaaatataaggaaaaatatataaaaatatgtaaaataatgaaaatatttaaaatacataaaatgtgcatatgtatttctagcctatatgttatatttacaaaattgttcttaactgttgaagaattatagccaagtcatctaaaataggacttttttttcacatccagaaattttattaataattgtgcatattcaggtactctgaatttggctcttgcaactttctcttatgttaataaatgcatttaactttggctgattttattccttttacatgtttgtttacattaataccaagtaaattatagctggctttctttgctcaagtctgtcaccataaaatgatatgagggttgccaattccaatggtgtgtaaagcattgtcttactattttatatctctgtaaggaatttcaggaattgaatggttgcagtagcaacaasaacaacaaaacataacaggaactaagagagatgatttcccgtaacaaatagccttttaaaaaaatcatgatatggccgggcgcggtggctcacacctat

SEQ ID NO: 75567 - DNA, 1183 bp, Homo sapiens
aaataaccagaaaacttttcattcatttaccaaaaggcatcattacatatttattttaatactcataaacaaaactgatgaaaaataataattttcatcctaaatttgcagtggaatttgctgcatgacagtgatcaatttaaatatgcaaatatagtccaggttctggatttactaatgatttattcttacaggcagaagtgaaataaaagtttggagggtgactccatctgtagaaggaacctttgtcccctaatttacaaagcattggaaaatgaccagtatatactttcttgtaagtagttgtggagcatcaggttcatgccattgccttttcggtatgactcagacctcatattccaagcaaacaatgctctaatgtgagcgaggctagctagagtaggccatactcctttatggaaggtacttaattgatcattctttaagcccttgcctgcaaacataaccactgtcaggatccaaagggcccctctgctcaccatggcttagctggtttctaatactggaaactagtttaagccctgtatcactgtggcctgggcgtgagagttaggacaggcacagaattttccccagaagccataatacctgtttcttttctccctatctaatttactgggctgctttcagtaactccactttgtttggcatatctgggcactgtgaaagtattcttatattattatcattctaatacttagggttcaaatagaggtttttcccccattctacccaaaggtgaggtttttttggttgcaatgctagggcctttcctgaatgggagctcaaccttgtttcctaccattattacattccgctttcatgatctaggcacacctctcttctttycctgaacatgccatatcctatcatacctgaaaagcctttgcatatagtgttccatctgtctctaatgtcattttacttcatcattctacaagattcagatttatttattcatctgatatgtaatttttttctttaagtgttttattgaaatatatttcacataccatacaatttacttatttaaagtgtacagttcaatagtttctagtatagccacaggtatatgcagccatcaccatagtcagctttagaacatttttcttatctcagatagaaacactgtaccctttagctctgatctcccattgtcccc

SEQ ID NO: 75568 - DNA, 1248 bp, Homo sapiens
ttatttctagactctcagttctattccattgatctataggtctgtccttatgccagcatcaccctgacttgatcactgttgctttgtagtaagttttgaaattgagaactgtgactcctcctgctttttttaaataagattgtttttactattttgggccctggcaatttcgtatgaattttagaatcagtgtatcaatttctacaaataagtaatytgggattctgatagggattgcactgaatctacacattaatttgaagattattgccatcttaacaatattgagtctttcaatccaggagcatgagatattttttccatttattttgatctttaatttctttcaataacattttgtagttttcagagtatatgttttttactgaattttttaagatttattcttcagcattttattatttttgatgctgttatacatgaaattattctcttaattttattttctgattttatccaacatacaattaatgaggacctaccatggaccaagaactgtcttagctgctggtgatacaaacatgaattatcttcagcacctgcccttgaaaacttggagttttggtaggatccataatgaagagtctgccatacattattagatactccttcctctgagagtccacagtgttttataggttctaggttatcctagataaggcacataaagcactcacccactttcccatttctgtaataccttgagtaagtttcttagcataactgtttagatataaagaaaacctaagggtaagctaaggtaactctttgtagatgaggaagcagatcatcagagtgctaagtgaacacactagttattagcagagtggagacttccttacttctatatctaacattgttgtcactgtcccacagggtttacaggtatttctgaaagcttttgggaagcagtcattactttcgttgaatcactagggtgctagtggttagcatcagcctaggcttacagtgtgtgaaactacactgtaacagctggagagtaaatgtactttcagaaaataaactctcaatgggtattttacatgctgggaagtcatgactcagccattcccaagtgacctaagtttgaagccagaatgtcctatagtattggaaaaggaatatttcacataaaatgacaaccaaatgagtctatcaggttaggctggtgtatgatcatgctataagagattaataagacagtttgacagtattctttattagtga

SEQ ID NO: 75569 - DNA, 807 bp, Homo sapiens
ttttgatgtactgatgtttttaaaaaatatatagccaaatctgttgtaaataaatatccakaagccataaggaacttaaacaaattaacaagcaaaaaacaagcaaccccattaaaaaatgggcaaaggacctgaacagacacttctcaaaagaagccatacacacagccaacaagcatatgaaaaaaatatgctaaaaatatgctcaccatcactaattccatcatattcgtgcctggaatgtcctttacacctagaggcaagcattgacttaaattctcacctctaattttaatatgttttttctcccctagtcccttttgctttgtggtatgaatcagggtcctaacattttctattcgcaaagaaaaagccatttttccctgtggtacatattcaggggcccctccctcccactgagttgccattctgcctgtataaaggatggttgtttgggtgaccctcaatagatctctcacctctctgaacagccgcactgccatggtcagtaatgatttatgatatgttctgacatatgtttaagcaagccccctcattcaactcctctgtcataattcttagctattttcacctatatattttttagataaacttaacatttattttttcaaatctttttgttctcctaaaaaaaaaaaaaaacagtttaaggaaaagttaaacttctaagttaatgttggaagaatcgacatcttcacgatctccagttttctctttcccgctgttattcaggctttccctgcatgtgctgggtggtgtttgggtgggacgtgtgggtaatggggg

SEQ ID NO: 75570 - DNA, 807 bp, Homo sapiens
ttttgatgtactgatgtttttaaaaaatatatagccaaatctgttgtaaataaatatccataagccataaggaacttaaacaaattaacaagcaaaaaacaagcaaccccattaaaaaatgggcaaaggacctgaacagacacttctcaaaagaagccatacacacagccaacaagcatatgaaaaaaatatgctaaaaatatgctcaccatcactaattccatcayattcgtgcctggaatgtcctttacacctagaggcaagcattgacttaaattctcacctctaattttaatatgttttttctcccctagtcccttttgctttgtggtatgaatcagggtcctaacattttctattcgcaaagaaaaagccatttttccctgtggtacatattcaggggcccctccctcccactgagttgccattctgcctgtataaaggatggttgtttgggtgaccctcaatagatctctcacctctctgaacagccgcactgccatggtcagtaatgatttatgatatgttctgacatatgtttaagcaagccccctcattcaactcctctgtcataattcttagctattttcacctatatattttttagataaacttaacatttattttttcaaatctttttgttctcctaaaaaaaaaaaaaaacagtttaaggaaaagttaaacttctaagttaatgttggaagaatcgacatcttcacgatctccagttttctctttcccgctgttattcaggctttccctgcatgtgctgggtggtgtttgggtgggacgtgtgggtaatggggg

SEQ ID NO: 75571 - DNA, 807 bp, Homo sapiens
ttttgatgtactgatgtttttaaaaaatatatagccaaatctgttgtaaataaatatccataagccataaggaacttaaacaaattaacaagcaaaaaacaagcaaccccattaaaaaatgggcaaaggacctgaacagacacttctcaaaagaagccatacacacagccaacaagcatatgaaaaaaatatgctaaaaatatgctcaccatcactaattccatcatattcgtgcctggaatgtcctttacacctagaggcaagcattgacttaaattctcacctctaattttaatatgttttttctcccctagtcccttttgctttgtggtatgaatcagggtcctaacattttctattcgcaaagaaaaagccatttttccctgtggtacatattcaggggcccctccctcccactgagttgccattctgcctgtataaaggatggttgtttgggtgaccctcaatagatctctcacctctctgaacagccrcactgccatggtcagtaatgatttatgatatgttctgacatatgtttaagcaagccccctcattcaactcctctgtcataattcttagctattttcacctatatattttttagataaacttaacatttattttttcaaatctttttgttctcctaaaaaaaaaaaaaaacagtttaaggaaaagttaaacttctaagttaatgttggaagaatcgacatcttcacgatctccagttttctctttcccgctgttattcaggctttccctgcatgtgctgggtggtgtttgggtgggacgtgtgggtaatggggg

SEQ ID NO: 75572 - DNA, 751 bp, Homo sapiens
ctgcacaggtgaattctaattccgagaccaccatgtacscaagcagacaagacgttgcagaggacccaccaagtatggtgctggatgaaggaaataaaatcacagacccccctgcaaggctcaattgcacagacctaagagagctccatagaatctcaacccacaggcggagagctgggtggagatgccataggaagaggaaaggcgcagtcggacagccctgaagcccagtctccactcaccactcaccagctgtgcaacactgagcacatcgtttgtcttccctgagcctcagtttcttaacttataaaatgggtgttattaattaaacgagttcgcagaggtaaagtgcctcacacatggaaggtagtcaatacatgttattttcttcctttctttttttccaagccagacacagagataaaccagaaagagatgtggtccaaaaacaatgtcgaatcccagctcccccacctcctaacaatgtaaatttgatcccctcttgaaccttcctttgttcaccagtgaatgagaaaaataatacccacagcaaataagaaatcggcggtcatgaacgttctttatcaactgcaaagtgtcgtgaaaaggcaagtgaagactctcattgttaaagaacagaggagaggagaacctgtctactgattccacggagcctgcagttgccgtgtggctgcatacggggtgacttcatggtaattagttgcccaattcccatcattagagcggatcc

SEQ ID NO: 75573 - DNA, 751 bp, Homo sapiens
ctgcacaggtgaattctaattccgagaccaccatgtacccaagcagacaagacgttgcagaggacccaccaagtatggtgctggatgaaggaaataaaatcacagacccccctgcaaggytcaattgcacagacctaagagagctccatagaatctcaacccacaggcggagagctgggtggagatgccataggaagaggaaaggcgcagtcggacagccctgaagcccagtctccactcaccactcaccagctgtgcaacactgagcacatcgtttgtcttccctgagcctcagtttcttaacttataaaatgggtgttattaattaaacgagttcgcagaggtaaagtgcctcacacatggaaggtagtcaatacatgttattttcttcctttctttttttccaagccagacacagagataaaccagaaagagatgtggtccaaaaacaatgtcgaatcccagctcccccacctcctaacaatgtaaatttgatcccctcttgaaccttcctttgttcaccagtgaatgagaaaaataatacccacagcaaataagaaatcggcggtcatgaacgttctttatcaactgcaaagtgtcgtgaaaaggcaagtgaagactctcattgttaaagaacagaggagaggagaacctgtctactgattccacggagcctgcagttgccgtgtggctgcatacggggtgacttcatggtaattagttgcccaattcccatcattagagcggatcc

SEQ ID NO: 75574 - DNA, 751 bp, Homo sapiens
ctgcacaggtgaattctaattccgagaccaccatgtacccaagcagacaagacgttgcagaggacccaccaagtatggtgctggatgaaggaaataaaatcacagacccccctgcaaggctcaattgcacagacctaagagagctccatagaatctcaacccacaggcggagagctgggtggagatgccataggaagaggaaaggcgcagtcggacagccctgaagcccagtctccactcaccactcaccagctgtgcaacactgagcacatcgtttgtcttccctgagcctcagtttcttaacttataaaatgggtgttattaattaaacgagttcgcagaggtaaagtgcctcacacatggaaggtagtcaatacrtgttattttcttcctttctttttttccaagccagacacagagataaaccagaaagagatgtggtccaaaaacaatgtcgaatcccagctcccccacctcctaacaatgtaaatttgatcccctcttgaaccttcctttgttcaccagtgaatgagaaaaataatacccacagcaaataagaaatcggcggtcatgaacgttctttatcaactgcaaagtgtcgtgaaaaggcaagtgaagactctcattgttaaagaacagaggagaggagaacctgtctactgattccacggagcctgcagttgccgtgtggctgcatacggggtgacttcatggtaattagttgcccaattcccatcattagagcggatcc

SEQ ID NO: 75575 - DNA, 1099 bp, Homo sapiens
catgggcggggtgagaagggggagtctgagtgccacagctccccactgcttctaagttaagactgttaaacccttcgtcctcctgtgcccggccccggctgagccgaggaaatcgctgacggtggcacacagctttctaatccacagggatgggagaggctgccctggctgtgttcgtgactagggtgagcctaccaggctggatggatcagtgcctgagaagtggccctgggtagtggagacagaagctatgcccccgagggaagggcgggtcatgctggaaaccaggaggaaaagaagcccagggctccccagggaccaggggaggggagacggcttggggacaaggatcagcctcttccctgaggcagtctgggtctaaccacctggtacactgggaggctgagaaaggttacaccagttaacaagaaaatcttaaaggccacaatgttgaggatgaggaatgaatgaagtcccagctgattcctgtccagatttccactccaaccacagaacaccaaactcagccaagactagcactgggaagatgacacacgtgggccgagataggaagacaaaaccataacaagaatttgtttctcttatactttatcaaaatacttggacttttcaaaatatgcttggtaacattcctaagaaagagatagggaaggccgggcgcggtggctcatgcctgtaatcccagcactttgggaggccgaggtgggcagatcacaaggtcaggagttccagaccagcctagccaacatggtgaaaccytgtctttactaaaaatacaaaaattagctgcgcgtggtggcacacacctgtaaccctagctactcgggaggctgaggcaggagaatcgcttgaacccgggaggcggaggttgcagtaagccaagatcacaccactgcactccagcctgagtgccagagcaagactctgtctcaaaaaaaagaaacagacagggaaggtcggatttttcccatactgcagacacgcaggtgaatgacctgccaggactcacagctccacagcagagtcctgaagcatgagatgccaggagggccagccctgctgctgcctgtcacacaag

SEQ ID NO: 75576 - DNA, 795 bp, Homo sapiens
tttcaccatagcacccaactctatctgtccccagttaacwttacactcctgctcctgaaaccgtcaatcattctgggctgcaggaacacatagatcccaggtagtcagcagctacatcactctcaggatgtccgcagtactagagcttttggtaaaggccctgctctgtctgataaatttgttgtgatccccatgtattttgttccaaagagctctgcctggtaccttgatattaggaaagacacaaactgatgctgtggcatctctgtcctgatacattaaccgcgatgggccggcacgtggaatcctggctcagctcttaagccccattgcccgcagtgctgtgatgtgttactgggccactcaggaccactggcagccatgcacctggaagcaaatttgccctctgctgaagaggcccaggtgtctggaataagcccatggctcccagtcctccgagactgagcttgaaccgagacactggctcctaacacatcttcctctccaacgtgcatttgagatttggctttttgtgtgtttctgtggacggatggatggatatcaacctgcatccagtcactcctggcagcttgtggtctgaagcccctcctctcccctatcatcccatcaccccagtgatgggacccgtggaacctctccccaagctcctctccaacctgtattaagagttttgacatacctagataaagacactcgtctccaggatacagggagaccagagaggatgaaggcatgctttgtgcattttccaatctgcgcctctgcggtatgttt

SEQ ID NO: 75577 - DNA, 637 bp, Homo sapiens
ggtatatctagcaattatacctagtaagagacttttttggaaacttcttgctggtacacctagcaaggggtttatggtgaaatcacatttcaaaaggtcagagattgtttagttgacaattttgtatcgtcaaaaagagtgcttaatagcttcatcaagctgtttcatgaatatttggtccaaagagcatggcagtcactaatagatttgggacattaaaaaaatctccaccatttttttgtcaactatttcttaaagcaatctttcagacccagttgaccactcactcctgtgaaagttaactgtgcactctgatattatcataatccctagcattccgtgagcactttggggtgccacatatttaactgagcactttttgtcaatcatttaataatcacgaccacccccatgaagtaggtaatggtaaaacacacagtctatagatttaaaaaaaagtaaaagaraataaatgatcagtcagggttacatggtttggtaaaaaattactctaacctgggatttaaagacattagaaccttccttttaaccattacacctgctagtaaaatgccatacaacatctatttgtttgcatacctctcttttccaacagaatacatgccatgtaagggga

SEQ ID NO: 75578 - DNA, 704 bp, Homo sapiens
cttctgccctgcccctggggtctctaatggggagaggaggatctgggcgtgaattacgaggaaagtggacaggtaggatggggagtgtggaggcttcaatggaacatttcagatccgggcccaccttctacccttggctcccagaactcacccggcgtgctctgcacctgcctcggactcacacatccccacctccctgctttgtcatgctggccctaccaccttggatgaccctctgtgttcttctctattgaaatccgatctgtctctcacagcctggtcaatgacacttcttgcagtaataccttcctgatctttctcagcgagaaaggtgaaaggaacgacaaggagaggagaaagtcagaagggagaggagaatgagtgtggatactctgttctaacctgctcctcagcacctccctttcttttgataccagtatcctgagtttctttgggaaatcttcctctaccctaatcttcatggtccagatgggaccatgaattcagtgttctgttcctctctcaaggttaaccaatgasatggttcctcctaacaaggcagaccggccatgagtttagattaggatggacttaatctaaaataggtcctacaccctggcaagttcaatgtcctcccttgattttggaagcttcccagaaccctattcttctttctttaaaataaataaataaatacatgtttt

SEQ ID NO: 75579 - DNA, 584 bp, Homo sapiens
ttgaccatcactccctgagttcagcctcactgcagcggtctcggcagagggcagctctctttccttcatctgctcaagccagaaccctggagtttccttgatgtttctctccctcacactccatgttcactccrtcctcagtacagccagcagcagcttctacacaccccaaatctgacccttcttgtcacctccactgctgcctctccagtcctagccaccaacatctctagcctggattattgtggcagcctttagtctcccacatctgccctggccccgctgtctcagtctatttttaacacaggggctgcagtcacctgtcaggacataagtctcttcacatcactctgtggtgtcctgtctcatctgtctcagagtaaaagccaaaggctttactatggcctaaaaagccctgcaagctctggccccagcacttcactcccctctagctccccctcctccattgttcactctgccacagccacagtgcttcctagtgctccggaagtctcaagtgtgttccctgcttggcatctttgcatgtactagtccctgtttctagaacattcttctccagatat

SEQ ID NO: 75580 - DNA, 2498 bp, Homo sapiens
tgcatgcttatagtcccagctacttgggaggctgatgcaggaggattgcttgagcccaggagtttgaggctgcagtgagcctacgactgcaccactgcactctccagcctaggcaacagaggaagaccatgtttctaaaagaaataaattaaataaaataaataaaaataaaaagactgaaaagcagagtggtaagagaaaggactttggggctcaacagtactagccttgaaccctggctgttacttacccatcgtgtgataagcaaatgccttaacccctgtgtgcctcactttcttaacatataaaatagaagtaaaaatcatacccacttcaagggtcattataaaaagccaatagagataatgtatataaagcttctggaataatgcctggcacacagtaggagtttaataactggaaattcattgttgtagtgggcagccttctgaatctgtgtcctctttgtccactaatggctttgatctggatttggctcaggcaagacctggggaagggcagagactgagggcaactggaggtatagggtggtctgagcttccccagcagagtgaggctgggaaaggtctgggagacagaccaggcaggtgctgataagaccggaatgggaggctggagcataaggcagttcagtttttcccaaaggggggtgtacaaaacgatctcgtatgactcctttatactgttaatgttttcattttatcgcgcactgaaaaacaaaaccaacatatttaatgaatgattccaaggggattcttgcttttacaaaaaatgctaaagtaggcattcacatgtttaaaaattgagttgatttaaattttaaaattactaagtcatagtacataatgtgtgagccacagctatccccaaaatcatgatagcgatacattaatgactgaagttctttaaacatcaacatacaatgccaattccaraattcagctcaaattctgcaattacacaggctggggttgaaacccagcttttttgctaactgtgtaaaattaggcaggagggctaacctcgctgaatctcagatgtctagtctgtaaattgaagataatgtttgtttttatctcacagagttgttgtgaagattcaataaaatcacaacatgtgaggatgatctggctgtgacacctgtcaccccactgatctccagagttgattcggctgatcaggctggctgggcaggtgtcccctttctccctcaccactccgcatgcattcctcccgaaactgcacacttggtcaaagaggaagacctttcctgatagaggaggaccattcttcagtcaagggtatatgagcacctgttctgtcctgccagaatctccgaaggagctctcagtaaaatcacaagattttattgtgcatggtagcatgagcctgtaatcccagctactcaggaggccgagctaggaggactgcttgagcccaggagtttgagaccagcctgcgcaacatagtgagaccctgtctcaaaaaaaagaaagaaagaaagaaaagaataataatagtaataaatcacctgtgcaacgtgctcacttctctctttggaatgtagtaagtgtacctaataaatgtgatcattgtaatcatcacagtgagcacaggctaaagcatcttgactttattctataagcaataaaagaggatttgtttttacagaactcattatgttgtgaaaataattttccaacattaacaaagaacattcttcaagtaaaaggaaaaccacccatcattctcccaaccttcaataattttcaattttgcatattctccagactttgtcaacatgaatacttactttacatggtcgcaatcagtgttcatgcaaattcttttatcctgacttttataaacaaatatgatgttataaaccggtctccatgtttctgcatattctttataattatcattttgtggctgcataatattgcattgactatgttaactgcagttttcttaaccatttcactgtctggggaaatggaggataatgccagggtcatgcctggagcttttttttgtctattgcattatattcttaagatcaaatcccagcagtgagattagtcagtcaaaaagtaataatattttcaaggctcttgttatattttactagattgttttccagagttttgcacactgctcccagagatgtaggaacacagacgtcatccaaccttgccagtgctgggtgatggtgtttataaacttctgctaatttaataagtatgaaatgctatcctcacacggctttcatttctatctctttgatcattaacaggttgaactattttccaagtatttgtttactctctgcataccctcttgggtgaagtagtcatccacttccttcacctgtttatctgttgaagtcttgaggcttgttttataaatgtgagcgagcacttcagagtcaatagacattaattgcttccagccagatttggccactgaggctcctg

SEQ ID NO: 75581 - DNA, 2498 bp, Homo sapiens
tgcatgcttatagtcccagctacttgggaggctgatgcaggaggattgcttgagcccaggagtttgaggctgcagtgagcctacgactgcaccactgcactctccagcctaggcaacagaggaagaccatgtttctaaaagaaataaattaaataaaataaataaaaataaaaagactgaaaagcagagtggtaagagaaaggactttggggctcaacagtactagccttgaaccctggctgttacttacccatcgtgtgataagcaaatgccttaacccctgtgtgcctcactttcttaacatataaaatagaagtaaaaatcatacccacttcaagggtcattataaaaagccaatagagataatgtatataaagcttctggaataatgcctggcacacagtaggagtttaataactggaaattcattgttgtagtgggcagccttctgaatctgtgtcctctttgtccactaatggctttgatctggatttggctcaggcaagacctggggaagggcagagactgagggcaactggaggtatagggtggtctgagcttccccagcagagtgaggctgggaaaggtctgggagacagaccaggcaggtgctgataagaccggaatgggaggctggagcataaggcagttcagtttttcccaaaggggggtgtacaaaacgatctcgtatgactcctttatactgttaatgttttcattttatcgcgcactgaaaaacaaaaccaacatatttaatgaatgattccaaggggattcttgcttttacaaaaaatgctaaagtaggcattcacatgtttaaaaattgagttgatttaaattttaaaattactaagtcatagtacataatgtgtgagccacagctatccccaaaatcatgatagcgatacattaatgactgaagttctttaaacatcaacatacaatgccaattccagaattcagctcaaattctgcaattacacaggctggggttgaaacccagcttttttgctaactgtgtaaaattaggcaggagggctaacctcgctgaatctcagatgtctagtctgtaaattgaagataatgtttgtttttatctcacagagttgttgtgaagattcaataaaatcacaacatgtgaggatgatctggctgtgacacctgtcaccccactgatctccagagttgattcggctgatcaggctggctgggcaggtgtcccctttctccctcrccactccgcatgcattcctcccgaaactgcacacttggtcaaagaggaagacctttcctgatagaggaggaccattcttcagtcaagggtatatgagcacctgttctgtcctgccagaatctccgaaggagctctcagtaaaatcacaagattttattgtgcatggtagcatgagcctgtaatcccagctactcaggaggccgagctaggaggactgcttgagcccaggagtttgagaccagcctgcgcaacatagtgagaccctgtctcaaaaaaaagaaagaaagaaagaaaagaataataatagtaataaatcacctgtgcaacgtgctcacttctctctttggaatgtagtaagtgtacctaataaatgtgatcattgtaatcatcacagtgagcacaggctaaagcatcttgactttattctataagcaataaaagaggatttgtttttacagaactcattatgttgtgaaaataattttccaacattaacaaagaacattcttcaagtaaaaggaaaaccacccatcattctcccaaccttcaataattttcaattttgcatattctccagactttgtcaacatgaatacttactttacatggtcgcaatcagtgttcatgcaaattcttttatcctgacttttataaacaaatatgatgttataaaccggtctccatgtttctgcatattctttataattatcattttgtggctgcataatattgcattgactatgttaactgcagttttcttaaccatttcactgtctggggaaatggaggataatgccagggtcatgcctggagcttttttttgtctattgcattatattcttaagatcaaatcccagcagtgagattagtcagtcaaaaagtaataatattttcaaggctcttgttatattttactagattgttttccagagttttgcacactgctcccagagatgtaggaacacagacgtcatccaaccttgccagtgctgggtgatggtgtttataaacttctgctaatttaataagtatgaaatgctatcctcacacggctttcatttctatctctttgatcattaacaggttgaactattttccaagtatttgtttactctctgcataccctcttgggtgaagtagtcatccacttccttcacctgtttatctgttgaagtcttgaggcttgttttataaatgtgagcgagcacttcagagtcaatagacattaattgcttccagccagatttggccactgaggctcctg

SEQ ID NO: 75582 - DNA, 650 bp, Homo sapiens
cattgtgacatccagaatgtattgcccaaacctctccttgtacagttgaggctgttttttgactttctggtgtcatttccagacatgcagtcctaatatgtgagagctccatgacccctcagacgccttcgcgcagaacaacaccttcgctttagaggtgaagaaatcaaggctcttggaggatatttgaagtaactccagatatgggatgtttgaatattcttttggcaagatttaccccatcagttttattgactcattccaggtatgataattgggaatggggggattactgtttgattatatcaccgaaccacaacatcctagtatcacagatagcaagggagccatcyatctgatatgcaaatggatacagctggctaatagcacctttagtgatgaaagccatcctccttcctctatcttttctttccccctttagtcttgaaaagaggtacatgtggaaaagaagtgggatatgtatataagaaaaaaatctgatttcaaagtagagtgttcattctcacactactataaagaactgcctgagactgggtagcttataaagaaaagaggtttagttgactcacaattgcacaggctgtacaggaggcatgtctggggcggcctcaggaaatttacaattatgg

SEQ ID NO: 75583 - DNA, 633 bp, Homo sapiens
tgcagggcttaaagcctagatgacgggttgataggtgcagcaaaccaccatggcacatgtatacttatgtaacaaacctgcacgttctgcacacgtatcccagaacttaaagtaaaataataaataagcattctcatcttatttctaatcttagagggaatgtatataaaatttttccagtgagagtgatatttgctagagattayagacagacagacagacagacagacacacacacacacacacacacacacacacacacacacatttccttatgaaattgagtaaatgatcttccaaagcattcagggcaaatagcagcccatgttttaataaccctaagaattattttatatgatagtcccattccatggccatggagctctgtcactatactgtgaacttctctatggcaggaactattcattcaccattgtatccttactctgaacttctctagggcaggaaactgttcacttgccattggatactcagtatctagcacaatgcctgtaagttaggcattcactatccattcaatgaatgaatggatggatgaacgatagttaatatctgtttcattctcaaagctagcaaattctttttaagcatgagccaaaaatatcactactt

SEQ ID NO: 75584 - DNA, 633 bp, Homo sapiens
tgcagggcttaaagcctagatgacgggttgataggtgcagcaaaccaccatggcacatgtatacttatgtaacaaacctgcacgttctgcacacgtatcccagaacttaaagtaaaataataaataagcattctcatcttatttctaatcttagagggaatgtatataaaatttttccagtgagagtgatatttgctagagattacmgacagacagacagacagacagacacacacacacacacacacacacacacacacacacacatttccttatgaaattgagtaaatgatcttccaaagcattcagggcaaatagcagcccatgttttaataaccctaagaattattttatatgatagtcccattccatggccatggagctctgtcactatactgtgaacttctctatggcaggaactattcattcaccattgtatccttactctgaacttctctagggcaggaaactgttcacttgccattggatactcagtatctagcacaatgcctgtaagttaggcattcactatccattcaatgaatgaatggatggatgaacgatagttaatatctgtttcattctcaaagctagcaaattctttttaagcatgagccaaaaatatcactactt

SEQ ID NO: 75585 - DNA, 633 bp, Homo sapiens
tgcagggcttaaagcctagatgacgggttgataggtgcagcaaaccaccatggcacatgtatacttatgtaacaaacctgcacgttctgcacacgtatcccagaacttaaagtaaaataataaataagcattctcatcttatttctaatcttagagggaatgtatataaaatttttccagtgagagtgatatttgctagagattacakacagacagacagacagacagacacacacacacacacacacacacacacacacacacacatttccttatgaaattgagtaaatgatcttccaaagcattcagggcaaatagcagcccatgttttaataaccctaagaattattttatatgatagtcccattccatggccatggagctctgtcactatactgtgaacttctctatggcaggaactattcattcaccattgtatccttactctgaacttctctagggcaggaaactgttcacttgccattggatactcagtatctagcacaatgcctgtaagttaggcattcactatccattcaatgaatgaatggatggatgaacgatagttaatatctgtttcattctcaaagctagcaaattctttttaagcatgagccaaaaatatcactactt

SEQ ID NO: 75586 - DNA, 1263 bp, Homo sapiens
aactctgctcaggccttcttcagaggctcttactaaaaagcaggttttaattcccttgtatgtcctgactacgtggtaattttatattttattttattattttattttatttttgtattattttattttattattttattattatattttattattattctttctttgaggcagggtctcactctgtaacccaggctggagtgcaatggtgcaacctcaacctcctgggctcaagccatcctcccacctcagcttcccaagtaactgggataacaggtgcacaccaccatgcccagctaatttttgtatttttgtagagatgggttttcgccgtgtttcccagactggtcttgaactcctgggctcaaggaatctgcttgccttggccccccaaagtgctgggattatgggcgtgagcccaccccacctagtaattttagagtgttgcacacttttctgcctacacaaggaataaaaacaatcataaataacacctgtgaagtaggtcagacatttccaagaacactcatcatgtttaagtttcacaataaccctgcatggtttcactggacagatgaagaaactgaggctgggagtggagaaatgaccaacccaaggccacacggaactagtgaacgcccaaatccaaagcctgtgactggtgtcactgtgcacagggtggaactccagaccgaagcctgatttttaaagaagacagcccccaacttggggtattctcatctctatgatggggacaatggccctaattcattctccgcttcccaggaccctcatggagaaagctggtggccttcatgacaaaggaggcagccctgcagcgaggcaactccagaaggagctgacatcattcccgcctttctgtgtggcaggtgatcctcccagcccactgtctttgatcttgtacatccccatttcctacctgaggatggcacagcttgcaggggctaagcatcctaaagaaagccacatagtgggtatacggcagaaccaggacttgaacccagggtcagctcgcatctctcaaggcagaggctgtgaaagcttctggaaaggcgtaaaggtagggaaggtgagccctgaccagcaggctgaggacagagctccccactcaggctctgttgagacttggaagacaaggyaaagacatacaacagatgtcagctcagcagtggccaaaatgctgacttgggcttgggccttggggctcagatctgcctgttcccagaacagcagagataacag

SEQ ID NO: 75587 - DNA, 573 bp, Homo sapiens
tctcccaccaagctatgggggmaaaacaaaacaaaacaaaacaaaacggaaaccagttcagtatggcgtgaagaattctcattaggatttcaggaggcctgagttttgatttcagctccgtatgtacctgataaggtgagtgagcctgggcgagccacctccgactccctgccttggagccctggtagggaatcaaacagatgttgattttagggaggctctgcaagttctgccaataaagaattaacaatagaatgttccctcctctccagggactcaggcaggtcttggtttaagtctctcacttgccatgcagccttgggtaactttcttcccctctctgggcctcggttcctcttgtgaggtatgaggtgtagggcttagggtggggggagtgaggataacaggccccagggacgggggtgcccaaacagggtggggtgaggccagagtgggccagtggggcctgtgccagctgccgcagagcaatgaaaagctcttaaccacacagaattgttaacagctcccaaatcctgttgtaccagaggcttagaaaggcttaaactgttaaat

SEQ ID NO: 75588 - DNA, 1087 bp, Homo sapiens
atagatgaagaaagaggctacacagattcttagcatccaggcaaaagctggaactagggccaccagcccagagcatcttcctcagtgtgaaaacaggggcccagccatgggagtgactttggccctatccctaccgtacccacaccccctctccttcctggaggctgcacagaagaaagcaatcaggaggccctgactgccgggctggggaggcccgatggcccctctggctatgtgtgaatgagcagtgtacatttcagaaatatttgaacttaaaggggagacacactgaagtcgttagcgttgggctgaaaggaggtggctgcagggggcctgcctgctctcaggctggagcgggtggttgctccctattctccgatccacccctagccagctctgtctgatccccttgtgggctgtaattctctaggaccacagatgctgtttgtctgcactaatgacagtatgtgagtgttccaaagtcatgaagaagaaactttcattaagcacctatacatgccaagcgctggccagggccctctaaatgccatttcaggcgcaacctccagaagtatatactattattaaccccatttcacagacgaggaaactgaggccagacaggagaaccaacctgcataagtgcacacaggcagggctaggactggaacccacatccatctmttttcacaactgtgttatttttaagatgccatggccatagccttaaaaaacagacaacacaaaacaacaaagtcatcagggcttgtgtgtgtgcatttatcttctctctctgcatgggcctgtgtgagaatagcaaggggcaggaggagggcagcaggggagtgggacatagactgcccaggccagaatcttggctctggcactctagtgtacaattgcaggaatgccagttctgctctctgggcctcagtttccacatctgtaaaatgggtcattgtgagaattaaatgacaccatgtaggtgaatcctgttcttctgatgtctcccagggcccacatgtaggggaggtctgcatccaccttgttcaccgctgtaccctcaacactgagaactaggcctggc

SEQ ID NO: 75589 - DNA, 691 bp, Homo sapiens
caccctcccggacaggggatcatggcatgtgtcctccctcctgtggccaggatgacatgaggcagactctgaggagctcagcttttcagctttgggaaggttggagagctgctccttgaggacagaggcaagaacacctgaagctggggaagagggcacaggtggggcaggaggtgcttttagaagcaaaaccaaaatagatgtcatcaagactgcctctgcagacaggggacagagttgtccctgtccttaaaraatccaggcccccactaccatgcgtggaattgaccttagcccacagtcttccccagcccaccctatttgccaaaattctgctcagctttcaggacctggctacaaggtcatttttggggttccctcagccccattttctgtgagcctccaccccatcctccatgcggggagataattatttctgagtgccccacctccaccaaactgtggggtctcggggggcaagactgagtcaggttatgctctgtctgaataagccaagcatgaacttctttaagtctcagttttctcagctgtaaaatgggtgacttgtgttatccatctgacgtgcctcagaggtttggcctctatagcaaattagaggatgcaggtgcctcttgaacccatagagtgcacaagcctcaggttgacaggcagcgagaatgttgcatgggtg

SEQ ID NO: 75590 - DNA, 620 bp, Homo sapiens
aagcttaggcgtctggctccaagataaatggagaaagagctgatttcttttctttttcacatttcaaacatacagagaggttgaaagcagagtaaaacacctgtctagccttcacctagattcaacaatcatcaacatgtttaccacatttgctctcctrtgtgttctcactccctctgctcccctttcccccttgcatgtgtgtgtgtgtgtgcgtgtgtaatgtagagatatatattttttctgaaccatttgtacataatttgcatacatggacagagaactaacatttactgataattgactcgtgttgtctaaggccagctctctaacccctgttttagatcactttgcctggcacacagtaggacttgagtattggcagcgaccaggaagagtaactggtcttacccgcagcttaccaagtactccccctatattagctgcttctgtcctcacaatggcctggcatagagctcttggtgttttcttcattttcagaggagggaagaaagactcagaagttaaataactcgttgcaaaataagaagttgggatttatacctgggtttgcttggcagcaaagcctgtttcacaaaatcttagggcacccacttttc

SEQ ID NO: 75591 - DNA, 620 bp, Homo sapiens
aagcttaggcgtctggctccaagataaatggagaaagagctgatttcttttctttttcacatttcaaacatacagagaggttgaaagcagagtaaaacacctgtctagccttcacctagattcaacaatcatcaacatgtttaccacatttgctctcctgtgtgttctcactccctctgctcccctttcccccttgcatgtgtgtgtgtgtgtgcgtgtgtaatgtagagatrtatattttttctgaaccatttgtacataatttgcatacatggacagagaactaacatttactgataattgactcgtgttgtctaaggccagctctctaacccctgttttagatcactttgcctggcacacagtaggacttgagtattggcagcgaccaggaagagtaactggtcttacccgcagcttaccaagtactccccctatattagctgcttctgtcctcacaatggcctggcatagagctcttggtgttttcttcattttcagaggagggaagaaagactcagaagttaaataactcgttgcaaaataagaagttgggatttatacctgggtttgcttggcagcaaagcctgtttcacaaaatcttagggcacccacttttc

SEQ ID NO: 75592 - DNA, 1757 bp, Homo sapiens
gatttcaggcgtgcaccaccacacccggctaattttttatatttttagtagagatggagtttcaccatgttggccaggctggtcttgaactcctgacttcaagtgatctgcccgcctcagcctcccaaagtgctgggattacaggtgtgagctaccatgcccagcccgtaatagttaataatgctcattttgcaggtaaaaaagcaggctctgagatgtttagtgatatacccaaggtcacactttttagtacatacttgtgtatgagatggaatgtgttgagtgcggaggggaaagtcctccagcctgtgccgtcaggatggcattatttagtaggtaggattttgatacatagtagatggaaagaagggcattcttagcagggggaacagcctaggcaaaggcctagaggctggaarggggtaggtttgtatgagccatggtgaaccaaagtgtgagaaagaaatggcaggagaggtttgagtccgttaagagaagccttgagtgatgagctatggctgacattggaagcagtaggaagccactgaaagaaatcaaaaggagggaaaggttcaggaagatggccatgaagcctggcatgggaggaggatccagagcagggagaggcaagctggaggccaggaggggctatatgggcctagcctccattaagccagaccctgggtgtggctatttctgcccagccagctactccagcagttgggagaggccaggacatagcccacatccttggtggatgggccacaatggcagggacaagggcagagtgaacgagttagggcagagcagctgcctgcctgccttctcccctcactgaagccccacagctcccagggggctcctccgcatcctgtcccaccctgcccacttcactccttgagccagggaatggttgccagtaccttgctgggcctcagctcttccatcgagcctggacaacccaagcagcaccctgagaaccatcccagaatatgcagagtgtcagagctggacatatggggaagctgaggcccagaaggggacagctagttgcctgaggacacacagagatagtggcacggctggaacttggggctagatctatagcataaaactccttccaagggagataagttggtgtctcccttttctagctgtggaggcttgaacatattttcttttcttttcttttttcctctcctgtctttgcctatgttttcttttctttaaaaaaaaaaaacaaaaaaaaaaaaaacttttttttttaatggagatggggtctcctctgtattgcccaggctggtcttgaactcctgggctcaagcaatcctcctgccccagcctcccaaaatgctgggattacaggtgtgagccactgtacctggctgagactcagacatagtatttaacatctgcctctagccctcttgagagtaaggtggaataaaaataaatagcctttaaaaaatgtcttaaccactctgaacctcagtttacccggctgtaaaatggggataataataataaataaaacattatttagtcatcatttttcctatcacctccctgtaagaatgtaaacttcacaaaggcagggatttttttatctcttttgtttacaaatgctcagcatggcacctaggacttagcaggtgctcagtaaaaaattactgaatgaatgaatgaatgaataaggaatacatatgatttacgggttcctcacaatgtgcctggcactgcagaaaatgctttccatg

SEQ ID NO: 75593 - DNA, 516 bp, Homo sapiens
tggctacacgcttgcatccccttccacactttggaagatttgtttttttgctctttgcaataaatcttgctgctgctcactctttgggtccacactgcctttatgagctgtaacattcaccgcgaaggtctgcagcttcactcctgaagccagtgagaccacgaacccaccgggaggaacgaacaactccagacgcgccaccgtragagctgtaacactcactgcgaaggtctgcagctttgctcctgagccagcgagaccacgaacccaccagaaggaagaaactccaaacacatccgaacatcagaaggaacaaactccggacgtgctgcctttaagaactgtaacattcaccgtgagggtccgcggcttcatttttgaagtcagtgagaccaagaacccaacaattccagacacaatagcaccatggtgcactatgcagtccttaataagtatatgtttataaaaacccattgaatatacaacaccaagaatgaacctcaatgtaaactatga

SEQ ID NO: 75594 - DNA, 516 bp, Homo sapiens
tggctacacgcttgcatccccttccacactttggaagatttgtttttttgctctttgcaataaatcttgctgctgctcactctttgggtccacactgcctttatgagctgtaacattcaccgcgaaggtctgcagcttcactcctgaagccagtgagaccacgaacccaccgggaggaacgaacaactccagacgcgccaccgtgagagctgtaacactcactgcgaaggtctgcagctttgctcctgagccagcgagaccacgaacccaccagaaggaagaaactccaaacacatccgaacatcagaaggaacaaactccggacrtgctgcctttaagaactgtaacattcaccgtgagggtccgcggcttcatttttgaagtcagtgagaccaagaacccaacaattccagacacaatagcaccatggtgcactatgcagtccttaataagtatatgtttataaaaacccattgaatatacaacaccaagaatgaacctcaatgtaaactatga

SEQ ID NO: 75595 - DNA, 1582 bp, Homo sapiens
gccacctggggctgggctggggcaacaggtgagatcaactaccaaagaggagaaaaaaagggaagaaggctgggcgtgggggctcaagccaggaatcccagcactttgggaggccgaggagggcagataacttgaggctaggagtttgagatcagcctggccaacatgacaaaaccctgtctctactgaaaatgcaaaaattagccaggcatagtagtgggtacctgtaaccccagctacacaggaggctgagacaggagaatagcttcaacctgggaggtggaggttgcagtgagccaagatcgtgccaccacactccagcctaggaaacaagagtgatactctgtctcagaaaaaaaaaaaaaraagaagaagaagaagaaggaagaggaggaggaggcggatcaggagagaggtgagggagaggtgagggagtaaaatctgcaaaagaacaaaaaatcagaggagaagcaggtggcaataagggagggcatccgtgtctgaggggcccatagatcagatctatagtgttgggaccaccgattgtcttagagcaggcccctgttatcacaggtcggaaactcgaggaagtgtacgtaagaatgagcctgcactgattattttactaccctgtgaaaagcctgtcttccaaattcacttgtactgaaggaaaacatagtgagacactcaaattacctcactaccatggaggggaatgaagatatcgaaggagaacctgaaagcaagtttcaaaaggagaaattgtccccatgcaccgtccttcttaccctcaggtaaagaggggatccgcggctgaaactgattgatggggtgtggtgtcgtatcgccctctacccccaccttcgccttctggcctttctatccaaaaagcggatgggagcaacccatatagacacaaaattccttgtcttcttcgggggagaaaaatcagctatagaaatgatggtggaacatttgacttctccatgtgaggattccatgctgggctcctgacacaactcatccctctgctgctctcttttctggtcagtagatgtgagagccccaacaagtcccaagaggatgggctaccaggcccaccccagactgtgttgctgggaaacacagacgagggaccatcagcccttttcaagcttctatccaccaaaggccttgcctctgagggctgcctgaaagcccagctgcttccctgcattggtcctgcaaggacaaggattatgctgctagtgtggtttgcagggagtgaccattagcttccctagggtctctaatctgcaacccctggctgcagttgtggcccaaagaggtgacggcagcacgtctgtgtgaagggcagagtggagcagataccgagatgacccaccctgagatcaccaggacgccattccaggagtcccaccagctctgcaccggcagccgtagccaggaccctgggggatgtgtgtcttccccttggggactttccagctaacccctacggtggccctgccagagcctcagctgtgtttttttgttgttgttgttgttgttttgcctctgctttggggcagggaaggggttt

SEQ ID NO: 75596 - DNA, 1582 bp, Homo sapiens
gccacctggggctgggctggggcaacaggtgagatcaactaccaaagaggagaaaaaaagggaagaaggctgggcgtgggggctcaagccaggaatcccagcactttgggaggccgaggagggcagataacttgaggctaggagtttgagatcagcctggccaacatgacaaaaccctgtctctactgaaaatgcaaaaattagccaggcatagtagtgggtacctgtaaccccagctacacaggaggctgagacaggagaatagcttcaacctgggaggtggaggttgcagtgagccaagatcgtgccaccacactccagcctaggaaacaagagtgatactctgtctcagaaaaaaaaaaaaaaaagaagaagaagaagaaggaagaggaggaggaggcggatcaggagagaggtgagggagaggtgagggagtaraatctgcaaaagaacaaaaaatcagaggagaagcaggtggcaataagggagggcatccgtgtctgaggggcccatagatcagatctatagtgttgggaccaccgattgtcttagagcaggcccctgttatcacaggtcggaaactcgaggaagtgtacgtaagaatgagcctgcactgattattttactaccctgtgaaaagcctgtcttccaaattcacttgtactgaaggaaaacatagtgagacactcaaattacctcactaccatggaggggaatgaagatatcgaaggagaacctgaaagcaagtttcaaaaggagaaattgtccccatgcaccgtccttcttaccctcaggtaaagaggggatccgcggctgaaactgattgatggggtgtggtgtcgtatcgccctctacccccaccttcgccttctggcctttctatccaaaaagcggatgggagcaacccatatagacacaaaattccttgtcttcttcgggggagaaaaatcagctatagaaatgatggtggaacatttgacttctccatgtgaggattccatgctgggctcctgacacaactcatccctctgctgctctcttttctggtcagtagatgtgagagccccaacaagtcccaagaggatgggctaccaggcccaccccagactgtgttgctgggaaacacagacgagggaccatcagcccttttcaagcttctatccaccaaaggccttgcctctgagggctgcctgaaagcccagctgcttccctgcattggtcctgcaaggacaaggattatgctgctagtgtggtttgcagggagtgaccattagcttccctagggtctctaatctgcaacccctggctgcagttgtggcccaaagaggtgacggcagcacgtctgtgtgaagggcagagtggagcagataccgagatgacccaccctgagatcaccaggacgccattccaggagtcccaccagctctgcaccggcagccgtagccaggaccctgggggatgtgtgtcttccccttggggactttccagctaacccctacggtggccctgccagagcctcagctgtgtttttttgttgttgttgttgttgttttgcctctgctttggggcagggaaggggttt

SEQ ID NO: 75597 - DNA, 1582 bp, Homo sapiens
gccacctggggctgggctggggcaacaggtgagatcaactaccaaagaggagaaaaaaagggaagaaggctgggcgtgggggctcaagccaggaatcccagcactttgggaggccgaggagggcagataacttgaggctaggagtttgagatcagcctggccaacatgacaaaaccctgtctctactgaaaatgcaaaaattagccaggcatagtagtgggtacctgtaaccccagctacacaggaggctgagacaggagaatagcttcaacctgggaggtggaggttgcagtgagccaagatcgtgccaccacactccagcctaggaaacaagagtgatactctgtctcagaaaaaaaaaaaaaaaagaagaagaagaagaaggaagaggaggaggaggcggatcaggagagaggtgagggagaggtgagggagtaaaatctgcaaaagaacaaaaaatcagaggagaagcaggtggcaataagggagggcatccgtgtctgaggggcccatagatcagatctatagtgttgggaccaccgattgtcttagagcaggcccctgttatcacaggtcggaaactcgaggaagtgtacgtaagaatgagcctgcactgattattttactaccctgtgaaaagcctgtcttccaaattcacttgtactgaaggaaaayatagtgagacactcaaattacctcactaccatggaggggaatgaagatatcgaaggagaacctgaaagcaagtttcaaaaggagaaattgtccccatgcaccgtccttcttaccctcaggtaaagaggggatccgcggctgaaactgattgatggggtgtggtgtcgtatcgccctctacccccaccttcgccttctggcctttctatccaaaaagcggatgggagcaacccatatagacacaaaattccttgtcttcttcgggggagaaaaatcagctatagaaatgatggtggaacatttgacttctccatgtgaggattccatgctgggctcctgacacaactcatccctctgctgctctcttttctggtcagtagatgtgagagccccaacaagtcccaagaggatgggctaccaggcccaccccagactgtgttgctgggaaacacagacgagggaccatcagcccttttcaagcttctatccaccaaaggccttgcctctgagggctgcctgaaagcccagctgcttccctgcattggtcctgcaaggacaaggattatgctgctagtgtggtttgcagggagtgaccattagcttccctagggtctctaatctgcaacccctggctgcagttgtggcccaaagaggtgacggcagcacgtctgtgtgaagggcagagtggagcagataccgagatgacccaccctgagatcaccaggacgccattccaggagtcccaccagctctgcaccggcagccgtagccaggaccctgggggatgtgtgtcttccccttggggactttccagctaacccctacggtggccctgccagagcctcagctgtgtttttttgttgttgttgttgttgttttgcctctgctttggggcagggaaggggttt

SEQ ID NO: 75598 - DNA, 516 bp, Homo sapiens
atctgccaatgaaaaaacatgtctgagaaagaaataactgcaaaatccaaaaataagtcttaatctaccctcaaatcatctacttattaaaatttacaattcatcattttcctatcaagctctattaagcaaaataaacttcaacattttcatttttataatactatgaagactcatagcacagctttattgtatttctttcttctctcaatttattaaaactacttcaatctctcttagatgatttgaacagtataaaatctaccctggtgatggtagtactgactagatcctaaatttctttccattttgatgatacttttgttttgtaaaccaagcacatgagatttgaaagtttatcagtggtttgttttgttttgtttttgtttttgtctttaaaccttcctatttcatcactgctttttgttgacaaaggcaaacagggttgtgaagcgtgccctctgctggtaagaagaggaaaatggtcatacttcaaacmaaagcgctcctataaat

SEQ ID NO: 75599 - DNA, 671 bp, Homo sapiens
gtaagctggtacaactccttcatagagcaatttgtcaataacaaatacaattaaaaagtagttgggcatgatggctcacacctgtagtcccaactactccggaggctggggcaggacgatcacttgaggccaggcatttgagactgcagttagccatgttcacaccactgcacttccagcctgggtgacagaaagtgcccatacatcaacaccctggtcacccaaggtaggtgtatttcctgagcaattcttcagggatatttactacagcattgtttctaaaagaaatcacctaratgttcatagtaaggtaataaatcacaaattgtggcttaatcattctagaaagcaatttaaatgattaaaatagaaataattgtattaacatggataaatctcaaaaacataataatgtcctagaacacttacaatctgatatcattaaatgtgattttaaaaacacataacacaatcttgtatattttatgaactcaaatggacggaacaaaatgtaaaaatatgaatgagaagacctacactgttctaaaagctggctcactctgaaggcagagatagggaagtaacacggaggaagagagcaaaataggctttacaatctgaacaatttgttcccttgaacatggaaaatatgccaatatttattatggaca

SEQ ID NO: 75600 - DNA, 551 bp, Homo sapiens
cccgcttgaggaacagcctgaagatggggcttcagtgtgtgcttctgtggrggcacccggggaaatgcagaatcctcacctaactcagaaggggagccatctgttacttgtcttaaggagatcagctgtggtactggtgaatactgcacatgtatcacttatgctatggttgtagagctactgaacaaaatcagaatttaattttactttggtaagagccacaaacaagcctggaagcagtagtattggagaaccaacatgagaaagggtgtttctgtgggtagcaaggaagagattctctcaggagatacaaaggaagtgacagaatgccaacctctcattcttctctggagtccagatggacattggtgataacgggagccagtacagaagctctccggggatgacaggggagcaatgcctggtcctgttgatccctgctgaaaggaagacttcctcctaggtggtggggtttcccctcctcaggagtcatacaatttctgggctgcctcttgtcaggctaccagccattgatgactattgtctaaatc

SEQ ID NO: 75601 - DNA, 551 bp, Homo sapiens
cccgcttgaggaacagcctgaagatggggcttcagtgtgtgcttctgtggaggcacccggggaaatgcrgaatcctcacctaactcagaaggggagccatctgttacttgtcttaaggagatcagctgtggtactggtgaatactgcacatgtatcacttatgctatggttgtagagctactgaacaaaatcagaatttaattttactttggtaagagccacaaacaagcctggaagcagtagtattggagaaccaacatgagaaagggtgtttctgtgggtagcaaggaagagattctctcaggagatacaaaggaagtgacagaatgccaacctctcattcttctctggagtccagatggacattggtgataacgggagccagtacagaagctctccggggatgacaggggagcaatgcctggtcctgttgatccctgctgaaaggaagacttcctcctaggtggtggggtttcccctcctcaggagtcatacaatttctgggctgcctcttgtcaggctaccagccattgatgactattgtctaaatc

SEQ ID NO: 75602 - DNA, 730 bp, Homo sapiens
tctatctgaattatttaggaaagctgtagaaaaygaaaaaactaagactcaagagcaagctactgtctcttttagaggatgagcttcatacggctattttattcttttccatgttagaagcaaagttttaaaaaatactctttatgcttttatgcaaatgttatgtgatttttaaaagtattatgcataaagacaataaaaaattaaaagtaaatacttcttttttcattagcaggtgttcagtaatgtgtcaaatcttgatatacctaatttgtcttctttcaactttacttttggatttcctgattccaatttttcaaaagttgacagacatcatgttattgtcactaattcctcccactcagctctcagaggttcattgttctgagggagaaattgtcatctccccttttccctccactggctcagtttaagaaagtgagtcagattacgggtcttttttttttttttttttgcttcagcacaggctggcatttgattctggagtatcccaagaccttttctagaaaattccaactcttcttcctcttctcctgctcttcagtcttcagagcctctttgtggttcaaggggtgtgggtaaaagggagagtttgctcggcaccactgggaggaagctcctgagctgacccttaggtactggggaatacctgtcctaagacagttaagtgagacttttcaaaactgatggatagtatctggcttcatcc

SEQ ID NO: 75603 - DNA, 730 bp, Homo sapiens
tctatctgaattatttaggaaagctgtagaaaacgaaaaaactaagactcaagagcaagctactgtctcttttagaggatgagcttcatacggctattttattcttttccatgttagaagcaaagttttaaaaaatactctttatgcttttatgcaaatgttatgtgatttttaaaagtattatgcataaagacaataaaaaattaaaagtaaatacttyttttttcattagcaggtgttcagtaatgtgtcaaatcttgatatacctaatttgtcttctttcaactttacttttggatttcctgattccaatttttcaaaagttgacagacatcatgttattgtcactaattcctcccactcagctctcagaggttcattgttctgagggagaaattgtcatctccccttttccctccactggctcagtttaagaaagtgagtcagattacgggtcttttttttttttttttttgcttcagcacaggctggcatttgattctggagtatcccaagaccttttctagaaaattccaactcttcttcctcttctcctgctcttcagtcttcagagcctctttgtggttcaaggggtgtgggtaaaagggagagtttgctcggcaccactgggaggaagctcctgagctgacccttaggtactggggaatacctgtcctaagacagttaagtgagacttttcaaaactgatggatagtatctggcttcatcc

SEQ ID NO: 75604 - DNA, 730 bp, Homo sapiens
tctatctgaattatttaggaaagctgtagaaaacgaaaaaactaagactcaagagcaagctactgtctcttttagaggatgagcttcatacggctattttattcttttccatgttagaagcaaagttttaaaaaatactctttatgcttttatgcaaatgttatgtgatttttaaaagtattatgcataaagacaataaaaaattaaaagtaaatacttcttttttcattagcaggtgttcagtaatgtgtcaaatcttgatatacctaatttgtcttctttcaactttacttttggatttcctgattccaatttttcaaaagttgacagacatcatgttattgtcactaattcctcccactcagctctcagaggttcattgttctgagggagaaattgtcatctccccttttccctccactggctcagtttaagaaagtgagtcagattaygggtcttttttttttttttttttgcttcagcacaggctggcatttgattctggagtatcccaagaccttttctagaaaattccaactcttcttcctcttctcctgctcttcagtcttcagagcctctttgtggttcaaggggtgtgggtaaaagggagagtttgctcggcaccactgggaggaagctcctgagctgacccttaggtactggggaatacctgtcctaagacagttaagtgagacttttcaaaactgatggatagtatctggcttcatcc

SEQ ID NO: 75605 - DNA, 542 bp, Homo sapiens
cagctttgctatgctggagccagggtggagaattgtaccacagtgttaagaagacagcccacagaaccttggcaggcagaacatcatgctttgaaaaagttaaagattgatgataattagttaatgagatgtcaggctcactaaagagaggaaatcattaattagtacttaatctgtttttagatatactagactagagtcttacaatttccagcagcatcagctttaaaccatgacatgaatgcaaagtgtaatttctaccagcagactttttgtaattatcttattaaaatatgctttggtacactgaaacaaacattagttttagttcaattttaattgtggggaatgagaatttggagcactgacttagagtttctaaggaaagggaaatttcatagcgatgtgtttagattcactctccttcatccactgtagaggagctggttgcccaagcattgccttttggcagcttctcatggggaggtgatgtcacatctgcctctgaaggcccatttggaggagatccttgagatggmctg

SEQ ID NO: 75606 - DNA, 741 bp, Homo sapiens
atggtgaaaccccatctctactaaaaatacaaaaattagccaggtgtagcctgcaatcccagctactcgggaggctgaggcaggagaatcccttgaacccaggaggcggaggttgcagtgagctgagatcatgccactgcactctagcctgggcaacacagcaagaccctgtctcaaaagagaaaaaaaaaagagaacaagagtaagtaggaaaaacagttagaaaattgtcctggttagaacttaggattcattttgagaagtacaggaagataaatatgagcagaagaaagcagagacagattatggaggaccataaatgttcatttagaaacgagatccacgggtaggaaacaattgcatgttctgtagaaggcaagagatacggtatgctttcatacgagttgtccggcacctcttctactataaataaaaaaggaaatagacttaatcaaaacargccaagatgactttttaggggagtacttttgctaacatgctgtttcttggattgtaaatcctgaacaccaggggcaattcctgtgcctgcttgatatacagttcccttgctggaaacctcaggtcggtgaggacagtgtttgtggaataaagggaagaggaatttgtttcttgccttgatgcactttcagcaactttgcatccttagggctactatttcttaagatttgacaaggaatagaaaggtatattacatctgggataggaatagagcattagaaa

SEQ ID NO: 75607 - DNA, 537 bp, Homo sapiens
atgatcttggctcattgcaacctccacctcccaggttcaagtgattcttccacctcagccttccaaatagctgggtttacaggtgcacactaccacayccagctaatttttgtatttttactagagacggggttttgccatattggccaggctggtctcaaactcctgacctcaggtgatccacccaccgctgcctcccaaaatgctggctgggattacaggtgtgagccaccatgcctggccaccaccattcttttgtagagaatctttctttactattgtggctgttttaaacaaattttattatctacagtattcctcaatgttactgtgatgtaactgtgtagttttactttcatttattctgtttggcatcccttatgtttttgtatcttctgtggatatatgttgtattcatttctagggttgctgtagtgaagttcacaaactgagtagtttatgcaacagaaatgtattgtctcacagttccagaggctggaagtccaaactcaaggtgtcggcaaggttaattccttc

SEQ ID NO: 75608 - DNA, 549 bp, Homo sapiens
tgctttctcccttggtagagtagttctgaaaataaaagaactttctttagccagcatcccctctatcagttaaaaacagtgtagcttctagttaatgaccttaacctgtcttcctcgtttgctggccttttatggggattagtggttcttgaagttgagtctctatagtagcttatcacttttgacaatggaaaaatcagggctgagaatcctctttggaaagaatgaacacaaatactatctttagggtgcacgtttagcatacaggtacagcctgatgcatgcaaggagtctcttaaccctgtatacctcttcatgcaagattctgggatacataaatgactttactctggctttaaactaaatttgaaactayaggatctagcctgataacaacaaccaggccagccaaggaaatgtcctgttccatgcagactaaccttatagttatttcagcaatgtaagtgaaaggaggagaaagcaatcccatttctacaccgtaaattctctttcttttgtcaaggaactggatggggccctgctcaaatc

SEQ ID NO: 75609 - DNA, 657 bp, Homo sapiens
caccatgtgtgctggtcactgcagctgaatccatccacaggggctgcccagaaaaagacaatgacttctgcagggctggggaggctgtccttgtgaaaataactgaatctacccgagtgtgtggcctgtgctggggaaacgtgggtgacttsaatgatgtcaggcaatcagtgcaattgaaatatgtcaaaaatggctccatcaacgcacccggctcatatttagctataaaatgtgaggccaggttacgaaccggaagcatttctttcaaccaaagtcatttggaaaggaatatctttgacacatccttgctgccccttcccccattgcggtgtccctggctgtgtggctggcagcctggctcttggtgagtcgcagctgcacctgtgcccaccttctcaccacgggagtaggtgcttctcctttgggcaccttctggctttgcaccgtaaaagtgaaatacggtgtggtcctgcaagctgcttctccagtgatgtgaaaagcgtaagagagaggctctgggaaggggcagatgctgcaggtgcaatgatgccagctgttgaggacggtgccctgtgcctggggaagtacatgctgtaactggagctccaccttggtaccccaccgctggaccctccaaagagagctctgacatgt

SEQ ID NO: 75610 - DNA, 657 bp, Homo sapiens
caccatgtgtgctggtcactgcagctgaatccatccacaggggctgcccagaaaaagacaatgacttctgcagggctggggaggctgtccttgtgaaaataactgaatctacccgagtgtgtggcctgtgctggggaaacgtgggtgacttcaatgatgtcaggcaatcagtgcaattgaaatatgtcaaaaatggctccatcaacgcacccggctcrtatttagctataaaatgtgaggccaggttacgaaccggaagcatttctttcaaccaaagtcatttggaaaggaatatctttgacacatccttgctgccccttcccccattgcggtgtccctggctgtgtggctggcagcctggctcttggtgagtcgcagctgcacctgtgcccaccttctcaccacgggagtaggtgcttctcctttgggcaccttctggctttgcaccgtaaaagtgaaatacggtgtggtcctgcaagctgcttctccagtgatgtgaaaagcgtaagagagaggctctgggaaggggcagatgctgcaggtgcaatgatgccagctgttgaggacggtgccctgtgcctggggaagtacatgctgtaactggagctccaccttggtaccccaccgctggaccctccaaagagagctctgacatgt

SEQ ID NO: 75611 - DNA, 657 bp, Homo sapiens
caccatgtgtgctggtcactgcagctgaatccatccacaggggctgcccagaaaaagacaatgacttctgcagggctggggaggctgtccttgtgaaaataactgaatctacccgagtgtgtggcctgtgctggggaaacgtgggtgacttcaatgatgtcaggcaatcagtgcaattgaaatatgtcaaaaatggctccatcaacgcacccggctcatatttagctataaaatgtgaggccaggttacgaaccggaagcatttctttcaaccaaagtcatttggaaaggaatatctttgacacatccttgctgccccttcccccattgcggtgtccctggctgtgtggctggcagcctggctcttggtgagtcgcagctgcacctgtgcccaccttctyaccacgggagtaggtgcttctcctttgggcaccttctggctttgcaccgtaaaagtgaaatacggtgtggtcctgcaagctgcttctccagtgatgtgaaaagcgtaagagagaggctctgggaaggggcagatgctgcaggtgcaatgatgccagctgttgaggacggtgccctgtgcctggggaagtacatgctgtaactggagctccaccttggtaccccaccgctggaccctccaaagagagctctgacatgt

SEQ ID NO: 75612 - DNA, 657 bp, Homo sapiens
caccatgtgtgctggtcactgcagctgaatccatccacaggggctgcccagaaaaagacaatgacttctgcagggctggggaggctgtccttgtgaaaataactgaatctacccgagtgtgtggcctgtgctggggaaacgtgggtgacttcaatgatgtcaggcaatcagtgcaattgaaatatgtcaaaaatggctccatcaacgcacccggctcatatttagctataaaatgtgaggccaggttacgaaccggaagcatttctttcaaccaaagtcatttggaaaggaatatctttgacacatccttgctgccccttcccccattgcggtgtccctggctgtgtggctggcagcctggctcttggtgagtcgcagctgcacctgtgcccaccttctcaccacgggagtaggtgcttctcctttgggcaccttctggctttgcaccgtaaragtgaaatacggtgtggtcctgcaagctgcttctccagtgatgtgaaaagcgtaagagagaggctctgggaaggggcagatgctgcaggtgcaatgatgccagctgttgaggacggtgccctgtgcctggggaagtacatgctgtaactggagctccaccttggtaccccaccgctggaccctccaaagagagctctgacatgt

SEQ ID NO: 75613 - DNA, 1501 bp, Homo sapiens
atgtgttgacttgcctatgtggcactcatcagagattttgaggttaaggacaggagctgatggcctagtgagagaagcagacatgagaataggtataacagagattgattattgctgaaatactggtgcacacagattgctaaggaagctcagcaacaaggcaccaaactcagcccggatgtggggaraagcagggaatcttctatccaggggcaatgcctatgctgagccctagagacatgctcatgttgtatgcagaagaagtaggcaaagaaaccaggaaaggcagccatggccaaaggcatagaaatgagaaagctggtgtgttaaaaaccgcagaaagctctttcatattgaaccaaagagcaacaggaggagtacatcagaggccacatcataaatgtggcatgctcttgagaattttatatttaaaaatggtgaactattgaagaattgaaaacatgatcaaatttacactactgaaagaatactctaatagtgcattggaaggacggtagacctgttcataggatgttgcaaaggttcagggcaagatgttgtgggcctgatccaaattagaggcaatggagagagagagagagaaggggataaataatggatacaggggcagaatccatgggtcttagttgttcatcaaatgtcagggctgaggaagaggaaggactctggccgattccaaggcttccttcttaggtgactgtgtggatagtgtgtccttcactaagagagggatcccagtcagggaggcattagttaccatgctgacagttgtgaatagtgaggtttgggtggaatgtggaggtatagaagacatccatatgtatctggaactcaggagggaagactggagactgagacctgatcttcctcagcacatgaattgaatgtgcaaccatggcatatgtatgatgagataaaagatctatgcattgttgaagaatgtgaatagatgagatctataggagatataaaatgacattacataaaagtggcaaaggcagtttcacgtaaaatacgtatacataattttcatgtaagcaaacaactttccttgcttcaggcccaagttatacatacctaacttctcacagtgatattaaggatgacttcatttagtcatgagagaaactattttgaacaacaatttaaaaagagcaaatgattatctcttgattgtgaaattctagggggaaaaatccattcaacgtacatgtactaatggggtagcgtcatatgttcagcaagaatcaattcaaccacagtctaggaattttacaataggctctctctcctctgacaatgacattctcaaaaccttattcttctgttctttcattgttgtaataatactgtactaagtcctttagagctgtaatgcaatcttatatctactcttcagcaagacaccttcactaatctgatgctaaagccagagtgggatttacggtgaagctgttgacacttaaccttgtgttaattt

SEQ ID NO: 75614 - DNA, 1501 bp, Homo sapiens
atgtgttgacttgcctatgtggcactcatcagagattttgaggttaaggacaggagctgatggcctagtgagagaagcagacatgagaataggtataacagagattgattattgctgaaatactggtgcacacagattgctaaggaagctcagcaacaaggcaccaaactcagcccggatgtggggagaagcagggaatcttctatccaggggcaatgcctatgctgagccctagagacatgctcatgttgtatgcagaagaagtaggcaaagaaaccaggaaaggcagccatggccaaaggcatagaaatgagaaagctggtgtgttaaaaaccgcagaaagctctttcatattgaaccaaagagcaacaggaggagtacatcagaggccacatcataaatgtggcatgctcttgagaattttatatttaaaaatggtgaactattgaagaattgaaaacatgatcaaatttacactactgaaagaatactctaatagtgcattggaaggacggtagacctgttcataggatgttgcaaaggttcagggcaagatgytgtgggcctgatccaaattagaggcaatggagagagagagagagaaggggataaataatggatacaggggcagaatccatgggtcttagttgttcatcaaatgtcagggctgaggaagaggaaggactctggccgattccaaggcttccttcttaggtgactgtgtggatagtgtgtccttcactaagagagggatcccagtcagggaggcattagttaccatgctgacagttgtgaatagtgaggtttgggtggaatgtggaggtatagaagacatccatatgtatctggaactcaggagggaagactggagactgagacctgatcttcctcagcacatgaattgaatgtgcaaccatggcatatgtatgatgagataaaagatctatgcattgttgaagaatgtgaatagatgagatctataggagatataaaatgacattacataaaagtggcaaaggcagtttcacgtaaaatacgtatacataattttcatgtaagcaaacaactttccttgcttcaggcccaagttatacatacctaacttctcacagtgatattaaggatgacttcatttagtcatgagagaaactattttgaacaacaatttaaaaagagcaaatgattatctcttgattgtgaaattctagggggaaaaatccattcaacgtacatgtactaatggggtagcgtcatatgttcagcaagaatcaattcaaccacagtctaggaattttacaataggctctctctcctctgacaatgacattctcaaaaccttattcttctgttctttcattgttgtaataatactgtactaagtcctttagagctgtaatgcaatcttatatctactcttcagcaagacaccttcactaatctgatgctaaagccagagtgggatttacggtgaagctgttgacacttaaccttgtgttaattt

SEQ ID NO: 75615 - DNA, 1501 bp, Homo sapiens
atgtgttgacttgcctatgtggcactcatcagagattttgaggttaaggacaggagctgatggcctagtgagagaagcagacatgagaataggtataacagagattgattattgctgaaatactggtgcacacagattgctaaggaagctcagcaacaaggcaccaaactcagcccggatgtggggagaagcagggaatcttctatccaggggcaatgcctatgctgagccctagagacatgctcatgttgtatgcagaagaagtaggcaaagaaaccaggaaaggcagccatggccaaaggcatagaaatgagaaagctggtgtgttaaaaaccgcagaaagctctttcatattgaaccaaagagcaacaggaggagtacatcagaggccacatcataaatgtggcatgctcttgagaattttatatttaaaaatggtgaactattgaagaattgaaaacatgatcaaatttacactactgaaagaatactctaatagtgcattggaaggacggtagacctgttcataggatgttgcaaaggttcagggcaagatgttgtgggcctgatccaaattagaggcaatggagagagagagagagaaggggataaataatggatacaggggcagaatccatgggtcttagttgttcatcaaatgtcagggctgaggaagaggaaggactctggccgattccaaggcttccttcttaggtgactgtgtggatagtgtgtccttcactaagagagggatcccagtcagggaggcattagttaccatgctgacagttgtgaatagtgaggtttgggtggaatgtggaggtatagaagacatccatatgtatctggaactcaggagggaagactggagactgagacctgatcttcctcagcacatgaattgaatgtgcaaccatggcatatgtatgatgagataaaagatctatgcattgttgaagaatgtgaatagatgagatctataggagatataaaatgacattacataaaagtggcaaaggcagtttcacgtaaaatacgtatacataattttcatgtaagcaaacaactttccttgcttcaggcccaagttatacatacctaacttctcacagtgatattaaggatgacttcatttagtcatgagagaaactattttgaacaacaatttaaaaagagcaaatgattatctcttgattgtgaaattctagggggaaaaatccattcaacgtacatgtactaatggggtagcgtcatatgttcagcaagaatcaattcaaccacagtctaggaattttacaataggctctctctcctctgacaatgacattctcaaaaccttattcttctgttctttcattgttgtaataatactgtactaagtcctttagagctgtaatgcaatcttatatctactcttcagcaagacaccttcactaatctgatgctaaagccagagtgggatttayggtgaagctgttgacacttaaccttgtgttaattt

SEQ ID NO: 75616 - DNA, 1469 bp, Homo sapiens
agtgatccaaactctctgaatttgaatctacatatatgtgaatcaaattatttttgttcaagttttattcgtcgccctgggaaccttttctgtgaagaatcaaccacctctatcggcatcttcactccattactatgttgcccctttccctacatcctagaaatgaaagagagaaatatttcctccattagtttagctttttaagttgctactgcctaatttaagccttaacattccttatgaagrctattattgttgcgctcacaccactgcactccagcctgggtgacagagtgagactctgtctcaataagaaaaaaaaaaaaaaaaaacgatttttgcaagctagcatttcaacaattaaattctatctctgttaagggccagggaagcaatataaattatatgtgagagaaatcatttgactactttcaaattccctgggattcattgggcaaaccatccatctttgctttgttgctctctttatccgtttatataatatggcatttcttaccttccaaatctacttttttttctcattttaggcaactcagaagaacctattgtgtaggggacagagaaatgagtgaaaggcttagattctggtctcagctcaatagccgtgtaatattggccaaggtactcaaattctcgaaaactcagtttcttctgtaaaattaggatacaaatatggatcctgtgtaatgcacagttggtcaatgaccaaatgtgatatttctaccatgttttatttgacagaaagatattttactcatgagtgtctttgacccccaagatctttaactgaatacatgaaaacttgggaagctgtatcataaagtgtattccaaataaacaatttagccaactaagtctttcacccgagtgtggtaaaccataagagacttgatgcattcttcatgaattgcaaatgactgcagacattcaatattttctttcatttcgaaaatatccccctggaagacactttgctataatttgagaatatgatgtttctgaagcatttagaatctgattgacattgaacaatttcaagggccattattgattacaaaatacgtgtatatgtaaaatgatttcttgtatagcattatttctcaacgttacttcagtcagtataagctccccaaacatgtaatgataaaaataacagcaacagctaaatgtgtatttaaatatgagagcaaagactgatattcattttgagtcattgaactgaacaggatacacagatattgtctggtagactaaagccttcattttacagataatgaaacagaaagtatgtggctttgtcaataagctgttttgttgcagagttgggactagaacctaagttccctaaatcaaaatctagggttcttttaactacacactgacatgaatatattcactcaatttttcatactaaaatagtcagtactaaaaattgcagagggtggggg

SEQ ID NO: 75617 - DNA, 744 bp, Homo sapiens
atcatgaaattgaaaaattataagtcaaaccattgtaagttgggaactgtctgtatacacacgtgtgtgtgtgtgtgtgtgtgtgtgtaagagagtaattataaggaattggctcacacaactgtggaagctgacaagtcccaagatctgcaatcagcaagctggacactcaaaagagccaagattgtggttccagttcaagtccaaaggcatgagaatcaagagagctgaaagcacagatctgaaagcctaccagtccaaaggctgatacattccagacccagaaagatccagtgtttcagctgaagtccaaagaaaataatgatgttccagcrtgaaaacaggtaagctgagttctctctcagtcaagggaaggtcagcctttttgttctagtcaggctttgaactgactggctgcagctctcccacatgagggaggccatctgctttcgagtgtgctttatcggtctaccaactccagtgttcatctgcccagaaacactttcacagacatacccagaatattgtctgaccaaatacctgggctccccatgatacataaaattaactctcacacccagtttatttccattagcatcattaacgcaatctataattaactactttttgtatttatttgctcacttgcttttcttccgttccttactattgataatttaagttctagaagcagaggccctgcttgttttaccaactctgtaactcttcggcctagaacagtgt

SEQ ID NO: 75618 - DNA, 583 bp, Homo sapiens
ttgtcatttggggatgaagacaaaaggtaatattctttgtcaacgcaagtgtgtggaaaaagaacttatacccatttttttggtctctttcctaatttggttagctagcactttcagaacaatttcaaatcacagtgaggatagcagaaactcatgttttgatcctaatattaatrgctatatttccagtatctcactcattaagaacgaaaaggttttttcagctgagctttatattttatttctattttactctcagttatgaacaaatgacttctcccaaatgcatttttttgtatctctcaagacgaatatgtaactggtataactcctgatgggtatgatataaaccagacagtttctacctgctcatccatctgtctattaaagaactgttcccatttctaaagctgagatttgttccaagtttctgggacaagcaaggctcaaaaatatagttacaacacatgttctaagtatatccataatatgaaagtaataactgttatcaatatccatgttacaaaccatatcaaatcctgttaattaattcatcttaaagaaactaagccaaattttgtca

SEQ ID NO: 75619 - DNA, 546 bp, Homo sapiens
taatttccagggtttttgtttatttagtgagaggaataggaaaaattaaatctattatattggaggctatttttaaaaagcaagtactgaacacctttttttcttgtcggttttaagttactaaaggagtatgaatccctttaccaaattgttttgatggtaaaatctaaaaatcattttggtcatratacattaatcaaaatagatgcaaatgcaataattgcaagtgagaaattcacattaatttatttatatcaataatgtattcatattattttgtcttgaaatggcgataattttagtaatattttaatatttgatatttaacctgaaaattagaaataaaaataagtccgaccaagttgccacaaataaagcaaaacagaaaattatccctttacctggggctaaaacttttcttcctcctaatattttctaaatttcttatatcatttgtaatatattcctaacttaagcaaaataacacactttagaatttcaagagcctagcaatatagatgaggcaaagagacattttctcaatca

SEQ ID NO: 75620 - DNA, 546 bp, Homo sapiens
taatttccagggtttttgtttatttagtgagaggaataggaaaaattaaatctattatattggaggctatttttaaaaagcaagtactgaacacctttttttcttgtcggttttaagttactaaaggagtatgaatccctttaccaaattgttttgatggtaaaatctaaaaatcattttggtcatgatacattaatcaaaatagatgcaaatgcaataattgcaagtgagaaattcacattaatttatttatatcaataatgtattcatattattttgtcttgaaatggcgataattttagtaatattttaatatttgatatttaacctgaaaattagaaataaaaataagtcmgaccaagttgccacaaataaagcaaaacagaaaattatccctttacctggggctaaaacttttcttcctcctaatattttctaaatttcttatatcatttgtaatatattcctaacttaagcaaaataacacactttagaatttcaagagcctagcaatatagatgaggcaaagagacattttctcaatca

SEQ ID NO: 75621 - DNA, 546 bp, Homo sapiens
taatttccagggtttttgtttatttagtgagaggaataggaaaaattaaatctattatattggaggctatttttaaaaagcaagtactgaacacctttttttcttgtcggttttaagttactaaaggagtatgaatccctttaccaaattgttttgatggtaaaatctaaaaatcattttggtcatgatacattaatcaaaatagatgcaaatgcaataattgcaagtgagaaattcacattaatttatttatatcaataatgtattcatattattttgtcttgaaatggcgataattttagtaatattttaatatttgatatttaacctgaaaattagaaataaaaataagtccgaccaagttgccacaaataaagcaaaacagaaaattatccctttacctggggctaaaacttttcttcctcctaatattttctaaatttcttatatcatttgtaatatattcmtaacttaagcaaaataacacactttagaatttcaagagcctagcaatatagatgaggcaaagagacattttctcaatca

SEQ ID NO: 75622 - DNA, 845 bp, Homo sapiens
aaaacctgcacttaggaccgggcgtggtggctcatgcctgtaatcccagcactttgggaggcygaggcgggcagatacctgaggttgggagtttgagaccagcctgaccaacatggagaaaccctgtctctactaaaaatacaaagttagctgggcgtgttggcgcatgcctgtaatcccagctactcgggaggctgaggcaggagaatcacttgaatccgggaggtggaggttgcggtgagctgagatcataccattgcactccagcctgggcaacaaaagcgaaactccctctcaaaaaagaaaacaaaacaaaaacaaaaaacatgctcattactgatatactatgctgtctcagcatatggacctggaagatgcattatattggtagataaggtaaaatgtatgtttttggagggtggcattgaaactgattcttatgttgttataactttgaaatgttggcctgagctctgatttatagctgatactgttccccagctgcacacagctgatctgtctatggccttctggtccttccttggatccctatgtccatcctccattctatggcccagggtttactcagcaccctgaaccctagaagttcacttataattactggttggctgtagcctcctcatactggcctgggctatacacatgtctttccagctctgagtttaatgacctcacattggtggcttggaatcagccagggcaaaagtctttacagcatggaaaccagcaaatgccttctccccatccctcgccccatcactttggcaatctggttactcacacaacactgcctaggatctactaccattcatatcccaggatag

SEQ ID NO: 75623 - DNA, 1925 bp, Homo sapiens
tcaccatctcaattaattttttctttttcaattaataaatgagacactgtattttgttgttgttcttattgttctccaaataggaaacctttagtttcttaatattttatctcccttaagattccctgaaaattaaaaaaaaatgaaaaagactattaacccagtgataaatattcattaaaacttatatacctagaaatgggattcttttcatagacaggtttctatgttttttatattctcctaggcagctttccagattttcattcttgaattgataatctaaggtctgatcaccgtaaagaattgtgttaacactgtattagagtcttaaaatagtttggagaaatttaaaatatatatctgtataaagttactatgcagatgctacttctatcttccaaaagtctcaaaattcttgatgcaaataaaaaagtgcataatattttaatataggttcatattgattttatgagactcctctgaaaatatttagtacacttattgatatgaaatttaaattcaggctttttttccattatactggccaattgaatggaatttcatccagactgaaatattcaaacaaataataaaggcacacaaaaagacataagtaaagtagatataatgatgtaattaaaattaacgtcctctcattcctggattaaccattaaatgggaacattttctaaggatctatcattaattctcttctgttttcaataatgcattccatgagggagattgcatccaatccttttattttaaattctactcttactccaagttattttccattttctacctttcttttgaggttcatatttatatttttcagtactcaccagaaaattgtacctgtgtgttctgaataaccgtaattgaactatcttatttactctttgtcatgtgcctgtttctttatatttcctatactattgaatgctccattatctgcctaactctccaaagtagaaatctaagataatttatcagcttttatccccaccaacttctacatctaaacatttcacagcactgtccactttgtatcactgaaatagctgttttagtccagttaagctctatctcctcctctggtgtgaagaggaggaggatggtcccaggctttgatggaccaagatctattgcctcaaggacagggcagtagtaaattttttaagagatttgtaggggawcagctccttttctgagaggccagcttgctggggaccagtcttggacaagtgaccttttattattaaaatattattggatattgttctagtcacagttattgaatacaaaaagtgactcttttactgccctgctatctctgtctttgtttcaaccatcattcccctccaatatagctacctttgtcaaagtcatgctcttaaaatacgtaaatgctcatattacatacttaaaatccttccataaggccccattgcttattgaaatccaaatccttatgtgaccaacaaggattttaatgaccaggcctcactccacagacttaggcttacaattattcccataacaatttttatattctatacaatgcatttcatttggtattctcttcttacactcaattttaagttgacaaattctcactgattctctaagattctgcctaaatatttctgtgaagcttttcttgacattctttttctacatttccctctggagttgtacaatgacacagccttgtttgtgtgtgtctatcgtacatatatttataattgtaattgttcccttatagatttgcatttgctactaagttggctgtaagctctttcaggaattttgccatttatgtctttgaagccctgtacctagctagtcacacagtaattagtcaatatctgttttaaatgaacgaatgagtgaatgaacaggaaatgaagtagcccatg

SEQ ID NO: 75624 - DNA, 2060 bp, Homo sapiens
tagctgggtgtggtggtgcctacctgtagtcccagctactctggaggctgagacaggagaattgcttgagcctgggaggtggagactgcagtgagctgagatcacgccactgcacttcagcctgggggacaaagggaggctcagtcttggggagagagagaaaagaaaatggagaccatgtttgccaatgaggaggaaaacttgttaaaaccccaagatctcagttgaaactgcaaaagcataaaccagtttgaaagagttcagtcctagaaaggatgaaagtgatctatccttacttcctaaactgaccaccaaaaccaaaaataagtcagctttggaggagatatccgctgcattcacaaaagtttgttacaacgaagtccaacattgaattaaacacaaaaacacacaccaggaaatccaagataaaaggagagaaaaagataacagaaacagaccaacaagatatccagatataagaattgttaggctcagaacttttgattatcacctccaaagtatartatctatttttgattacttttgttcaaaaatatagaagagaaaaatggagaatttcttccatagaaatggaatcaaggaaacatttatataaaaattttacagaaataaaaccctcaagttaaaacttaataattatatttaaccacaagtaagagaaagcagagagaattaggaaactgggatccaggtaagaagaaattgtgtaagctgaagaatggatacaaaaaatgataggtaatatatttaaaaataagagatatgggaggtatagacaactctaacatatgtgtaattagagttccagaagggaagaagagagaaaagaggagaaaaatattactttcaaaactttgaagtttatatgcaaatgtacactttcgccaacaagttagtagagttctaattgcttcacacccttgtcaacactttgtatttgtcagtgttttccattttacccattctggtggacatataatggtatcttattctggcttaaatttgcatacgtaatactgttgaacataatttgatataatttaacaccactcctgtcaagaacttccctaacattataaaataatctcaaagcaatagcttacattataattaatgattaaaaatcgctagaaaacgcgtgaaaaccagctctggaaaatgctgacatttataggtccaatagaggagaaactaaagcaaaagagatttcacaaaacagcatgtgaggtagaaggaacttgagggagggttagggattctagcatctaaaagaaaagagcatttcaagaagcagaaaatggtgaactgttttgaatgcttctgagagttcaaataaaatgaagaaggaagaatgatcactggatttttcaacagatgctcaaggaatctagcatattagagggagggtatgcagtgtaatggagagaagtcatactagtgttaagtggagataacaaaatgaaaatagtgtgttcaggatctctacctaaaaattagtcttaaaaaaaaagtggggctgtggctggcaagatggccgaataggaagagctctggtctgcagctcccagtgagatcaacacagaaggtgggtgatttccgcatttccaactgaggtatctggctcatttcactgggactgattagatggtgagtgcagcccatggagggcaagctgaagcagggtagggcattggtcacccgggaagcgcgaggggttggggaactccctccccagccaagagaagccatgagggattgtgttttgaggaacagtgcattcccgcccagatgctacacttttcccaggatgcttgcaacccatagaccaggagattccctcaggtgcctataccaccagggccctgggtttcaagcaaaaaactgggtggccatttgggaagacactgagctagctgctgtaggttttttttgttgttgtttttctataccccagtggcacctggaaagcgagttagaaagaatcgttcactcccctggaaaggggtctgaagccagggagccaaatggtctagctcagt

SEQ ID NO: 75625 - DNA, 615 bp, Homo sapiens
ctgggggaaaaggagcttatgtaagtaactttatgctcctaaagagaagagcataattatcttttatgtgtggctgataattttatttatttatttttccaacttttattttagattcagggagtatatatatgtacagatttgttagctgagtatgttgtgtgattatgaggtttgggatatgaatgattctgttacccaggtactgagcatagtccctaatagttaatttttcagctcttatccctctttcccctctagcgtcccccatttccccattttttattgttgtcacctttatgtctatgagtacccaatgtttagctcccatttataagtgagaatatgcagtatttcgttttaagtttctgcactaatttgttttgattaatggtctccagctacatccatgttgctgcaaaggacatgatttcattctttttttatgactggatagtattygacagtgtgtatgtaccacattttcttaatctaattcaccattgattggcacctaggttgattccatctctttccaattgtgaatactgctttgatgaacatgcaagtgcatgtgtctttgtggtagaaagatttggatatacacacacactc

SEQ ID NO: 75626 - DNA, 580 bp, Homo sapiens
aggcccaggcaggtggatcacctgaggtcaggagtttgagaccagccaggccaacacggtgaaaccccgtctctacgaaaaacacaaaaattagccgggcatggcaacatgtgcctgcaatcccagctccttgggaggctgaggcaggaaaatcgcttgaacctgggaggcagaggttgcagcaagccgagatcaggccctgcacttcagcctgggcaagaaagtgagactttgcctcacaaaaaacagaaacaaaaacaaacaatcaacatcaacataaaaaacactaacggtaacaatagctgatgatctctaaaaaaaaaaatcgcaagaaagycccataatgttttaaaaaagcttacaaatttgtgttgggccacgttcaaagccatcctgggcatcatgcagacagcaggccacaggctggacaagcttcatgtacatgtatttgcttcccattctattatgtgttcaaaaggaatcaacctgtactttactcctataaggagttttgaaacacaaggctgaaagggatcgatttgttcaagaggagccccctagccccctgaagggaggcaag

SEQ ID NO: 75627 - DNA, 554 bp, Homo sapiens
cagtttccaaatctgtaaactgaagataacgatgaggatgatgttagctaacttacgttgatgcttgattaaataagttaaacatgataatgacttagaacaatgactagcacagtaaggactatgtaaacactagtattgacagtttcatactcattcctcatcttgtctgtttgctatttaaatttttatagtgttacagtgttatattgaatgacatttttctgtaactgtacactttccctaggggacatcattaatcyatgattttaaataccatttatgtgcttgcaactcacaatgttttttcttttacgattttataccacagttcatgggagattatcatctttggtctgttcaaggattctcctctttgttcacctcattctcattcccaacaataggcagtaattcaattatatttaatgtgcaatttgtgtattttacaaaatgttttatgtacatgtacctctaactacattttattgtgatacacatttcatatctcattgtttcttacttattttcttttcttcctactaaatagtaca

SEQ ID NO: 75628 - DNA, 784 bp, Homo sapiens
tccccacaagacacatttttgtcgcaaactcacttccaagcttcaggtcaaagcccttggaaggaaaagtggatctgagggatccagaggcagataataacggaagttaaaaggcactacgaaggtgagcgtggctgattcctgctgatcaagccaatcccaagcttcctgtttcatgaataaaggccacgttagtatccatggcataaatgaggtctagttaatccaaggctactgacagcaggggaaacagggcatacgtgggtaagagcaaatgattcccaccccctaggccctcctgcttcatgggtgaatgaatatgatatatttaataatatcactaggaattatgggtggcttacattgyatccaatattgtactatatactttgaaaatattatctaatttcattttcacaataacctcataaagtatctattctgctcattttttttaaagataaatataatgaatcacagaaaagtttagttaccacccaagaccacactgcaaatgaacctaaggctggtattgagttgacctattctactgatattagtaaaaagaaagaaagatacagaaaaatagagatagagggagagacagagaaacagagactatcattagatgcactagaatggagccctttataactgaataactttttaaatattagttttttgagctaatgaaattttagaattgggatataactaaattttttttttctgatttttttttcaatgagaaaaatcaaggccaggtgcagtgaggatttggaga

SEQ ID NO: 75629 - DNA, 460 bp, Homo sapiens
tgtgattagagacaataatgtagagttttccataaagttgygaatcataaatggaacaataattggggttaagaaagatttcttctttctttcttaaaacgggacatatcagagacaatttgtatgtgcttgggaaatgatccagtaaaaaattaaaaaaaatatgattcaggaatattcaggaatgtaagtgagaattgatagtgaaatatccttgttaaaggaagttgaaatagaacctagggcagaaaggaaggatggaccttagattagaacaaggatggtccatctattgcagtaagactgaagctatggattcagagaatagttgttttagtatgccgttttggatactttttttctgaaagtttgtattttctgaaagaaatagaatcaatatcattagctgacagtgatggatgtgatgttagaagtgtgatgagaggaaaggtgtgaaata

SEQ ID NO: 75630 - DNA, 752 bp, Homo sapiens
catataccaaggaaagactgccatccaaattactttagcatggtggttcttacaaaggtgctgagttttacccaaaagtacatttggtgaattctggagacatttttaattgtcacaactgagagtaaagtggattattagcatgtagtggttggagaccaggtatactactatacatcttataatatacaaaaaaaamccccacacaacaacaattatctgatccaaatgagaatagaattgaagttgagaaattgtgccattagcctaatgaataaaactctgcgagtaaagtgaggcaagtaagatttcaaaagttccacgcagatttatcatctacatgtctgcaccaaagcagttggaaaactttaatcctgtttttggcttttgttaccctctatgctggtttccttttgcatattttagataagtaagccttatttgctttacacagatttttatctgtgtctggccatcacatcaatctgaaaggggtattaacatttttcaacatggtggaaatacaaattggtagcagtagtaagatctagacaatacaatcaaacccattatgaacaaagagatttggaaaaggttgcaaggtactatagaacaaaagccagaaaagatattttgaaatccatattgtgtgctaaacattcataatctagcatgacaaaagtcttagaatatataatgtgagcaggaggctataattctcaaatatattaaaatagaagctgtattataga

SEQ ID NO: 75631 - DNA, 752 bp, Homo sapiens
catataccaaggaaagactgccatccaaattactttagcatggtggttcttacaaaggtgctgagttttacccaaaagtacatttggtgaattctggagacatttttaattgtcacaactgagagtaaagtggattattagcatgtagtggttggagaccaggtatactactatacatcttataatatacaaaaaaaaaccccacacaacaacaattatctgatccaaatgagaatagaattgaagttgagaaattgtgccattagcctaatgaataaaactctgcgagtaaagtgaggcaagtaagatttcaaaagttccacgcagatttatcatctacatgtctgcaccaaagcagttggaaaactttaatcctgtttttggcttttgttaccctctatgctggtttccttttgcatattttagataagtaagccttatttgctttacacagatttttatctgtgtctggccatcacatcaatctgaaaggggtattaacatttttcaacatgrtggaaatacaaattggtagcagtagtaagatctagacaatacaatcaaacccattatgaacaaagagatttggaaaaggttgcaaggtactatagaacaaaagccagaaaagatattttgaaatccatattgtgtgctaaacattcataatctagcatgacaaaagtcttagaatatataatgtgagcaggaggctataattctcaaatatattaaaatagaagctgtattataga

SEQ ID NO: 75632 - DNA, 505 bp, Homo sapiens
ggctctgcatgtgttagggaagggggtatatggaaaatctctgtacttgctctcattttttctgtaaacctaatatggtatttttaaaaatccacattcacgtccctaccttcagttattctgtttgagtcaatctagagtaaaacccaggaatctgtctttgaaaaaggacatacataaaagcaggggtgggcaaactactgtctgtaggccaaatctggcttgttgtctgtttttgtactgctttaagattagtttcatatttaagaagatttattgatatgtaaatattaaaatttcaatgtccattagtaaagttgtagtggaacacacaatatgtaataccaaatagaattcaacaaaataaatattagaatgattcccaataccaagtcaggttttttcaaaggatgcaagactgattgatttgaaaatcaatcagaataattcaccacattctcagkttattaaaaaaaagtgggaagcatgattatgtaactgttgc

SEQ ID NO: 75633 - DNA, 599 bp, Homo sapiens
gctctcacctaaaggaactacagtattgttgggtaataaattgtatgaaacagaacatttttagagaatataatgcaagtactaaaatgactgaagagataagaaccatgatatttataaagcagtggataaatgtaggctgagagtttgggaaaaacttcaagaaaagttgtgacttgcctggctttggaaagataagtgatacttggttatgagagaggagggaaaagcatttcagcttgtgagatgaaggtctaaagtccttagggctgaatttgctggttgtggctatgtttactgcagttccagcagagttagagatgtggttaggccaggacagtaaggatatctgcctggaagattcctgttttccctttagagggaatagattaaggtggcagggatcaggtaggaaatgatgggggaccctgaagttagagctgagaatgtcttctcagcttctctgataccatgctctaagtttgctcccatttctttcgtggttccttctcttttcatttgttggctcccaacctcttctctactcagtctctgaatgttggactcawctgaagttccttagctgctcttctgcctct

SEQ ID NO: 75634 - DNA, 560 bp, Homo sapiens
ctgatgtcaaattccttttgactttttttggatatcctttaattatttactagagtagagatgttttaaggcatggaagggcgggtggagggaagaaagctgacatatctgaacaagtgagtaatttataatggaactaaaatattcataaaatgtcaactcagatagttcaattaacacaatccattctatttccacttcaaattgtaaattgaagcctcaaataatgtttgttttgcaatggacaatgcattgctaaactaaacaagaaatgtgaagtcactacctttgtgcttagttgatctctttrgatctggagtgggaaatagactgtttattatacatcagtataaatagcaaaaatgagaactctgttaagtgaattcattttctaagccaatgattcttcagtatttttcaggaagacaggtcactgatttagcttggttacttgacaacatttttcataggtttgttaggtttttactctttgtatttttgtaggagagaaggctaaggtgcacaaaattggatgactcataatccttaatttatgatac

SEQ ID NO: 75635 - DNA, 1535 bp, Homo sapiens
catgtctgcagaatctggatctatattttacaataaaagggcttttgttgcctcatgcaattctcataacaactctgtaagataggtacttttatctagattctgctgatgagaaaaacaacacccaagtttatatagccagtaatttctggagttgggatgcacaccctgaaaggctttgctcccaaagacaatgctatacttcttatgagagagtgatgtcttcagaaattggtcaggaggaaagttcattttctgatgattgtatggaaatgaaactttggaactgtatgatgtcctggaatactatagtatttgtagcattacctaaaaatgaatacatgcatatatgtgtgtgtgtgtagagagagacatagagaagatagaagctaacacatgattatagtatagcaataatcaaccccacaaccattttatggttctgatagggccactgtttattctgcaagatcacaagtgatcacaagagttgatattgctgaaactgtgttatgaacatacaacatacactttttctccaacccactttggtatacacacctttgtggaagaaattgtgtcattgtgataaagctttgtgttcaaggtactaatatccctatatggcatatattaagatattgattatagaaagttatcaacagatttcttaagatactttctgggaaaccaggacttgttttcaaggggaagccgttatcattatatatggacttcttacctaagtgtcctaaaagctagatacccatcttttgctctataggaacaaaatcaagaatttagaacatgtaatcacatatggtgacctctataacaaggccagagagcagtgattcttaatcttagatgtgggttaaaatcagattgcatttttgacaagggtgccaagatagttccattggaactattgaaaagactattggaaaaaatagtcctttcaaaaaaatagtgctgggataactggctacccacatgcagaagaatgaagttgaagaagcatgacatcagcaagatggtagactagaagaccctagtgctattctccctcaaaaagatagccagaacaatgaataaacaacttcattttaacaaaaataactgaggaggagcacagtggtgcacaagagaagtaacagataccctggtgagcacagaaacttgggatggccacataaagaatgggaagaaatgccaggcctccattaccctaaccccaattggaagcagctgggaatgaactaggaggaacgtttccctactgcaaggaggttaacaaaaggatcccagcagccccatcaacaccgtggatacctacagacctgagcactggggtcccctgcaatcctcacagrcactaagcctagctgagggagctgcctgaagtccacatgtccgtgcttcccccagagaaggagccaatactatgatccacaccctgtggcccacatagctaccatgctatgccatcttggagttggaactatggctggatgtgtcttgctctgggggcaagt

SEQ ID NO: 75636 - DNA, 1158 bp, Homo sapiens
agggcagggacatgtctacatgtctcctccatctctgaacctctcatctctctcacatacctatgttttcttgaacacagcaggaacataacacatatttgagagacgcatcagtcacctcgtcttgtctgttctaatttgtaaaggtgttttgaatgagtctcctatttcccttaagccaggccacatcaactttcacttggactgtgacaacagcctcttaacagtctcccctctttccatctaagccccacacagatgaccagagccatttttctaaaatgaaaatcgggtcatgtctttcctctgctgacaacctgtcatgagttccccagtgccacaagaaaaagcctcagcctccctctacagcctgatatcttttgtttcccctcttccccatctcccccgaggcacctccttgcattcctcctgaactacctataatgccacagtagccctacactgtttcagacctctctgtctaggaaactactgcttccttttcttcaaatgaaaccccctcctccactccctgctcccatcatctgacaagcaggtgtccatgcctcccaacccagttctgatgaaaacttgctctgtgaaggaggagatggctgacccaggaagagaaacccgcactaaccacacattcacccgataaatgttattgggcattctctatgctccagacactccctttaggcagtgcttgtatggtcaggttgctatggttgcagccatcccccatatggatatgaatggggttcaaacctgcctcatttccaagtctgggagccctgaggtcaggggctaccatgactctcatcactgagtcctcacacagtgccagcctgtgggagaactgaaaatgaaccccattgtatacaggggagagggagggaggaggtcaagtgagaaccagagtgggacagctgccaaggtcccacccaggctgacaggrtctctcacatcttatcttacagcccaggatcctattgatcactagcaaaaagataattcagcttctgctgttctgaggctcctgtgccctggcttccattctcagtggcaaaatcctcgggaaattccctacaacccccaaattgttggatcaatgaacaggttatacaggctgctgacagcccagcacagtgcaaa

SEQ ID NO: 75637 - DNA, 1217 bp, Homo sapiens
cctcccaaagtgctgggattacaggcgtgagccaccacacccggccataaatactcatcttaataaatttcatggttagtaaataaattttccaaaaaaaaacctgataaattttttttatattttttatatctgatcagatattaaagtaagtcaactaatgaaggtcacaaattttcttttttgcaacattttattttcatataatttcaaattcatggtaacattccaaaaatagtattcctatatacctttacccatattaaccattggtttacattttcttccatttccctctcctcctttgctctgtgtatgtgtgtacacacacacgtgagagtaaactgcagacgctatgctccttcgcctctaaatacttcaaggtgtgtttccaaagactctcttccataatcacagtaaaattatcaaaattgattatttaacactggtataataccagtatctaatccacagtctatattcaaatttggtcacttatcgcaataacgtctgttatagatttttccccaaatcaggatccaatcctagatcacacattacatctagtcagtatgttcctttagtttccttcaatctctaacttcattcatcgtttctggtcttgaaatttcaaaatttcaaaataaggccagttattttgctgaatatccctcaatctggatttgtctgatgtttccctatgattagtttcagattgtgaatttggggcaagaatacaacagttcatcatattaggaggcacataatatcggtttgttccattacyagaggtattaactttgatcactgattaaggtggtgtctgccaaagtatttttccctttgtaatttttttaagtatgttgtgaggagatacttgaatatattcaaatatcctatttcctcattgaacatttacccactagttttggcatccattgagactctctaacaccatcattacttctacttctatgctttagcattccactgtaaggaagagtttaatcttcatttatttatttattcatttatttacatatattagtatagattctgactcctgtattattcaatgggctataatccattagtatatttcttttgatgttcaatttgtcccagattttgtatttatcagaccaatcaagtaaacaccactgaagtcactaaagcaatactttctcactataggttaattcaatctaagataagaa

SEQ ID NO: 75638 - DNA, 541 bp, Homo sapiens
aatgcccatgtgggcacaattttgtatcccagttaagggatacataggccagttaacaattcctgaattcctgatcattaatctttttaaaatttgtcttttgactttttatatacttaagtcaccctgtccrtgtctgaatatgttattgaaaagaatggaggtttttcaacacaccgaagtgcttctacctccttatatgatattgcttttaacttaaaattgtttatgctaagtaacataaaatggtatataccaatctttaaatgtagtaaaactttatgcctctaaatggtatacatataaatagctctcctctgtggagcccattgagaaccagaacataagcaaagctgcttcttcaaatgaaacgataagttaccgaggccaggtgctttaccatcgctttaaacatgcttcttagacccttgattaatctggtttcagcccttgacagaagtgagggaagaggctggtaaaaaataggcaagttaatagcaacaagaagtgacagcagtggaggaaaaaaaatcttaaaaac

SEQ ID NO: 75639 - DNA, 1055 bp, Homo sapiens
agaattaaaaacaaaatagtggtatatgttctcataaaatatgtaccccagaatgcatacataaacctgaaccctttagagactataatattatgaggcattaattttttttgttttttccgagtggctttcaatctgtagctgtatgttagctatatgaaggtgagtatacatacatattgtgaaagcaaaaattgcatccgacaaagttaagcagcaaggacaaatgctattcaagacaattacaataggagagagaggccagaaatcagcctgctcaactccactataacaaggggtgggaggaactttagggactggtatgagctagtggaagggaactagagaacactggaggatgggggcaggttgatcactgggttgtgtgaagcacactgagtttgcaaaatacttttctctgtgattaggtcatctctgctggctaattggcacccattgaagttaggctcctactctcccttagagactggtagacaggggtgctatttttcatgatgattacatttcaaagggttggctcccagcaacttgagaaagacttccctgagtagtacaacaggcaagaggcttttaaaaatatttacatctcaaaggggcagagaaaggatttacarttacaattttttcttttgtaaatgctctaggaaaaaaagaagtcaggggctcagaatctgagagaagcctgtcaagtttagtcaagctgagggaaacatcaaggccttcttgattaaaaggtatacactcacacacacttgcttctaatttatcttaaaaatatatgctctgctatcagtgttctaaatgttttctttattgtgccatatttatctgacagaacctgaatagtaagcatttttaaagtgtgcatgaactgcatgaaaatcaccttatatgacaaatgatgatatgacaaacagcaaaaataattctttgtatataatccatcattgctaataggatataggcaagtcaatggaagtatgatacaggtgttcaataaatgtatttgtgttgattgattattgaagtttgct

SEQ ID NO: 75640 - DNA, 1235 bp, Homo sapiens
tgggacaccagggtgcagatggactagcataatttctctcaaaagtgttcctgagtgtttgctgtcctgatctggaacaccacactgcaccttcccataccacaccatatcatattcagtcaatttgcttgctagtccaggggagatggcaggaagtttcttttaatctctggctttgttccaaaataaatattcacttgaggtgtcttaattgcagtgggaagtaactcttgtctgaaaggtattcaatttaacaggcatttgttgagagcctactatatgtccagcacaattctaggcactttggatacaacaatgaacataaacaaacaaaaaatccctgccctcatgaagcctacattccagaggaagaagaaagatgttttaaaaaatacttagaataggtcaagtatataaaatgatgaccagagtaatgaaaataaagtagaaaaaggagtgtcagggagacaggtagtggtcagttttaaataaggtggtgaaggaaaactttatagaaaagaagtcaacatttgagcaacaacctgaagaaggtgagggaaagggttgcatggagatcagggaggccagtgtagctggagcatagagaggagctcaaagagggaaagaggagccactgctttgttgaaattgactgcaaggaggcaaaggcagaggcagagaattcagtcaggagtcatcgcaatgacccaaaatgagagatgatggtggcttgggccagaagagaagcagcgaagtgacgagaaatggtcaaatttcaaatatattttcagctaaagctgacaggatacgctgatagataggwcatagcatggaggagaataagaggagtcaagctggatcctgatgcttttggaccgagaaattgtagactttaagtagaatcacctagcaaagaaaccaaggcagatacaagatggatttatacatttatgctcacatgcaaacagaaggtgacatgaggctattttcttacgtctttcatacatcagcatgaattaactactggagtgtgtcatttaaaggacaggatatggtctgcacacatttaagtctaacaacagtaaacattattcctgtatggttaattgggagttgacatcaccctcagtcagcctgtggttgagtcttgcagggaaaatgccactgagttttctcagccttaaaaaaataatgtatgcttttatctgacctaaagtcaggaactataaaagaag

SEQ ID NO: 75641 - DNA, 1235 bp, Homo sapiens
tgggacaccagggtgcagatggactagcataatttctctcaaaagtgttcctgagtgtttgctgtcctgatctggaacaccacactgcaccttcccataccacaccatatcatattcagtcaatttgcttgctagtccaggggagatggcaggaagtttcttttaatctctggctttgttccaaaataaatattcacttgaggtgtcttaattgcagtgggaagtaactcttgtctgaaaggtattcaatttaacaggcatttgttgagagcctactatatgtccagcacaattctaggcactttggatacaacaatgaacataaacaaacaaaaaatccctgccctcatgaagcctacattccagaggaagaagaaagatgttttaaaaaatacttagaataggtcaagtatataaaatgatgaccagagtaatgaaaataaagtagaaaaaggagtgtcagggagacaggtagtggtcagttttaaataaggtggtgaaggaaaactttatagaaaagaagtcaacatttgagcaacaacctgaagaaggtgagggaaagggttgcatggagatcagggaggccagtgtagctggagcatagagaggagctcaaagagggaaagaggagccactgctttgttgaaattgactgcaaggaggcaaaggcagaggcagagaattcagtcaggagtcatcgcaatgacccaaaatgagagatgatggtggcttgggccagaagagaagcagcgaagtgacgagaaatggtcaaatttcaaatatattttcagctaaagctgacaggatacgctgatagataggtcatagcatggaggagaataagaggagtcaagctggatcctgatgcttttggaccgagaaattgtagactktaagtagaatcacctagcaaagaaaccaaggcagatacaagatggatttatacatttatgctcacatgcaaacagaaggtgacatgaggctattttcttacgtctttcatacatcagcatgaattaactactggagtgtgtcatttaaaggacaggatatggtctgcacacatttaagtctaacaacagtaaacattattcctgtatggttaattgggagttgacatcaccctcagtcagcctgtggttgagtcttgcagggaaaatgccactgagttttctcagccttaaaaaaataatgtatgcttttatctgacctaaagtcaggaactataaaagaag

SEQ ID NO: 75642 - DNA, 571 bp, Homo sapiens
atatttgggtttgagctctctattgagctgtgttctttgtttatctcccctttactgctctcttctagattggtgtttttattattataatttccatgccagtagcttgttctttacatatcccttctctattctttttgtgattgctgtagagattacaatatggctccctaaattactgaagttcaatatcagtttgtacatatgccatatcctgaaaatctcaagaaacttaaaacactaaccccattctctttttcttgagttaacaagctattgctgtcacatattttaaatctctatgtgagacccaaaaaaccattattacttagaatttttacagtcaatttttattcagatttacctccagcaatactccttgccaccgctccttattccctgcacgatcatgctttayctaggatcattttcttttgccaaaagaactccttttagtgtttcctttggtgcaattctgctggtaattaattgcctcagtttttttttttgtttttttgtttgttgttggtataaaaataattttatttctccttcattagaagtagaattc

SEQ ID NO: 75643 - DNA, 571 bp, Homo sapiens
atatttgggtttgagctctctattgagctgtgttctttgtttatctcccctttactgctctcttctagattggtgtttttattattataatttccatgccagtagcttgttctttacatatcccttctctattctttttgtgattgctgtagagattacaatatggctccctaaattactgaagttcaatatcagtttgtacatatgccatatcctgaaaatctcaagaaacttaaaacactaaccccattctctttttcttgagttaacaagctattgctgtcacatattttaaatctctatgtgagacccaaaaaaccattattacttagaatttttacagtcaatttttattcagatttacctccagcaatactccttgccaccgctccttattccctgcacgatcatgctttacctaggatcattttcttttgccaaaagaactccttttagtgtttcctttggtgcaattctgctggtaattaattkcctcagtttttttttttgtttttttgtttgttgttggtataaaaataattttatttctccttcattagaagtagaattc

SEQ ID NO: 75644 - DNA, 1569 bp, Homo sapiens
aaacaaaaggtcagatgaatgtttcccctcaaagcttcccgcagtgactgagttttagagaaacttactctaaatgagaaatgagaaatgggaaatgagaggggctggtagtttacagaatttagggccatgcagtgaccttgcggattccatggggtgttcacagagacccaaggataatgagactgaattccccattataatcatttcccagagcctttcgacatgctaaagtgaactttgaaactgcgagaagatgtggcacacacggcaggtgacgggagtctgaccagaggagtcggggaccatctgagaagacgcgtgttctctaaacacggcttggaaaataggtactggttttcaaatgcgctcagtgaactccttagacaagctttgagaagaggcaaagaagcaggatgtcggcccgtttcaaggacagtcttctcctgctcgtttctttcacatgtctggctctgcagtgactaagctttcctttgaagaaaggtttctttgactatcgcaaccccccaagaaaaggattctagaaatatttgtggatgctcaagaccgaagctcaactgtcagctattttccccctggccttgctactcctgagacttcaatatggtatttttggaatgaaaccacatatgaaatccaaaaggcaaaaacctctgacttttccccacaagtgtgttagaaccaggagcaaagggaagggcgccctcttggtgggaggtcactcatgaagctggacagaggccagagacccggcagtttggtgacttgtgtctaagctctgagtgtggatccctggctggacattcccagctgcagcaccaggctgtcctgggcagaggactccagtccctgcattcaagcgtcagtcacctcagcaktcacagcggcagcccgcggggtaaggtagctgaagactagaggcctgctcccgtgggacagatttacacaacaattcatcaccatctcctggtgagggggagatgttcaaaactgtgaaaggtgtagatgcaaaagcacaggccctcaaacacaatcaagtgtgaaaccagagaaaaatgatccttgagaatccggctgggatttcatctttatcctgcattatcctaaagttccaggcccaaggtatgcactgttagcatatgtatacatcatttaaatgtggtaaaaggaaaatcaataaaggctgatgggcatgcgtctctgggtcccctggccacactgggcccttgcaactgccctccggtgtgcccagggcccgctcctgtggaggcgcagctaagaaaacccctgacagcatgccacaaaatcagttttctaccttctgcttttttctttctttttccatttttaaaaacttatatactgcctaacttgcttcgggcaaaaacctctcaacaggctgtgggatacattcaaaatgagtagcagaagtgacaacttatctttatttcaacatggaaatgtggtttctccagatgtttctaatgttcccaatagggatttccaaagactgaatattgcatcaaggctgccagcctgaagggccct

SEQ ID NO: 75645 - DNA, 1569 bp, Homo sapiens
aaacaaaaggtcagatgaatgtttcccctcaaagcttcccgcagtgactgagttttagagaaacttactctaaatgagaaatgagaaatgggaaatgagaggggctggtagtttacagaatttagggccatgcagtgaccttgcggattccatggggtgttcacagagacccaaggataatgagactgaattccccattataatcatttcccagagcctttcgacatgctaaagtgaactttgaaactgcgagaagatgtggcacacacggcaggtgacgggagtctgaccagaggagtcggggaccatctgagaagacgcgtgttctctaaacacggcttggaaaataggtactggttttcaaatgcgctcagtgaactccttagacaagctttgagaagaggcaaagaagcaggatgtcggcccgtttcaaggacagtcttctcctgctcgtttctttcacatgtctggctctgcagtgactaagctttcctttgaagaaaggtttctttgactatcgcaaccccccaagaaaaggattctagaaatatttgtggatgctcaagaccgaagctcaactgtcagctattttccccctggccttgctactcctgagacttcaatatggtatttttggaatgaaaccacatatgaaatccaaaaggcaaaaacctctgacttttccccacaagtgtgttagaaccaggagcaaagggaagggcgccctcttggtgggaggtcactcatgaagctggacagaggccagagacccggcagtttggtgacttgtgtctaagctctgagtgtggatccctggctggacattcccagctgcagcaccaggctgtcctgggcagaggactccagtccctgcattcaagcgtcagtcacctcagcattcacagcggcagcccgcggggtaaggtagctgaagactagaggcctgctcccgtgggacagatttacacaacaattcatcaccatctcctggtgagggggagatgttcaaaactgtgaaaggtgtagatgcaaaagcacaggccctcaaacacaatcaagtgtgaaaccagagaaaaatgatccttgagaatccggctgggatttcatctttatcctgcattatcctaaagttccaggcccaaggtatgcactgttagcatatgtatacatcatttaaatgtggtaaaaggaaaatcaataaaggctgatgggcatgcgtctctgggtcccctggccacactgggcccttgcaactgcmctccggtgtgcccagggcccgctcctgtggaggcgcagctaagaaaacccctgacagcatgccacaaaatcagttttctaccttctgcttttttctttctttttccatttttaaaaacttatatactgcctaacttgcttcgggcaaaaacctctcaacaggctgtgggatacattcaaaatgagtagcagaagtgacaacttatctttatttcaacatggaaatgtggtttctccagatgtttctaatgttcccaatagggatttccaaagactgaatattgcatcaaggctgccagcctgaagggccct

SEQ ID NO: 75646 - DNA, 773 bp, Homo sapiens
tgttctggctgaacagtctgtcctcgtgccctctcctcagagatgccctttagtgctgctacaccctgggtggagttccctgccctgcatcctctcctgactcactggttccacctctgttcttctgttttttcacttttttccagcttctctatcttatcctaatgtagctttgctcaccagtttaaaactaattcagaaagtaatgttccctgggatactgaaacaaacacacaaaaggactttatgaaatacccattaaaaagtagcaacaatttctctaattcaagcatagttcattgagctatgaatgaacatgatcataagtcacatcatgatctgtgacttatataacttatgttgttactagtacaaagctatcagtttgaaatttcctagaaaatgttatttcatttgacttatcattaccmagcaacacataaacttcaaattataggcctattcactctacaaaattgccatgtcacatccatggccaatggctgaaaacagctctcagaattcctgcagtaattttaattttaacttcttagcatttgtgaagcatatttgctttaatcatttgatgtgaaaactgggagaagagctatcacagcaagaattcgacattgcatctgtccttcacagagctttttccaccagagatgcggcataaacatatctgggtgagcaaaatatatcagggcttttcctgtaagtatgtgtctctcacaggtggaaatacaaacaataaatcaagctttgaaaagagt

SEQ ID NO: 75647 - DNA, 685 bp, Homo sapiens
acgtyttggaccacagttggtgttaccagttttttaaagccattctgatgggtggataatagtatctgattatgtgattagttttgtttggtttggtgcttttatatgtctttgttatggaaattttcaaacacacacaaaagtagagaagatagtaaaataaacctgatttttccaacatacggcttcaacaattttccaaaaaattgcccttttttttgtatgtccccacctacttgcccttctctcccttcctctgccctgggtattaggaagcatttcccagacatcaggaataccagcctttagctatggtgtacaacatattacagatgtgctggaggctgtgttttgttattttctaaataatccaatatatattctttgaaaattctccaatataaacaatttcaggtctatatgaatttataagaaattataaatcacagaactttagaaacatgctccaaatatattgacttctttaaaatgtttcacattagtggaagctgtttttagatttttgcttggcaatcatattgctaaattcagagtgtcatttttaatggtgtccgtatacagttaatattttttaaagtttattttttccaagataaaagtaaatcatgaacattttacaaagtgaaaacaaaagtatatagagtaaatccatggctccctttgg

SEQ ID NO: 75648 - DNA, 685 bp, Homo sapiens
acgtcttggaccacagttggtgttaccagttttttaaagccattctgatgggtggataatagtatctgattatgtgattagttttgtttggtttggtgcttttatatgtctttgttatggaaattttcaaacacacacaaaagtagagaagatagtaaaataaacctgatttttccaacatacggcttcaacaattttccaaaaaattgcccttttttttgtatgtccccacctacttgcccttctctcccttcctctgccctgggtattaggaagcatttcccagacatsaggaataccagcctttagctatggtgtacaacatattacagatgtgctggaggctgtgttttgttattttctaaataatccaatatatattctttgaaaattctccaatataaacaatttcaggtctatatgaatttataagaaattataaatcacagaactttagaaacatgctccaaatatattgacttctttaaaatgtttcacattagtggaagctgtttttagatttttgcttggcaatcatattgctaaattcagagtgtcatttttaatggtgtccgtatacagttaatattttttaaagtttattttttccaagataaaagtaaatcatgaacattttacaaagtgaaaacaaaagtatatagagtaaatccatggctccctttgg

SEQ ID NO: 75649 - DNA, 685 bp, Homo sapiens
acgtcttggaccacagttggtgttaccagttttttaaagccattctgatgggtggataatagtatctgattatgtgattagttttgtttggtttggtgcttttatatgtctttgttatggaaattttcaaacacacacaaaagtagagaagatagtaaaataaacctgatttttccaacatacggcttcaacaattttccaaaaaattgcccttttttttgtatgtccccacctacttgcccttctctcccttcctctgccctgggtattaggaagcatttcccagacatcaggaataccarcctttagctatggtgtacaacatattacagatgtgctggaggctgtgttttgttattttctaaataatccaatatatattctttgaaaattctccaatataaacaatttcaggtctatatgaatttataagaaattataaatcacagaactttagaaacatgctccaaatatattgacttctttaaaatgtttcacattagtggaagctgtttttagatttttgcttggcaatcatattgctaaattcagagtgtcatttttaatggtgtccgtatacagttaatattttttaaagtttattttttccaagataaaagtaaatcatgaacattttacaaagtgaaaacaaaagtatatagagtaaatccatggctccctttgg

SEQ ID NO: 75650 - DNA, 715 bp, Homo sapiens
tgtaaatctgtgtgttacctctcagcaatattgcattcaaagggaaccctaattgtggaataaaaatatttgccccatattttaatgttttgtttgctgttctatccccaatgcctagaactgtgcctgtcacatggtagaggctcagtacatcttgattgaataaagtaaagcattgtaagtcattatggatattacggaaaaaaattttggtaatagaggaatgtagaatttaggtgtcttgtttcctggaacccttgaaatcacatgccttaggcagtggctcactctactcatagataaaactggatttgtgtctttaagcaatgctgacagaaacttcaacaggaagcccaagacatagacaggaatatgcaaaaactgaagtaattaaagayaaaagaaagagtaacaggagggaaacgtgtaagagagaaaatgggaaaaggatgcaggactgtgaagagcaagagtatgccacagtgtttccagagtctgtccatactttgcaaagttaattatactctgcaaaatatcagtcttcttttggggcagtagaggaccctgaagggctaatgggatgaggtaaggaggctgtagggcttccaggatactatagttttcagggagttgctgggtatgaccggcagaggccaagaaggctcagcctcacgggtgccttcctcaccagtttcctggggcagcaatggagagg

SEQ ID NO: 75651 - DNA, 783 bp, Homo sapiens
caggatattaacgctatgcctgtccccgctgcataagctttcatgtgaggctcttcattagctaacaccaggggatggatctgctgccctcagtctttactgtttattatctataaaaaagagccccctctgattcaccagctggggcaaatactgctgatgggaagtaatttcccaaaagaacagtaatgaaagtggggtggaaatgagccacaaagttcatttagatttagcagtctctgctggactggaggcaaaatctaagtgtctgtcacactgcagcaagctagacctcagtgttacaaatagcaaaggatttcagaaaaaaaaaaaaaaaaactagatgaacatatgaacgagatatataaacaggagagtttatagtctagggtcagtttatttatttatttatttatttagagagggagtcttgctcttgttgcccaggctggagtgcaatggcrcaatctcgactgactgcaacctctgcctcctggattcaagcgattctcctgcctcagcctcccaagtagctgggattacagacgtgcaccaccacgcccagctaatttttgtatttttagaaacggcatttcaccatgtcggccaggctggtctcgaactcctgacctcgtgatccacctgccttggcctcccaaagtgctgggattacaggcatgagccacggcgcctggccagtttatttattttttattattattttttttgagatggagtctcaaaaatattttttattatttttatttttatttttgagatgga

SEQ ID NO: 75652 - DNA, 1542 bp, Homo sapiens
tgctgggcattgtcatgcttaataaaagtaagactgaacatctgcaaatatggcgacagtgtggcgcatacgatgcgccagtgactgagctgcattctgatgtaattataacaccacatggagctgtaataatgtgactccctgtttacattagttctagcacttggagtaaactctccttgagttaggtgctaaccaatttcaaccagggtaggcatataaactaatgaaggattgtattaaaygcagagtgtagataatgctgagaataggcagataaaaggctgtagactatcattttgaatctgcagccaggtgtcaattctctgggtttaatcccatcgattgctatctgtgtgaccttgagtgagtcctcaaattcagtgaaatggagataatcactgtgcatttctcataagactatagtaaggctttaatataataatatacataaaggttttctctacctcctcttccactgcttttttttcctttctctttactttttaaaataaatatctattgccatttttttccttcctttatcaaaaagctactagaaaagaccaagtgaaataagtggcccagggttgtcagacttcattgatggttggggctagtgtacaaagggggtggcaactagttggtgtcaggaaattggctacatttcggggttggagatgagagccggcttcctcagtgtcagagaagggaaggggaagctagaatgaactctgtggtgttgaattggaatcaaaggtatcagcagaaaagcagcattttgtagataggatacagagataaatacagatataaatgtatgtatgcatgtatacatatatacacaagtacatatgtttcctagctctgtgtcctgaaagagcctgagagcagtgataacacaatagcaatgaacacacttagtgtccagatcttggtttccaaataccagtgaacattcagtttctaaacaccacttactaaaaggagtccaagctctttagagaaatggctaattttagggataggttgggaaaagaacaggaagatcctggaaatttgtgttacaccataaagtaaggaaatactcaaagagtggtgggaacttgtctaaagaatagggaagctagcttgaaagagctccaattagtcaaatctgcaataatttttgagcatctaaatatatcgtgagagtagcagattataacacattgaaaaaacaggaccccatgaatccgcatggttattcatagataaataaatgagaaagctctttcttatcatagaaagccaactcataataattatgaaagaaatgatggtagtgaagaatcaccttttggcaaccattagaataagtattcagaaaagaaacaccaatgatgctaatggatgaacatagaatgaaaaatcgtttttcacatgatctctcagtatcctccctcaaaacatgcattgattacagtggagaaacctggcagacactgtcttaatcaagggattacagttaacaccaccagtaatatcgtgtgcccctcaaaa

SEQ ID NO: 75653 - DNA, 1542 bp, Homo sapiens
tgctgggcattgtcatgcttaataaaagtaagactgaacatctgcaaatatggcgacagtgtggcgcatacgatgcgccagtgactgagctgcattctgatgtaattataacaccacatggagctgtaataatgtgactccctgtttacattagttctagcacttggagtaaactctccttgagttaggtgctaaccaatttcaaccagggtaggcatataaactaatgaaggattgtattaaacgcagagtgtagataatgctgagaataggcagataaaaggctgtagactatcattttgaatctgcagccaggtgtcaattctctgggtttaatcccatcgattgctatctgtgtgaccttgagtgagtcctcaaattcagtgaaatggagataatcactgtgcatttctcataagactatagtaaggctttaatataataatatacataaaggttttctctacctcctcttccactgcttttttttcctttctctttactttttaaaataaatatctattgccatttttttccttcctttatcaaaaagctactagaaaagaccaagtgaaataagtggcccagggttgtcagacttcattgatggttggggctagtgtacaaagggggtggcaactagttggtgtcaggaaattggctacatttcggggttggagatgagagccggcttcctcagtgtcagagaagggaaggggaagctagaatgaactctgtggtgttgaattggaatcaaaggtatcagcagaaaagcagcattttgtagataggatacagagataaatacagatataaatgtatgtatgcatgtatacatatatacacaagtacatatgtttcctagctctgtgtcctgaaagagcctgagagcagtgataacacaatagcaatgaacacacttagtgtccagatcttggtttccaaataccagtgaacattcagtttctaaacaccacttactaaaaggagtccaagctctttagagaaatggctaattttagggataggttgggaaaagaacaggaagatcctggaaatttgtgttacaccataaagtaaggaaatactsaaagagtggtgggaacttgtctaaagaatagggaagctagcttgaaagagctccaattagtcaaatctgcaataatttttgagcatctaaatatatcgtgagagtagcagattataacacattgaaaaaacaggaccccatgaatccgcatggttattcatagataaataaatgagaaagctctttcttatcatagaaagccaactcataataattatgaaagaaatgatggtagtgaagaatcaccttttggcaaccattagaataagtattcagaaaagaaacaccaatgatgctaatggatgaacatagaatgaaaaatcgtttttcacatgatctctcagtatcctccctcaaaacatgcattgattacagtggagaaacctggcagacactgtcttaatcaagggattacagttaacaccaccagtaatatcgtgtgcccctcaaaa

SEQ ID NO: 75654 - DNA, 1542 bp, Homo sapiens
tgctgggcattgtcatgcttaataaaagtaagactgaacatctgcaaatatggcgacagtgtggcgcatacgatgcgccagtgactgagctgcattctgatgtaattataacaccacatggagctgtaataatgtgactccctgtttacattagttctagcacttggagtaaactctccttgagttaggtgctaaccaatttcaaccagggtaggcatataaactaatgaaggattgtattaaacgcagagtgtagataatgctgagaataggcagataaaaggctgtagactatcattttgaatctgcagccaggtgtcaattctctgggtttaatcccatcgattgctatctgtgtgaccttgagtgagtcctcaaattcagtgaaatggagataatcactgtgcatttctcataagactatagtaaggctttaatataataatatacataaaggttttctctacctcctcttccactgcttttttttcctttctctttactttttaaaataaatatctattgccatttttttccttcctttatcaaaaagctactagaaaagaccaagtgaaataagtggcccagggttgtcagacttcattgatggttggggctagtgtacaaagggggtggcaactagttggtgtcaggaaattggctacatttcggggttggagatgagagccggcttcctcagtgtcagagaagggaaggggaagctagaatgaactctgtggtgttgaattggaatcaaaggtatcagcagaaaagcagcattttgtagataggatacagagataaatacagatataaatgtatgtatgcatgtatacatatatacacaagtacatatgtttcctagctctgtgtcctgaaagagcctgagagcagtgataacacaatagcaatgaacacacttagtgtccagatcttggtttccaaataccagtgaacattcagtttctaaacaccacttactaaaaggagtccaagctctttagagaaatggctaattttagggataggttgggaaaagaacaggaagatcctggaaatttgtgttacaccataaagtaaggaaatactcaaagagtggtgggaacttgtctaaagaatagggaagctagcttgaaagagctccaattagtcaaatctgcaataatttttgagcatctaaatatrtcgtgagagtagcagattataacacattgaaaaaacaggaccccatgaatccgcatggttattcatagataaataaatgagaaagctctttcttatcatagaaagccaactcataataattatgaaagaaatgatggtagtgaagaatcaccttttggcaaccattagaataagtattcagaaaagaaacaccaatgatgctaatggatgaacatagaatgaaaaatcgtttttcacatgatctctcagtatcctccctcaaaacatgcattgattacagtggagaaacctggcagacactgtcttaatcaagggattacagttaacaccaccagtaatatcgtgtgcccctcaaaa

SEQ ID NO: 75655 - DNA, 1788 bp, Homo sapiens
gaactgaatgattatacaaggtttcttgggattccaagttctatcattgtcaatacattttattattctaatctaacatgtggtgggggggttttcttgggagtgttcaacttaacttctgaatgagataaatccccagatcctgagacactctttgattggagagtatcactcaaattcctatggaaacatcacagtggggatggagcaggttatgcaaatgacaaagaaacagaggagtagagatcatttgatttagttgctccatagcctgaaggaaaaagcatatatcattctttatatttctctcaaattttgtcactagaaacaatagtttctattgggacatatttctctcaaattatgtcactagaaacaatagaaaaaattgtacttctgaaatattatagtttatccaagctttatgtttttattcaaaactgaaatgagccctcaaagaactaaaaacagaactaccatttgatccagcaattccattactgggtatacacccaaagaaacataaatcattctaccaaaaagacgcatgcattcctatgtttatcacagcactgttctcaatagcaaagacatggaatcaaaccaggtgcttatcagtggtggattggataaagaaaatgtggttcttacaccccatggaatactatgcaatcataaaaaagaacaaaactatgtcctttgcagcaacatggatgcagctgaaggtcattatcttaagcaaattaacataggaacagaaaaccaaataccacacrttctcacttacaagtggaaactaaacgttgggtactcatggacataaagatggcaacaatagacactggagaccaccagagggaggaggaggaaagggaaaagaggggcaggggttgaaaaactaactgctgggtactatgcacactcctgagtgatgggatcacttgcacccatacctcagcatcatgcaatatacccatgtaacaaacctgcacatgtacccctgaatttaaaaataaaagttaaaatttttaaaaaaagaaaactaaaatgagcaataggccaaagagaggactgcatgattccagtagtttttgtcacggagctttaaggcaactaaagctgtgagttaggtagagcaattgaacatctttagtgggcaaattagaaaggaaaaatggtagaggaaagaagatggccatttttttttttaatccaaacatattttccatccttacagaggtaatccatgggcaaaggaagaattatccccttctaaaaccctcaaatgctggctcatagtatataactttgaatgtatacatgggtgtggggttaaaaaaaaaaaacagacaaagcattgtatctttgggtggctaacacaacccagccccagtggcttgtgcttatgaggcatatttcttaggaggctggctgagcttcatccatgactatacaggaggccaggtgctaaaacctagataggtacagtattggatctaaaggcaagtggaggttgggcgcagtgactcacgtctgtaatcctagcactttgggaggccaaggtgggtggattgcctgaggtcaggggttcgagcccagcctggccaacatggtgaaaccccgtctctactaaaaatacaaaaattagccgggcattgtggtgcatgcctgtagtcacagccacttgggagactgaggcaggagaatcgctggaacccaggaggcagaggttgcagtgagccgagatcatgccactgcactccagcctgggccggacacctgagggag

SEQ ID NO: 75656 - DNA, 1788 bp, Homo sapiens
gaactgaatgattatacaaggtttcttgggattccaagttctatcattgtcaatacattttattattctaatctaacatgtggtgggggggttttcttgggagtgttcaacttaacttctgaatgagataaatccccagatcctgagacactctttgattggagagtatcactcaaattcctatggaaacatcacagtggggatggagcaggttatgcaaatgacaaagaaacagaggagtagagatcatttgatttagttgctccatagcctgaaggaaaaagcatatatcattctttatatttctctcaaattttgtcactagaaacaatagtttctattgggacatatttctctcaaattatgtcactagaaacaatagaaaaaattgtacttctgaaatattatagtttatccaagctttatgtttttattcaaaactgaaatgagccctcaaagaactaaaaacagaactaccatttgatccagcaattccattactgggtatacacccaaagaaacataaatcattctaccaaaaagacgcatgcattcctatgtttatcacagcactgttctcaatagcaaagacatggaatcaaaccaggtgcttatcagtggtggattggataaagaaaatgtggttcttacaccccatggaatactatgcaatcataaaaaagaacaaaactatgtcctttgcagcaacatggatgcagctgaaggtcattatcttaagcaaattaacataggaacagaaaaccaaataccacacattctcacttacaagtggaaactaaacgttgggtactcatggacataaagatggcaacaatagacactggagaccaccagagggaggaggaggaaagggaaaagaggggcaggggttgaaaaactaactgctgggtactatgcwcactcctgagtgatgggatcacttgcacccatacctcagcatcatgcaatatacccatgtaacaaacctgcacatgtacccctgaatttaaaaataaaagttaaaatttttaaaaaaagaaaactaaaatgagcaataggccaaagagaggactgcatgattccagtagtttttgtcacggagctttaaggcaactaaagctgtgagttaggtagagcaattgaacatctttagtgggcaaattagaaaggaaaaatggtagaggaaagaagatggccatttttttttttaatccaaacatattttccatccttacagaggtaatccatgggcaaaggaagaattatccccttctaaaaccctcaaatgctggctcatagtatataactttgaatgtatacatgggtgtggggttaaaaaaaaaaaacagacaaagcattgtatctttgggtggctaacacaacccagccccagtggcttgtgcttatgaggcatatttcttaggaggctggctgagcttcatccatgactatacaggaggccaggtgctaaaacctagataggtacagtattggatctaaaggcaagtggaggttgggcgcagtgactcacgtctgtaatcctagcactttgggaggccaaggtgggtggattgcctgaggtcaggggttcgagcccagcctggccaacatggtgaaaccccgtctctactaaaaatacaaaaattagccgggcattgtggtgcatgcctgtagtcacagccacttgggagactgaggcaggagaatcgctggaacccaggaggcagaggttgcagtgagccgagatcatgccactgcactccagcctgggccggacacctgagggag

SEQ ID NO: 75657 - DNA, 1249 bp, Homo sapiens
ccgtcagtcccgatgaggacttttctaaagtggggctcagcttggkagttgctgcagggcctgaggttgtgcctcctactctgaaagagttctgggcctggacacctgaggtcttacctgcctgcaattccagcctcctgctttgtaaactcaagccggagctttcacctggggctgttgtacctggagtctgagggcccctccttggggcagcagggagggtgtggctgagaaaaaccagtggaaatggacgcgcacagcctcttcaggagcctccacttctcctgtaactgggactgtgagccccagggagggacccttgagaatcttcttgcctccacatgacctccagcaaagttcttgaccctgtccgtttctatagactggggaatttgtggaagaaagggaaggagaggggagaagggaggatcgctccagacaaaggcgggtcttttccatctctggagtcccccaccccttgccattcacctgggcaccgggagaatgaatcacttgttgagaggctgtaagcatattgagtgcagggcttggagcctgcagccccccagggctaagtgacctttgtgacttggccactgcacctaacctcccacccaaaatgagaggcctgtcattctctcatggtcagaggatatctagggtgtatttgtttctttccgcgtgaataatcatctgagggcctgctgccacatccaagcctggactggccacaagggctgcctccgggagcttctaggataatggggaggaagaggcgtgactggacagtccagttagtccgtgttgtgacagggcttgtgatggaggtgagcatcgagtgctgcagggcatagaaagggtccccaacccagcgtggggtggggtggggggatacaaacccttggaagaggtctgggttgtttgattgcatcctcctgggactgaacatgggcctttgcagaatgacccagtccttgttcccagggtggggacagagccacccgctagtcacaataataacgtcaggagctgcagcgcagtagtgagactctcaccgagcattttccttttgattggcattagtgcacactcttgctatttattccctcagtagatctcagaagtccaatgagccagctccgattcattacgattcacatttcacagatcagaagcttgaagctcagaggagtgaagccgcttgccttagcccacacagctagtgggtaggggagcccttgaccccaca

SEQ ID NO: 75658 - DNA, 760 bp, Homo sapiens
gtgaagctgggctaggacatttggatatgccattgagagcgctcaggccctgggtgggctttgggagagtgggtgcttcctgatcttaaggtgtttcctgatcttgaggtttggaggttctcttgaggtaagagcctggggtctgctccatgcattgcaaactccagggtaagaggagatcaatccagggtctttaaagagaaaatttaagaaggttaagaacaaagaaaaaatagtgctttcagaagtatcagccagaagttatgatttttatataagttcccctagtaagttttattgcaagrccccatagtaatttgtttaaaatcaaaagagaacagagataataagattttaaaaagagaagtctctagcttctgagcagcttgttttaatgtcatggttgggagcctaggctctgccactgtgtgatcttgggcaagtttcttaatatctctgctcctcaactttttcatctttaaaatgggtataaatatattaaaataagttagatgttaaaaaataatatcgacatagactacaagagtcactacatgtcaagttcttagaacagtgcctggcacaaaataggccatcaatgaatgttagttattacctaatgtatgataagctttgactttgtcaatagaaaaactaaaataccagtggtttgaactgcatgacattttatttatctctcatgaaaaataattcagcaaatagacaggcgggactagactggtggttccatggctgtctg

SEQ ID NO: 75659 - DNA, 1405 bp, Homo sapiens
gatcccggagaggacagagctgaaggcgcggcggggcttagcactgaggaccttctccgcggccccgctcctcctccttattttcttctctttggacttgtttggacggttgcacacttttccccctcctgattccctaagttttttgtctctcccctcgctgcccgttagctgtactcccccagctcccgtccctactgggcgctgcaggctacccagcggcacgcgaaccgcacgcgcggacaacaaaagcctctttcatgactcactgccctcgagcaatgccccaaatctgccgcctcccgggtccccgctctgagcgcgcggcgcgggccgggcgtcccggccgttacagcggcagccggagcgcccgcgggaaggggggcgggaggaggcgtgtggccaggggtggggagaggggagtgtggcctgggccgggcggaggggaagggggaggcatgtgggaggatgggggtggggaagggatggaggcgtgtggcccggacgtagggggtgggaagcgtgtggctggaggcgaaagcggggagcgggaggtcgggggcgaagcattcacagggccaagataaagcgcaggggccgggccggcgtccctggcggtgacctgtttctcagggaaacagatgctcgctcttgcaaagggaggtttgcgttcaatgaaaggatcaagtgtggccagggcagcccggccgacctcgagaggttcccgcgtcctctccccgccctgcctaggagtggggtgtcggggcctgggcgcgggagagcggagtgagggggccgggtggctgaggggcccgcgagaccgtggggctcaggggccgcaggaacggagggctgagagctgcaggtcctgcacaggctgggtagctcggaggctcttgagagcttcgggggatgaaggggggttgatgcsggttctgaccagaccgccgacgcggcgcctccgccccgggggaggcagttgggctcccgggtcctggcctgaggctggagctgcccaggctcgacaggcaggcgacccgggagagccaagagcaacgagagacgctattaaaatgcctcgccgtcgccccgagcgcaaaacccatcctccccaaatctcctgggcttgcggcataatcttaattaagataattgattcatattgcacctgcgagaacggaaaaaattgatttcaacccccaaccccacaaatcgcttagagctattggatggagcacgacgcgactgtgatttagggagtgatttagtgccgggcttccccagctcggcctgcctgggcctttttatttattatttatgccctcccggtcccgacggggctttggtggctcctttgtcggctcccacaggccttggaaggacttgtctctgattccctgtcagg

SEQ ID NO: 75660 - DNA, 2256 bp, Homo sapiens
tgttaggtgtttatggttaaaaatatcgcacaattaaaggcaggctaccttgccactaggtaaattagtcatgcaataggtttaatctacttagaaatagcactgtgaggaagaaaataaaattaattcagctgatagtgtcagatcatggaaagaaaagaaaaaaacagcttactcttgccaaaaacatattgctaactttgttcaggttgcagcttttgtgtttcatttaggtttcagcttgtcccaggaggtgttgctatactgtgaaggtgttaggcagtgtagtaatggaacaggagataaaatggaaggcacataaaatgtctcatcatttggaccttcctggagaaacatagcttgaatttctgagtggtcagcttgacattttaaagcagtgagaagttgtgtcattatttctagaatactacagtagttagaggaaaaagatttaaagttcattgcggtaattgctgtcaggtgcttttagtaagcatgtgctgccttgaacaaaggcaacctgctaggagtgtgaaagaagacagtgggctttggaagatgagagtgacaaaaacgtagattcgggaattcttgtgctcctgaaataattgcattcattttaaaggtggaagaagattaaaataacttttaatggttattcatatgtttatagcctttgagaaaacaaagactttaggcttctaaaactaataccttacataatttcagtaacaaagagtacaaaacctggtggctagcttgtcacagggatcaaggtagctggtatcactaggctaggcacaatccatgtgaagtgctgaggtgatccctactgtaacagcattcccctccctggaaacctgcaatttgcctcttagtcccagatggggaggaaactcccaaacagccgcaagccatacataatggcagggttcacatcctgacggggacaaagtagagaaaaagagaaattcagaagagtcttcataacattatttgagtcaaggactttatgctttttgtgaaggttgtagcacttcttttttctttttaaagttttgagtatgttgtgtgtgtgtgtgtgtgtgtgtgtgtgtgtgtgttttctccctcctggatactagccaacattcaactgaaggaaacacatggggatggcacatttatcacattgcactatcttttgcttaagtagctaacatttattgcttaataaagaacatcctgcacacataccaactaggtttccagtatattactatgcatatgtataaatgtacattcacatttaaacatrcttttacctatgaccctcagaaacacctgaacacatagaattaggcatgcccagacgtttcaaatatgtgatctaaaaggtagatctttaccccagattttgtataaataaatttatactattacttataatagtgaccaataactattaccaattacacaaattgttatttatggaaaacttaaagaatagtctggttgtattctgtaatcatagatagataccatagattgaagggaccttaagatccttaacctcaggcaggtaggcttttaagcattttacctgcacaaatcggtagcattacctttatttcacagaaaaggaagctaagccccttagaaggtaacttgtacaattccaggtgacatagatgtgatcttcagtgctaaatcaccagttaatagaagaaataaaacccagtttgtataaattttgatctacttacctgaccagaaagcatcaagtattctaaaagaagtatttttaaatggataaggaactctcttacatctgattaatgtaatatcatacatacacaagtgttaaaagaaagccatttatatgccctttaactataccttatatgtctgtctactttgctttctatggtgcatagtcatcactttaatatgtttcacatactttagttatgagctttagaaagctgtttaaatggtgatttagaaatggagataactcattgaataaccaagacttcagttcacaaatacaaggatggcatgcttaaagtaactacttacaatgagaagttatctttttgaattagtgatcttatgagaatatttgttgattatttatgctctatattttgcactgaggttttatagtagctgaatattctggcatggtggtgtggggcttatgaatccttgtattgctcattaaatattttacagtgcatagttgcttatatatataaaaagacagacacatat

SEQ ID NO: 75661 - DNA, 2256 bp, Homo sapiens
tgttaggtgtttatggttaaaaatatcgcacaattaaaggcaggctaccttgccactaggtaaattagtcatgcaataggtttaatctacttagaaatagcactgtgaggaagaaaataaaattaattcagctgatagtgtcagatcatggaaagaaaagaaaaaaacagcttactcttgccaaaaacatattgctaactttgttcaggttgcagcttttgtgtttcatttaggtttcagcttgtcccaggaggtgttgctatactgtgaaggtgttaggcagtgtagtaatggaacaggagataaaatggaaggcacataaaatgtctcatcatttggaccttcctggagaaacatagcttgaatttctgagtggtcagcttgacattttaaagcagtgagaagttgtgtcattatttctagaatactacagtagttagaggaaaaagatttaaagttcattgcggtaattgctgtcaggtgcttttagtaagcatgtgctgccttgaacaaaggcaacctgctaggagtgtgaaagaagacagtgggctttggaagatgagagtgacaaaaacgtagattcgggaattcttgtgctcctgaaataattgcattcattttaaaggtggaagaagattaaaataacttttaatggttattcatatgtttatagcctttgagaaaacaaagactttaggcttctaaaactaataccttacataatttcagtaacaaagagtacaaaacctggtggctagcttgtcacagggatcaaggtagctggtatcactaggctaggcacaatccatgtgaagtgctgaggtgatccctactgtaacagcattcccctccctggaaacctgcaatttgcctcttagtcccagatggggaggaaactcccaaacagccgcaagccatacataatggcagggttcacatcctgacggggacaaagtagagaaaaagagaaattcagaagagtcttcataacattatttgagtcaaggactttatgctttttgtgaaggttgtagcacttcttttttctttttaaagttttgagtatgttgtgtgtgtgtgtgtgtgtgtgtgtgtgtgtgtgttttctccctcctggatactagccaacattcaactgaaggaaacacatggggatggcacatttatcacattgcactatcttttgcttaagtagctaacatttattgcttaataaagaacatcctgcacacataccaactaggtttccagtatattactatgcatatgtataaatgtacattcacatttaaacatgcttttacctatgaccctcagaaacacctgaacacatagaattaggcatgcccagacgtttcaaatatgtgatctaaaaggtagatctttaccccagattttgtataaataaatttatactattacttataatagtgaccaataactattaccaaytacacaaattgttatttatggaaaacttaaagaatagtctggttgtattctgtaatcatagatagataccatagattgaagggaccttaagatccttaacctcaggcaggtaggcttttaagcattttacctgcacaaatcggtagcattacctttatttcacagaaaaggaagctaagccccttagaaggtaacttgtacaattccaggtgacatagatgtgatcttcagtgctaaatcaccagttaatagaagaaataaaacccagtttgtataaattttgatctacttacctgaccagaaagcatcaagtattctaaaagaagtatttttaaatggataaggaactctcttacatctgattaatgtaatatcatacatacacaagtgttaaaagaaagccatttatatgccctttaactataccttatatgtctgtctactttgctttctatggtgcatagtcatcactttaatatgtttcacatactttagttatgagctttagaaagctgtttaaatggtgatttagaaatggagataactcattgaataaccaagacttcagttcacaaatacaaggatggcatgcttaaagtaactacttacaatgagaagttatctttttgaattagtgatcttatgagaatatttgttgattatttatgctctatattttgcactgaggttttatagtagctgaatattctggcatggtggtgtggggcttatgaatccttgtattgctcattaaatattttacagtgcatagttgcttatatatataaaaagacagacacatat

SEQ ID NO: 75662 - DNA, 807 bp, Homo sapiens
tcctccacagtcagaatgcagagaagaatgtggtatgggttctcatggggcatgggagctggacacccctccctttgcaagaccagacaacgaaaggtatggcctgatggtcgtagctttttttccagggagtatcctggcacagaatgcctggagyagctcaacaatgtgggagcagatggcttggggaaagcctagttggttgggcttgccgccagggcgagtgtctgtgggagatctgctgggttaggggagtgtgagctaggcagacaccatggttgccagctgggctgaaaatcacgggctgcaagctccatactggtgttgcacccattgtggcactgccctgcctggagatcctctacccttgaaatactgcattttctttgtctctacacttgaaatactgtattttctttgtctcatgttgtgttttgagacagtacaactcatacctaagttgtgtatcacagcaactgcggacataccctaaaacctgctctgactttggtaagcacagtagactggtgggtctctggagagttgtgtccctagagatgtaatcctcagtgtggaccactcctgagggaaggggagtgcagcctgccaaagcacaccatgagataaagaaaatgtggccatggcatcagccactaaaagggtcaccaccaaggcccagaaccagacttggagaaggaatcatgtcttgcctccatctccacttcccagtgcactgttgcggatgcagcagtagctcttcccataaggtcctagaaagtgtgcactgaaagaagttgtttctcatga

SEQ ID NO: 75663 - DNA, 807 bp, Homo sapiens
tcctccacagtcagaatgcagagaagaatgtggtatgggttctcatggggcatgggagctggacacccctccctttgcaagaccagacaacgaaaggtatggcctgatggtcgtagctttttttccagggagtatcctggcacagaatgcctggagtagctcaacaatgtgggagcagatggcttggggaaagcctagttggttgggcttgccgccagggcgagtgtctgtgggagatctgctgggttaggggagtgtgagctaggcagacaccatggttgcmagctgggctgaaaatcacgggctgcaagctccatactggtgttgcacccattgtggcactgccctgcctggagatcctctacccttgaaatactgcattttctttgtctctacacttgaaatactgtattttctttgtctcatgttgtgttttgagacagtacaactcatacctaagttgtgtatcacagcaactgcggacataccctaaaacctgctctgactttggtaagcacagtagactggtgggtctctggagagttgtgtccctagagatgtaatcctcagtgtggaccactcctgagggaaggggagtgcagcctgccaaagcacaccatgagataaagaaaatgtggccatggcatcagccactaaaagggtcaccaccaaggcccagaaccagacttggagaaggaatcatgtcttgcctccatctccacttcccagtgcactgttgcggatgcagcagtagctcttcccataaggtcctagaaagtgtgcactgaaagaagttgtttctcatga

SEQ ID NO: 75664 - DNA, 807 bp, Homo sapiens
tcctccacagtcagaatgcagagaagaatgtggtatgggttctcatggggcatgggagctggacacccctccctttgcaagaccagacaacgaaaggtatggcctgatggtcgtagctttttttccagggagtatcctggcacagaatgcctggagtagctcaacaatgtgggagcagatggcttggggaaagcctagttggttgggcttgccgccagggcgagtgtctgtgggagatctgctgggttaggggagtgtgagctaggcagacaccatggttgccagctgggctgaaaatcacgggctgcaagctccatactggtgttgcacccattgtggcactgccctgcctggagatcctctrcccttgaaatactgcattttctttgtctctacacttgaaatactgtattttctttgtctcatgttgtgttttgagacagtacaactcatacctaagttgtgtatcacagcaactgcggacataccctaaaacctgctctgactttggtaagcacagtagactggtgggtctctggagagttgtgtccctagagatgtaatcctcagtgtggaccactcctgagggaaggggagtgcagcctgccaaagcacaccatgagataaagaaaatgtggccatggcatcagccactaaaagggtcaccaccaaggcccagaaccagacttggagaaggaatcatgtcttgcctccatctccacttcccagtgcactgttgcggatgcagcagtagctcttcccataaggtcctagaaagtgtgcactgaaagaagttgtttctcatga

SEQ ID NO: 75665 - DNA, 807 bp, Homo sapiens
tcctccacagtcagaatgcagagaagaatgtggtatgggttctcatggggcatgggagctggacacccctccctttgcaagaccagacaacgaaaggtatggcctgatggtcgtagctttttttccagggagtatcctggcacagaatgcctggagtagctcaacaatgtgggagcagatggcttggggaaagcctagttggttgggcttgccgccagggcgagtgtctgtgggagatctgctgggttaggggagtgtgagctaggcagacaccatggttgccagctgggctgaaaatcacgggctgcaagctccatactggtgttgcacccattgtggcactgccctgcctggagatcctctacccttgaaatactrcattttctttgtctctacacttgaaatactgtattttctttgtctcatgttgtgttttgagacagtacaactcatacctaagttgtgtatcacagcaactgcggacataccctaaaacctgctctgactttggtaagcacagtagactggtgggtctctggagagttgtgtccctagagatgtaatcctcagtgtggaccactcctgagggaaggggagtgcagcctgccaaagcacaccatgagataaagaaaatgtggccatggcatcagccactaaaagggtcaccaccaaggcccagaaccagacttggagaaggaatcatgtcttgcctccatctccacttcccagtgcactgttgcggatgcagcagtagctcttcccataaggtcctagaaagtgtgcactgaaagaagttgtttctcatga

SEQ ID NO: 75666 - DNA, 773 bp, Homo sapiens
gggatccattttctaaaattgagtatatagatacttcatgaaatgtcttatcatacatsctaaaccaaaccaacctcttcccttgactgtcttacagtgcgttattattttatccactgcagcaactagcacatttttcagaacctagtagatattcagtcattgtctatggaatacatgaacacattctaaatttggacagtcatcattcttggtgttttaaaacaaacacttcctgaattgcacaaactattttctaaatagccctgggaattcattgaaggaaggtatgggtaagttgggggtcaaactataaagatgtaggttctcctctcaaaacttcttcagcgtatcctcattgttgtttgtttgcttgcttgcttgttttgaaagatctagatatagtctaatgagagttgtataaatgtgatgttccacaatgattctaacttacatggtgcaaaataataaaatattacattctagctgtttgtggaaaatcagggataatataaaggatctagattttctctctcctctcctcctaagatttattcactcagcaaagttacctggtgactacttactgctagacactgttttagatacttgggctataacgttgataagaacagggcttgaattagtgaaaagtttattttaattagctgtatggcaaaataggaaactaacaaaaataaacatataacatgtcagatggcaatggctgcactgagaaaaatgaaggagaataagaagttctaaattattat

SEQ ID NO: 75667 - DNA, 773 bp, Homo sapiens
gggatccattttctaaaattgagtatatagatacttcatgaaatgtcttatcatacatcctaaaccaaaccaacctcttcccttgactgtcttacagtgcgttattattttatccactgcagcaactagcacatttttcagaacctagtagatattcagtcattgtctatggaatacatgaacacattctaaatttggacagtcatcattcttggtgttttaaaacaaacacttcctgaattgcacaaactattttctaaatagccctgggaattcattgaaggaaggtatgggtaagttgggggtcaaactataaagatgtaggttctcctctcaaaacttcttcagcgtatcctcattgttgtttgtttgcttgcttgcttgttttgaaagatctagatatagtctaatgagagttgtataaatgtgaygttccacaatgattctaacttacatggtgcaaaataataaaatattacattctagctgtttgtggaaaatcagggataatataaaggatctagattttctctctcctctcctcctaagatttattcactcagcaaagttacctggtgactacttactgctagacactgttttagatacttgggctataacgttgataagaacagggcttgaattagtgaaaagtttattttaattagctgtatggcaaaataggaaactaacaaaaataaacatataacatgtcagatggcaatggctgcactgagaaaaatgaaggagaataagaagttctaaattattat

SEQ ID NO: 75668 - DNA, 1647 bp, Homo sapiens
aagtattgtatatctcatacatcttcattttagaatattgtaggggtacagatcagtataaataaaatactttggtaagtgcccaccacatcatctgtttgtcatccttagagccagattataccattctcattaagaaagaaaacttactactgtacctcctacccagtaacatatatatgatatatatatatcatatatatatattttatatataatatattatatatatatataaaacatttgctactggttaggagtaacactcagaaaatcatacttaataatgtagtacaattgggtataaattcacytagtatttttaaattttatgtatattcatatttatatgaatcatcatttaaaatcatgtctactgatcctgatggcattaaaggcataagaggtaccgaggatattaatttaattttgtttacagctatgcacagatatttttagttcactcagatttaatccagtagtctattatttgattaattgtacagctatcaaatcattcaggactcccactgtttcaacaagagtggaaaaatattttttcatttatgtttatatgcagctatttgtagtctaaattaatattctggcaattgatggtgaaattaaaattatttctgtcagatatggtaatttgatgacagtggataagcatgggagtaagagaaagttttgaggaagaggggtactttttgtttacttaatgattattcaaaagatgttaagtaaacattctatagaatgctacagatagtggaatacaacattgaaacaatttaataatgcagtcaatgaatccagtttttaaaaatgggatccgttttctaaaactgagcatacagacacttcatgagatgctttatcacgcatcctaaaccaaaccaactccttcccttgactgtcttacagtgcatagggtatctctacattctaggaaaggaattatctgtttatatgccacttataaaatcatacttaataatatagtacacttaggcataatttcacttagcatttttaaatgtaaaatgttaacgaaaagtgttcttgaaaaatatttctgagaatattttctaaaaaatgaacaaatcgtaacacctaagggatgatatctttctagtgaattgattatcagagtataatgtggtatgttctgattatgttacataatattctgattagcagaacattttaaataagtgaatttagcaaaatatttagaggttaaggaaactgttttacactgactatgttttctgacccaaatgtgagaaagaacccaataaaaagaggcagccagataatgctgttgtttgtgaacttaaacagaagcttgcatgtaatttattgttcaaagaaaaataaaaatagaagttatactttatttagaacttaatgacagtgaaaattacataaaaaggaagactactgaatacagcaaaagctgaaattatataggaaatataaatataaacacacaaaataagtgtaaattataatgaagtaaaaatatatcaaagagaaaaaaggaagtagtacagtaaaaaaaaaaaggtgatgctttaaaaactgtaattaaatagacaaatttccagccagattgatgaccaagtaaagagaaaaggaagg

SEQ ID NO: 75669 - DNA, 1647 bp, Homo sapiens
aagtattgtatatctcatacatcttcattttagaatattgtaggggtacagatcagtataaataaaatactttggtaagtgcccaccacatcatctgtttgtcatccttagagccagattataccattctcattaagaaagaaaacttactactgtacctcctacccagtaacatatatatgatatatatatatcatatatatatattttatatataatatattatatatatatataaaacatttgctactggttaggagtaacactcagaaaatcatacttaataatgtagtacaattgggtataaattcacctagtatttttaaattttatgtatattcatatttatatgaatcatcatttaaaatcatgtctactgatcctgatggcattaaaggcataagaggtaccgaggatattaatttaattttgtttacagctatgcacagatatttttagttcactcagatttaatccagtagtctattatttgattaattgtacagctatcaaatcattcaggactcccactgtttcaacaagagtggaaaaatattttttcatttatgtttatatgcagctatttgtagtctaaattaatattctggcaattgatggtgaaattaaaattatttctgtcagatatggtaatttgatgacagtggataagcatgggagtaagagaaagttttgaggaagaggggtactttttgtttacttaatgattattcaaaagatgttaagtaaacattctatagaatgctacagatagtggaatacaacattgaaacaatttaataatgcagtcaatgaatccagtttttaaaaatgggatccgttttctaaaactgagcatacagacacttcatgagatgctttatcacgcatcctaaaccaaaccaactccttcccttgactgtcttacagtgcatagggtatctctacattctaggaaaggaattatctgtttatatgccacttataaaatcatacttaataatatagtacacttaggcataatttcacttagcatttttaaatgtaaaatgttaacgaaaagtgttcttgaaaaatatttctgagaatattttctaaaaaatgaacaaatcgtaacacctaagggatgatatctttctagtgaattgattatcagagtataatgtggtatgttctgattatgttacataatattctgattagcagaacattttaaataagtgaatttagcaaaatatttagaggttaaggaaactgttttacactgactatgttttctgacccaaatgtgagaaagaacccaataaaaagaggcagccagataatgctgttgtttgtgaacttaaacagaagcttgcatgtaatttattgttcaaagaaaaataaaaatagaagttatactttatttagaacttamtgacagtgaaaattacataaaaaggaagactactgaatacagcaaaagctgaaattatataggaaatataaatataaacacacaaaataagtgtaaattataatgaagtaaaaatatatcaaagagaaaaaaggaagtagtacagtaaaaaaaaaaaggtgatgctttaaaaactgtaattaaatagacaaatttccagccagattgatgaccaagtaaagagaaaaggaagg

SEQ ID NO: 75670 - DNA, 739 bp, Homo sapiens
atgtaatgaacctgcacttgtacccctaaacttaaaagttaaaaatgaatgaagcctgtcagaaccacccactttgtagtcttacattttccctagtattcccaaacccctttgcctagtcaacattttacaaagcgcttttcatcttctactgtgttataatttatatatttttagtgtatattttacacactttattagaatatgagttccttcaaggtaaggactgttgtttgttttgtgctccctgatgtattttcagagcctagaacagggcctggaataaaataagcagccaacactatgcgatgaaaattttttggtgggtataaatgcctttgattcgaaacaaaactcartttaattgtgtgtgtgtgtgtgtgtgtgtgtgtgtgtgtgtgtgtgtctaaagtcaccctaagcacactgttaataaccctagaatgactgacgtgttcgtattatgcaattttttatttttttcatcatattgacagataaaggattctaattcctataccttttcaataatgcagaagccttcataacatttaaattccattcatggtaaagattcttagcaaataaagaataaattgaaccttgatcaattactttaaagtagttataaaagacctatagtgaatatcatacttcagtattagaagctttctctttaaaataaggaacaagacaaataattggcaacatgacttcttttcaaattgcacagcattag

SEQ ID NO: 75671 - DNA, 739 bp, Homo sapiens
atgtaatgaacctgcacttgtacccctaaacttaaaagttaaaaatgaatgaagcctgtcagaaccacccactttgtagtcttacattttccctagtattcccaaacccctttgcctagtcaacattttacaaagcgcttttcatcttctactgtgttataatttatatatttttagtgtatattttacacactttattagaatatgagttccttcaaggtaaggactgttgtttgttttgtgctccctgatgtattttcagagcctagaacagggcctggaataaaataagcagccaacactatgcgatgaaaattttttggtgggtataaatgcctttgattcgaaacaaaactcagtttaattgtgtgtgtgtgtgtgtgtgtgtgtgtgtgtgtgtgtgtgtctaaagtcaccctaagcacactgttaataaccctagaatgactgacgtgttcgtattatgcaattttttatttttttcatcatattgacagataaaggattctaattcctataccttttcaataatgcagaagccttcataacatttaaattccattcatggtaaagattcttagcaaataaagaataaattgaaccttgatcaattactttaaagtagttataaaagacctatagtgaatatcatacttcagtattagaagctttctctttaaaataargaacaagacaaataattggcaacatgacttcttttcaaattgcacagcattag

SEQ ID NO: 75672 - DNA, 797 bp, Homo sapiens
attaagtacatacttagcataattgaaaggtgtccacctgaaagcaacagtaatcacacacacacagacacacacatgagtcaatctgtcaaaattacacaccaagcttttaattaattcatcaattatacatcagtgtttctggattattagaattattttgacacattaaaaagtaaacactcctaatttaactcatattatttttgataaaggcattgtggtatgccatcatttcataatatacactgaaacatattcaaataaaatgaaactatatctgagacatgcttcaagtaatttgggaagaaaggatgggagaagatatagttggtgcaagtatgcctatgaattggtaattgttgaaactggrtgataaattcatagtgtggtcatgatggtcttctgtttttttgtatatatttgaaaattgctatataaacatttttgaaatacaaattcttaggccacattccagtcatattgaattagaataccctggagttgaagcttcaagtgagaggtgaagccagctgagcttctgggccggatggggatttggagaacttttgtgtctagctaaaggattgtaaatgcaccaatcagcactctgtaaaatcacaccaatcagcatgctgcaaaatggaccaataagtgctctgtaaaatggaccaatcaattctctgtaaaatggaccaatcagcactctgtaaaatgggccaatcagcaggatgtgggcggggccaaataagggaataaaagctggccaccagagccagcagcgtcaacctgctcgg

SEQ ID NO: 75673 - DNA, 797 bp, Homo sapiens
attaagtacatacttagcataattgaaaggtgtccacctgaaagcaacagtaatcacacacacacagacacacacatgagtcaatctgtcaaaattacacaccaagcttttaattaattcatcaattatacatcagtgtttctggattattagaattattttgacacattaaaaagtaaacactcctaatttaactcatattatttttgataaaggcattgtggtatgccatcatttcataatatacactgaaacatattcaaataaaatgaaactatatctgagacatgcttcaagtaatttgggaagaaaggatgggagaagatatagttggtgcaagtatgcctatgaattggtaattgttgaaactgggtgataaattcatagtgtggtcatgatggtcttctgtttttttgtatatatttgaaaattgctatataaacatttttgaaatacaaattcttaggccacattccagtcatattgaattagaataccctggagttgaagcttcaagtgagaggtgaagccagctgagcttctgggcyggatggggatttggagaacttttgtgtctagctaaaggattgtaaatgcaccaatcagcactctgtaaaatcacaccaatcagcatgctgcaaaatggaccaataagtgctctgtaaaatggaccaatcaattctctgtaaaatggaccaatcagcactctgtaaaatgggccaatcagcaggatgtgggcggggccaaataagggaataaaagctggccaccagagccagcagcgtcaacctgctcgg

SEQ ID NO: 75674 - DNA, 1198 bp, Homo sapiens
ttttaatttattccatataagtaaatattaattgagcattttatatttgagccatcatcctaacagtttgtgataagatagcaaatgatatagggaaagtctctgttttcagatgtttttatattttgaaggaagtagacaaatattaatcaattaagtgaatatgcaagaaatttccacatagtaaactaatctgcagaaaacaaagtcatgaattatctaattcttgagggaacctattacagactgtgttattagggaagcmttttttaaggaggcatatatgagggaaaatctaaataactaaaggagccagccataggaaaatagcagaagagaatattctggaaaaaaaaaatggcacacaaagacatttcacctcagccaaagaatatgggatgataaaggacagaaaaaagaccaggaagcaggaggaagagaggtagtagaagcagatgggatgaggcaaatgagacaagatagtgtaggaccttacaggtcatggtagaggaagacacttagatatgattacttaataagaagctatcatagcactgaagcatggaagagatgtgatctaatgtctatttttcaatgccattctgaccagatttcgggcaaacctggtagacacccatagtaagactccaggaaaaaaaaaatttgatggtttgattatatatttgctttaaacatttggcttttcagctgccttgcatccatttccctttaacaatttatctgtttttaaattaatgaccttttctattagacacactttcatcaggggccctgtattgattggtatcttccagagaaacagaaccaataaaatgtgtgcgtatgtatgtatatgtgtatgtttctcagagagagagagcgagagaaagataatttaaggaactggctcatgtgattgtggagttgggcaagttcaaaatctgtaggacaggccagcaggctggagacatagggaggaattgtcatagtttgtgtccaaaaatagtttgccagaatcctcagttttttgagggaggtcagtctttttacttaaagccttcaactgactggatgcagccaaccgatatcatagatccaaagtccagtgatttaatgttaatatcatctgaaagcataccttcacatcaatatctagatatatttgacagatatctgggtaccatgtcttagccaagtt

SEQ ID NO: 75675 - DNA, 1198 bp, Homo sapiens
ttttaatttattccatataagtaaatattaattgagcattttatatttgagccatcatcctaacagtttgtgataagatagcaaatgatatagggaaagtctctgttttcagatgtttttatattttgaaggaagtagacaaatattaatcaattaagtgaatatgcaagaaatttccacatagtaaactaatctgcagaaaacaaagtcatgaattatctaattcttgagggaacctattacagactgtgttattagggaagccttttttaaggaggcatatatgagggaaaatctaaataactaaaggagccagccataggaaaatagcagaagagaatattctggaaaaaaaaaatggcacacaaagacatttcacctcarccaaagaatatgggatgataaaggacagaaaaaagaccaggaagcaggaggaagagaggtagtagaagcagatgggatgaggcaaatgagacaagatagtgtaggaccttacaggtcatggtagaggaagacacttagatatgattacttaataagaagctatcatagcactgaagcatggaagagatgtgatctaatgtctatttttcaatgccattctgaccagatttcgggcaaacctggtagacacccatagtaagactccaggaaaaaaaaaatttgatggtttgattatatatttgctttaaacatttggcttttcagctgccttgcatccatttccctttaacaatttatctgtttttaaattaatgaccttttctattagacacactttcatcaggggccctgtattgattggtatcttccagagaaacagaaccaataaaatgtgtgcgtatgtatgtatatgtgtatgtttctcagagagagagagcgagagaaagataatttaaggaactggctcatgtgattgtggagttgggcaagttcaaaatctgtaggacaggccagcaggctggagacatagggaggaattgtcatagtttgtgtccaaaaatagtttgccagaatcctcagttttttgagggaggtcagtctttttacttaaagccttcaactgactggatgcagccaaccgatatcatagatccaaagtccagtgatttaatgttaatatcatctgaaagcataccttcacatcaatatctagatatatttgacagatatctgggtaccatgtcttagccaagtt

SEQ ID NO: 75676 - DNA, 1699 bp, Homo sapiens
catataaatgacaaagcataagagaaaaatgacaaaaaaatgttatctcctcagccagttttaatyacttggtagtagttgcctgagtatttagttcaaaaaaattcaatttcaaacttacaatgttttagaaaaaatgccatgataaattaccaatgtttgttgtggactgagaaaacattaataattaagcagtctttgcctcagttgacaattaaatttggattttacaaaatttcatagtactataaacaatagattatgtaaatatttttaccttttttaactttaaaatatttttaaattttaaaccaatgaagtaagtatatttaaatttatataaagtatttgtagatatccttataagggataatgaagtaatacctacgtgttttagtgaagaaaaaaaagaacaaggaaataaaccacagcaattaacaaaagaacaatcacaagcttaacacctagtacctacaggaactccactgggtggaacctatacgcaaattaaacatgaaataaatattgtaaatgtaaatgatcacaaccgcacatatgaagaaaaagcaaaccacttccagcacactagactgacaatttttttcagagtatacaatttttttattagcattgtgacccacatataatggaataacgatatttatgaagcatataaatacttaactgctttatgagtatattgaattaaatatcaaagatacctcttcatagtaaaataacgttaagcagagaaacaaatttacatgaagttataaataagtatctttttacaagccaaatgagtaatctttattgattattattctttgtcattttttatgatcagcattcaataatcaatttttagcatctctgacactgaaaacctggtggtctcagacatgcctcttaacaccttgtgccttacctattctacttatattatgggttattttgaaattatgatgtggtacaagtactctaaaaggcataatgtataaactgatatggttcatatatgtatacatgcatgtgtatgtgtgtgtgtgtgtgtgtgtgtgtgtgtgtgtgtgtatgggtatatgtctacatctatatagcaataaaaagaacactggtgcaaatatttcttttcctttcttttcagtattactgtggcccttggaattctttctgacttaaaatctacactgtgaatactatcacaactcacattcctggctattgtttcttaaaatgtggcttcactttccactaaattaaagggagaaacacaacttaaattttacgcaaatggatccaaacttgtccccttcttggcatttaccatctggaatagctatgcttgaagcaactcttgagagccaagccctgcaatgacaacttccacttttatgcttgaggcttaatctctaatactatgctgatattgtatgaggtggcacactgtctctctcaaagagtttatccctataatgatgattgtcactaattctgacactcaaaagcaacaggattttgtttcattttgttgaattagggtcccaatttgtcatctagcctgcagtgcagtggtgcaatcatggctcactgcagcctcgaaccagtgggctcaagggatccttctgcctcagcctttcaattagtgagactacaagcatgaaccaccatgcctggctaagttttttgtttatttttg

SEQ ID NO: 75677 - DNA, 1699 bp, Homo sapiens
catataaatgacaaagcataagagaaaaatgacaaaaaaatgttatctcctcagccagttttaattacttggtagtagttgcctgagtatttagttcaaaaaaattcaatttcaaacttacaatgttttagaaaaaatgccatgataaattaccaatgtttgttgtggactgagaaaacattaataattaagcagtctttgcctcagttgacaattaaatttggattttacaaaatttcatagtactataaacaatagattatgtaaatatttttaccttttttaactttaaaatatttttaaattttaaaccaatgaagtaagtatatttaaatttatataaagtatttgtagatatccttataagggataatgaagtaatacctacgtgttttagtgaagaaaaaaaagaacaaggaaataaaccacagcaattaacaaaagaacaatcacaagcttaacacctagtacctacaggaactccactgggtggaacctatacgcaaattaaacatgaaataaatattgtaaatgtaaatgatcacaaccgcacatatgaagaaaaagcaaaccacttccagcacactagactgacaatttttttcagagtatacaatttttttattagcattgtgacccacatataatggaataacgatatttatgaagcatataaatacttaactgctttatgagtatattgaattaaatatcaaagatacctcttcatagtaaaataackttaagcagagaaacaaatttacatgaagttataaataagtatctttttacaagccaaatgagtaatctttattgattattattctttgtcattttttatgatcagcattcaataatcaatttttagcatctctgacactgaaaacctggtggtctcagacatgcctcttaacaccttgtgccttacctattctacttatattatgggttattttgaaattatgatgtggtacaagtactctaaaaggcataatgtataaactgatatggttcatatatgtatacatgcatgtgtatgtgtgtgtgtgtgtgtgtgtgtgtgtgtgtgtgtgtatgggtatatgtctacatctatatagcaataaaaagaacactggtgcaaatatttcttttcctttcttttcagtattactgtggcccttggaattctttctgacttaaaatctacactgtgaatactatcacaactcacattcctggctattgtttcttaaaatgtggcttcactttccactaaattaaagggagaaacacaacttaaattttacgcaaatggatccaaacttgtccccttcttggcatttaccatctggaatagctatgcttgaagcaactcttgagagccaagccctgcaatgacaacttccacttttatgcttgaggcttaatctctaatactatgctgatattgtatgaggtggcacactgtctctctcaaagagtttatccctataatgatgattgtcactaattctgacactcaaaagcaacaggattttgtttcattttgttgaattagggtcccaatttgtcatctagcctgcagtgcagtggtgcaatcatggctcactgcagcctcgaaccagtgggctcaagggatccttctgcctcagcctttcaattagtgagactacaagcatgaaccaccatgcctggctaagttttttgtttatttttg

SEQ ID NO: 75678 - DNA, 532 bp, Homo sapiens
aggcatccctgcgtggtctgacacccttgaaaygtgagtgtataatcagagggcgtccctgcaatgattaaacaccaagggaaggctgcctccccagtccgtgaccggtgccggagttttgggttcatggataaaacatgtctcttttgtctctaccagaaaatgaaaggaattgaaattaagagaagggagagattgaagtgtggcgccaagattgaaaggagaaagaggttgagggatagtgagggagtttggagacgagagtaaaaagaggccgcttaccggatttgaaattggtgagatgtttcttgggctggtcagtctaaggacctgaggtcgtaggtggatctttctcaccaagcaaagagcaggaggacaggggattgatctcccaagggaggtcccctgatccgagtcacggcaccaaatttcactaagctaaaagtcaagctggcagctgcttagttccggcaccaaatttcatgcgcgtcgtgtgaagagaccaccaaacaggctttgtgtgagcaacatg

SEQ ID NO: 75679 - DNA, 1287 bp, Homo sapiens
tgcatcacttaatgatgagcaaaatattgttatgtggagcaaaatattgttatgtggagcataactgaaacaagttattaaaaattttaaagttcataaaaagtagtgacataagacaacaatctgctgccatggtcatatttcttgtctatgtactttctaatgcacaaacctaaccatgactctctcctttttaaaatcttctaaatccctcaccctccttaccttgttcctactatctcacaagactcagctcttaccactccccaacccataccctggattataccatcctgagtttttttaatgtatcaggctctcccaagctcatgggctgtcaggggccccttacattgagcctgtagcactagtgttgggcctagtgcattggacatccagagaagattgttttaactctcctctataagatgaaacgattttcagttgaaatcacacaacaattaataacacttattagtttcctaacttgtttactagtttgaaaacagacaattcacaattcacaattttaaaagaagaataatgtcaatttagagggtattataaaaacctgcaacatatgtcacatttgaattaaatctgtccttatctgttacaaaataattacaacttgtagttggtactatttccctgttttttcattttgaacacaaatagtggtcacaatrgcatgaagtaactttagccctgtcatctttcttgtggtgggaggcatgggaggaggaggactgacagtataactaggagttatctggattaacttctgtgtagaataaaacgtttcttaaagaacatgtaacaaaaatgcactaatttcctgcttatgtatatattattcaaactcaacagtaagttctacaattatttagaacttagaccaacaagtggtttttttaaatataattgatattatttagaattgccagtacctggtgataataaaaaatatgtaacatttagttgatttagttgattccattactgcttttagtttctccacagtgttccccctcatttcctgcacctggctgttcctcctgccagcccacctctgcgatgaaactacatagtaccctatgttttctcctctgattatcactatcaccctgcttcgtaatagcttactgatatatctatctcttctatgatattgtgagctctctgaaggcagagaccatgctttatttatttatcactatatccccaacatttgctgcacaatagattctcaataactgctgaaagaagtttcaataaatatatgca

SEQ ID NO: 75680 - DNA, 649 bp, Homo sapiens
tgaaatattgggggtgggttcccctgataatgtcctttgtagggacatggatgaagctggaaaccatcattctgagcaaactatcagaaggacagaaaaccaaacaccacattttctcactcataggtgggaattgaacaatgagaacactcggacacagggtggggaacatcacagggtggggaacatcacacaccagggcctgtcatggggagraggagggggagggatagcattaggagaaatacctaatgtaaatgaagagttaatgggtgcagcacaccaacatggcacatgtatacatatgtaacaaacccacacattgtgcacatgtaccctagaacttaaagtataattaaaaaaaaaaagaataaccaactacaaaatgtccaagatccaagcaaactataacaaggatacaaaacaaatggtatttgcgaaacaacattgttaccaaagaaaaggaaatatccaccatttgttttctggctcatgaggttgcctttaaaaggacgacctagtctgaaggattggatctagtttccagagctaggaaatatataccagacacagcacgcttgtaagactgtcaaaaagaattggagcccctctgaattgggaaaaggcacttctcctggtggcaggaact

SEQ ID NO: 75681 - DNA, 747 bp, Homo sapiens
aacatggggacccaggctgtgaatctgaagctgggcctccagtccaggccctttgcttggtgctgcacaggtcgctgtgacacgtccctcccgcggtctgtttctgtggttgtccattcagaggactctgaggatgtgaggaaacgtttgttctgtgccaaagagccagtcagctcctggaggccttttactggtcatatttttgttaaagtcacttatttcgtgctgcatgggaattgacatcacctgtgcctgcacggaggmcaaggttgtgctcagcagatgtggatggatggatgggcgcatgggagatttaatcagggaggagtggcccagggtatggtgtgggcacttgttccaaaggtaacttcgtggtgtcacagggcaagcctcggctctgaaaggacaaagacagcagctttgtaatgccaaagggaccttgacgcaaaagcttgagtgccgaatgacagtgcttcagatttcaaaaggaatgtctaagccggagtattttctgggaactgtactctttatttcattttacttattttacattttaatttcaaaaatgtattttggggtttaaaaataaacacagaacaaacaaaacccccaaacccagtaccctagagttgggtccacacagtggacctggcagtgcccacgggacggaacgacctctacttgtggacgcctgtgaggcactggctgggcttgctcctgtggaccttctggccccagctcacggga

SEQ ID NO: 75682 - DNA, 1301 bp, Homo sapiens
aatgatatttatccaggaatagggcattgcaatgggaatatatgtgccatagtgaactatgtgccttttcagggaggtatagaaagatgaaggtttttaaaggaacaatggggaggattacataattgttttgagttaattattcttggctacaaggatcactcacaagggggatgccagtctcgcgttggacaggcagttactgggcagatgtcctcgcaaaagtgtaagattgcgatggtctttgtgcaaggttatggtttttatagtcttttgttatggtttttgttatcaagcatttatgcacgagaatcctcttcatggtgttctctggctctatttgtcaggattgtttttggtattttttttgagatggagtctcgctctgttgcccaggctrgagtgcagtgacgccatcttggctcactgtaacctctgcctcctgggttcaagtgattctcttgcctcagcctcatgactagctgggattacaggcacctgccaccacactcaggtaatttttgtattttgttggccaagctggtctcaaactcctgagctcaagtgatccgtgctcttcagcctcccaaagtgctgggattataggcatgagccactgcacctggcctgtttttaatacaagtgactccattttaattctgacaactttcacagtagcttatctccaaaggcggtgcacctcctaggatcccagcactttgggaggctgaggcaggcagactgcttgagcccaggagttcaagaccagcctggacaacatagtgaaaccttgtctctacaaaaaatacaaaattagctggttgtgttagtgcacacctgtagtctcagctacatgggagactgaggccggaggatcttttgagtgggaggcagaggctgcagtgagccgagattgcgccactgcattctagcctgggtgacagggagactctgtctcaaaaacaaacaggtcatgtgagaaatggctgatagatcacaccaggcttcttagagcccagaatagtttgggtccctttccccttttcataacatgatcatagcacctttcatttccttttctatcacagctgtaattatttatttatttatttatttatttatttgagacagagtcttgctctgttgctcaggctggagtgcagtggcgtgatcttggctcactgcaagctccaccccctgggtttaagcaattctcctgcttcagcctcccaagtacctgggattacaggcacccgccatcacgcccagctaatttttgtatttttagtagagatggattt

SEQ ID NO: 75683 - DNA, 1301 bp, Homo sapiens
aatgatatttatccaggaatagggcattgcaatgggaatatatgtgccatagtgaactatgtgccttttcagggaggtatagaaagatgaaggtttttaaaggaacaatggggaggattacataattgttttgagttaattattcttggctacaaggatcactcacaagggggatgccagtctcgcgttggacaggcagttactgggcagatgtcctcgcaaaagtgtaagattgcgatggtctttgtgcaaggttatggtttttatagtcttttgttatggtttttgttatcaagcatttatgcacgagaatcctcttcatggtgttctctggctctatttgtcaggattgtttttggtattttttttgagatggagtctcgctctgttgcccaggctagagtgcagtgacgccatcttggctcactgtaacctctgcctcctgggttcaagtgattctcttgcctcagcctcatgactagctgggattacaggcacctgccaccacactcaggtaatttttgtattttgttggccaagctggtctcaaactcctgagctcaagtgatccgtgctcttcagcctcccaaagtgctgggattataggcatgagccactgcacctggcctgtttttaatacaartgactccattttaattctgacaactttcacagtagcttatctccaaaggcggtgcacctcctaggatcccagcactttgggaggctgaggcaggcagactgcttgagcccaggagttcaagaccagcctggacaacatagtgaaaccttgtctctacaaaaaatacaaaattagctggttgtgttagtgcacacctgtagtctcagctacatgggagactgaggccggaggatcttttgagtgggaggcagaggctgcagtgagccgagattgcgccactgcattctagcctgggtgacagggagactctgtctcaaaaacaaacaggtcatgtgagaaatggctgatagatcacaccaggcttcttagagcccagaatagtttgggtccctttccccttttcataacatgatcatagcacctttcatttccttttctatcacagctgtaattatttatttatttatttatttatttatttgagacagagtcttgctctgttgctcaggctggagtgcagtggcgtgatcttggctcactgcaagctccaccccctgggtttaagcaattctcctgcttcagcctcccaagtacctgggattacaggcacccgccatcacgcccagctaatttttgtatttttagtagagatggattt

SEQ ID NO: 75684 - DNA, 564 bp, Homo sapiens
cctctccctagaaaaatgcagacacccatagtgttttccagacaactgcagggcattcgtggactcccgaggcccatccttacgccccgacactcgggaagtaggagtgaatgaatgcgctgtttacctgccctagggacaagaggtaaactaagtcattcattcactcattccttctgtcttgagccccagctcagggctagcctgggtgctcccggccgtggggctccgccccsgcacggggccacgaaggagggccacccccctcgccgcgcgcccgcggccccgcttccaccgcgccgcgccctcttccgccgtgagagtcgcttccgcgcacgtgatctcggcgtcgcgctctgatgagttttccgcggccggccgctgctcagccgctgtcgctccggctccggctgcggctgccgctgccgaggctgctgcgcggcgcctggcgggctcgggacgcgcgggccggggccgagggctctgggcgccgagatggagccgtgagtccccggccgagcgggcgggctggctggctctccggacactccggccgaaagttgg

SEQ ID NO: 75685 - DNA, 585 bp, Homo sapiens
tgacacccactcctgtggaaggcaaggcggatacagttcttatcttctgtagaaggaaagcggaaaacacggggtgggatcacctgactcaggttgaaaaagggtacaaagaaaccgaaaagaccccctacgacactgaaacagactccagggaggggctgatgaacgttctaggggaagtggatgaggacggagatgaggctgtggagagaaagattcataaagcctggctggaatcaggagagaaacgagacgaggggggacaggggggtttgagactttaaagttcttttgggaactgtgatgcggacgtgctggtgttcccagtacgggaatactggtgagctgcacatacgcatttacaggtaactccttacacggccctcttctaagcaaaggcaatgcattctccatttcctactggaagatttatttaaataaaatatgcctattaaacaaaacaagcaaacaaaaaagtcccatagcacagatgctttcccatctggttggtttgttacgttttcaacatagtgtaccagtccwttatccacatagataattcacttttttcaagtatactctcaa

SEQ ID NO: 75686 - DNA, 585 bp, Homo sapiens
tgacacccactcctgtggaaggcaaggcggatacagttcttatcttctgtagaaggaaagcggaaaacacggggtgggatcacctgactcaggttgaaaaagggtacaaagaaaccgaaaagaccccctacgacactgaaacagactccagggaggggctgatgaacgttctaggggaagtggatgaggacggagatgaggctgtggagagaaagattcataaagcctggctggaatcaggagagaaacgagacgaggggggacaggggggtttgagactttaaagttcttttgggaactgtgatgcggacgtgctggtgttcccagtacgggaatactggtgagctgcacatacgcatttacaggtaactccttacacggccctcttctaagcaaaggcaatgcattctccatttcctactggaagatttatttaaataaaatatgcctattaaacaaaacaagcaaacaaaaaagtcccatagcacagatgctttcccatctggttggtttgttacgttttcaacatagtgtaccagtcctttatccacayagataattcacttttttcaagtatactctcaa

SEQ ID NO: 75687 - DNA, 1068 bp, Homo sapiens
ataagaatttttaagggtatccaactgtaaaaataagtaagttttttcatgccatctttggtatgactccatttttttcacttaagaacaatttctcgaagcctcttaccatgctatcttttagactggaaagtggctctgtaattaaacgtgtacacagcctgaggactgactgtggggctcaccccacacactcacccctgcacatgtgagggtccttgtccggttgtgaactttgttatgaatgtacatcgtggttccatcttgagctacaccatcgactttaacagtcatgggaaagcttgtcttaatagaagtttctacaaaagaaaaaaattcagtgttagagaccatgccaggcacatcacacctacaaaggtgccttcctggctctgtaatgaccttggagccaggaaaacgcttaaggtccttaggccacattggcctcagcacatttgaaaatctcttaattgcccagcaaagtaaaagcctttccattagattccaacccagcacccagggggtctatgtcaaaacctgcacttcagacccatcagtttcacttcacacacaaaaaaagggtaaatatttcatggctaatgaacttatatttttaatttctcacatacatttttaacttaccaaattctataccaaaaatagaaatagatttcttatttcttctgattataggtttttctcattatattctcattttaaaaaaatcataaaatataaagatagcattaaatactgagaatttcacctagagataatcgtaattcatatttcatgtctatccttccagaccattttctagacaaatacgtagtaatatgaattttttgctttctaaaatgttacaaagaggggataattttttcgtaatatatatttgtttcacttcatttactgtggtcatggggttatcttttcaaattctttctcaaccagagtgtctcatgtgaggcacagaacagaaaaggatttggttatcttctcaattctccctaggatgatayaaaactagtgccactgtagactgacagaagctaattcatcataaac

SEQ ID NO: 75688 - DNA, 573 bp, Homo sapiens
tctttcttttcttttttctttttctttttttttctttttttttttttttttgagacagggtctctctctctctcgtccaggcttgagtacagtggcgtgaccttggctcactgcaactccccacctcccaagttcaagcaaytcttgtgcttcagcccctgaagtagttggaattacaggtgtgcgtcaccatacccagctaatttttttatttttattagatatggcgtttcaccatgttggcaaggctggtctggaactcctgaccttaagtgacctgcctgcctcagcctcccaaagtgctgagattacaggcttgagccaccatgcccaccttattccacacattttctaataaatatttcacaactttatgctgtaaaatgtatggcttatcacagatacgcatttcttaaatgatgattctgtaaaaggaagagatgactaagagttacaccattgctgttacttcatacttacagcaactgcctccaggatttgtttaacggcatctgcagcatctcgctcactgtaatatcccttttccacaatcctggaacaaaaagaaaggaa

SEQ ID NO: 75689 - DNA, 3233 bp, Homo sapiens
tcctcacccaaatctcatcctgaattataatccaaactgtaattgccacgtgttgggggagaaaccttgtgcgaggtgattagctcatggaggtggctcccccatgctgttctcatgatagtaagtgagttctcatgagatctaatggttttataaggggcttttcacactttacttagcacttctgtttcctcttgccctgtgatgaaggacgcgtttgcttccccttctgccgtgattgtaagttttctgaggctcccccagccatgggaaatgtgagtctatttaaacctcttttctttataaatgacccagtctcaggaagttctttatagcagcactaatacaatctgaaaaatgagattcagctacaaaatattaaaacatttttttatgcgtacgtatctgtataaaattaatttaacaaatgtatatactgtctgtacaaaaaatcaytatttctgagtgatcttaaaatgcttgatttataaaatagttcagaatttatctagaaacaaactgaatcttaaaaaattagcaaaacactaactatactttgaattataaagtagaatctttttttttttgtctttttttttgggagatggagtctctttctgtcgcccaggcaggagtgcagtggtgcgatctcagctcactgcaacctccacctcctgggttcaaatgattctcctgcctcagcttcctgagtagctgggattacaggtgcctgccaccacacccagccaattttcatattttcagtagagacagggtttcaccacattggtcaggctggtcttgctctgctgacctcatgatctgcccacctcgacctcccaaagtgctgatattacaggcataagccaccgtgctttataaagtagaatcttaaaaataatacagaataaatcatgttgaatatttaaacaacttattctaccaagttttataatagtataatttaaattcctctaatatgttagaattttacagcataattataactttttatttttgccaaatttttaaaaactttactcattttctcagtggcttcattcattgtttatattcaagtcattttcctttgaaatacccatcacgtcactacgcttgtaaatgtcatcacttcattgtggttggcttttcagttatccagaattgtttgtattaatttaataaaatcctgcatattttataaaatattttgttttctattgcagaataattgctttgtatttgcattagattgcagaatgtttccatcatccccaaatcagctatgatagcccagaaagactctaacctatgcattctcatacctacacagagtatacgtaattggaaaaatattttttactaatactttatttgatatttgatttgtttctaaaatcaccaatttccatttcatgttataacttatcattgttgtcaagttataaaatagtctatttttttcaatggaagaacaataactaaaaactggtaagtataattagacaaataattttttaaaaccacctgtaggtagaaattgctaaacataagtactatagatatactgtgttcttcaatgtagatattgaatccaacgaaagaacagtgatggatgctatcgtaaggcacttgggaaacctcaaagtaccacaagcttgacaaggttggtcactaggttacatcatcctaattctataatcccatgatttctcgatgggtttcatataacaatgaggaagagcctaaaatcagagcttttaattaatttatgggttctgcttcaatctactcatttcaacctataaagaaacataattaacctcaatttattttttaagagtatacctgcatttctagctcccactttcttacatttgagtaaatgtggacagcagtcagcagtttcttattctatttttccttcatcatcaccgtttgcctttccgatataaaacagttgaatacacacaagttattttattcttcataaaattttttgattctaagctaccaattataatcctatagcagggaagttattttatttaatctatacattaaccattgaataaatgatgtgcccattgtttgagtaactgactgaggatttactaccaaccctgaagagattacctgggtgactaaattaatattgttaatactttttattttctatcttctaagttaaaggtttaattaaccactgccctttctgtttgctgatgaatggcttgcttgtactgaaaatctggcctctgctaactggcatcattattttttcttcaaagcgtcattggcctctattagactcttagaggttaaattattcagaattactgaaatgcattttcaaaataagtcaaaaatttaacctaattacacaataatcatcttaacagaattcaacaaattttagaatattatttaatgaactgtttttaaaataattatcttccgatttacagtctgatttggcacacagaaatacgtaggtgtaatggaattctaaattacactgaatttatggagaaggacatagttcattctatagtataggccataatttcattctattaccatacaatttgctttgcaacaaaataatttgcaaactgaagctgatgtactcctaatttcaagaatgttaaatacacagcataacatccagtaaaacaaaaggaagtagccaagactttgatgtttattgaaatgaagttttgtcaataattatcattaccaattttagctgctaggattcactagttgaatagcctttcaattttgccttatttttctgaagtcatcaaatttttctttcatctatgaataatgaatttgaactctctgctgtcattggaggtggcagtatgagtgtaaagacaattagttatcttgttaaataaactacttttcttctctggttaaaattaggtaaaaacaatattttgcatttgtctcaaaacacaaccacttttcagcgtacaaagggagctttacaactgacccagttgtaatacaaagttgctacacaggtttacctccattttatccaataactgtgagtaatagttattcttgatcaacagtggggtcgaacatagatggcacttttcttttaaattcatctttgaagtcatgtaggtgatgaggacgggagactgggaatgggttcgcagtggagtgtgggagtagtatgggggaccctaatatccgaaaaggccaagcatgca

SEQ ID NO: 75690 - DNA, 3233 bp, Homo sapiens
tcctcacccaaatctcatcctgaattataatccaaactgtaattgccacgtgttgggggagaaaccttgtgcgaggtgattagctcatggaggtggctcccccatgctgttctcatgatagtaagtgagttctcatgagatctaatggttttataaggggcttttcacactttacttagcacttctgtttcctcttgccctgtgatgaaggacgcgtttgcttccccttctgccgtgattgtaagttttctgaggctcccccagccatgggaaatgtgagtctatttaaacctcttttctttataaatgacccagtctcaggaagttctttatagcagcactaatacaatctgaaaaatgagattcagctacaaaatattaaaacatttttttatgcgtacgtatctgtataaaattaatttaacaaatgtatatactgtctgtacaaaaaatcactwtttctgagtgatcttaaaatgcttgatttataaaatagttcagaatttatctagaaacaaactgaatcttaaaaaattagcaaaacactaactatactttgaattataaagtagaatctttttttttttgtctttttttttgggagatggagtctctttctgtcgcccaggcaggagtgcagtggtgcgatctcagctcactgcaacctccacctcctgggttcaaatgattctcctgcctcagcttcctgagtagctgggattacaggtgcctgccaccacacccagccaattttcatattttcagtagagacagggtttcaccacattggtcaggctggtcttgctctgctgacctcatgatctgcccacctcgacctcccaaagtgctgatattacaggcataagccaccgtgctttataaagtagaatcttaaaaataatacagaataaatcatgttgaatatttaaacaacttattctaccaagttttataatagtataatttaaattcctctaatatgttagaattttacagcataattataactttttatttttgccaaatttttaaaaactttactcattttctcagtggcttcattcattgtttatattcaagtcattttcctttgaaatacccatcacgtcactacgcttgtaaatgtcatcacttcattgtggttggcttttcagttatccagaattgtttgtattaatttaataaaatcctgcatattttataaaatattttgttttctattgcagaataattgctttgtatttgcattagattgcagaatgtttccatcatccccaaatcagctatgatagcccagaaagactctaacctatgcattctcatacctacacagagtatacgtaattggaaaaatattttttactaatactttatttgatatttgatttgtttctaaaatcaccaatttccatttcatgttataacttatcattgttgtcaagttataaaatagtctatttttttcaatggaagaacaataactaaaaactggtaagtataattagacaaataattttttaaaaccacctgtaggtagaaattgctaaacataagtactatagatatactgtgttcttcaatgtagatattgaatccaacgaaagaacagtgatggatgctatcgtaaggcacttgggaaacctcaaagtaccacaagcttgacaaggttggtcactaggttacatcatcctaattctataatcccatgatttctcgatgggtttcatataacaatgaggaagagcctaaaatcagagcttttaattaatttatgggttctgcttcaatctactcatttcaacctataaagaaacataattaacctcaatttattttttaagagtatacctgcatttctagctcccactttcttacatttgagtaaatgtggacagcagtcagcagtttcttattctatttttccttcatcatcaccgtttgcctttccgatataaaacagttgaatacacacaagttattttattcttcataaaattttttgattctaagctaccaattataatcctatagcagggaagttattttatttaatctatacattaaccattgaataaatgatgtgcccattgtttgagtaactgactgaggatttactaccaaccctgaagagattacctgggtgactaaattaatattgttaatactttttattttctatcttctaagttaaaggtttaattaaccactgccctttctgtttgctgatgaatggcttgcttgtactgaaaatctggcctctgctaactggcatcattattttttcttcaaagcgtcattggcctctattagactcttagaggttaaattattcagaattactgaaatgcattttcaaaataagtcaaaaatttaacctaattacacaataatcatcttaacagaattcaacaaattttagaatattatttaatgaactgtttttaaaataattatcttccgatttacagtctgatttggcacacagaaatacgtaggtgtaatggaattctaaattacactgaatttatggagaaggacatagttcattctatagtataggccataatttcattctattaccatacaatttgctttgcaacaaaataatttgcaaactgaagctgatgtactcctaatttcaagaatgttaaatacacagcataacatccagtaaaacaaaaggaagtagccaagactttgatgtttattgaaatgaagttttgtcaataattatcattaccaattttagctgctaggattcactagttgaatagcctttcaattttgccttatttttctgaagtcatcaaatttttctttcatctatgaataatgaatttgaactctctgctgtcattggaggtggcagtatgagtgtaaagacaattagttatcttgttaaataaactacttttcttctctggttaaaattaggtaaaaacaatattttgcatttgtctcaaaacacaaccacttttcagcgtacaaagggagctttacaactgacccagttgtaatacaaagttgctacacaggtttacctccattttatccaataactgtgagtaatagttattcttgatcaacagtggggtcgaacatagatggcacttttcttttaaattcatctttgaagtcatgtaggtgatgaggacgggagactgggaatgggttcgcagtggagtgtgggagtagtatgggggaccctaatatccgaaaaggccaagcatgca

SEQ ID NO: 75691 - DNA, 3233 bp, Homo sapiens
tcctcacccaaatctcatcctgaattataatccaaactgtaattgccacgtgttgggggagaaaccttgtgcgaggtgattagctcatggaggtggctcccccatgctgttctcatgatagtaagtgagttctcatgagatctaatggttttataaggggcttttcacactttacttagcacttctgtttcctcttgccctgtgatgaaggacgcgtttgcttccccttctgccgtgattgtaagttttctgaggctcccccagccatgggaaatgtgagtctatttaaacctcttttctttataaatgacccagtctcaggaagttctttatagcagcactaatacaatctgaaaaatgagattcagctacaaaatattaaaacatttttttatgcgtacgtatctgtataaaattaatttaacaaatgtatatactgtctgtacaaaaaatcactatttctgagtgatcttaaaatgcttgatttataaaatagttcagaatttatctagaaacaaactgaatcttaaaaaattagcaaaacactaactatactttgaattataaagtagaatctttttttttttgtctttttttttgggagatggagtctctttctgtcgcccaggcaggagtgcagtggtgcgatctcagctcactgcaacctccacctcctgggttcaaatgattctcctgcctcagcttcctgagtagctgggattacaggtgcctgccaccacacccagccaattttcatattttcagtagagacagggtttcaccacattggtcaggctggtcttgctctgctgacctcatgatctgcccacctcgacctcccaaagtgctgatattacaggcataagccaccgtgctttataaagtagaatcttaaaaataatacagaataaatcatgttgaatatttaaacaacttattctaccaagttttataatagtataatttaaattcctctaatatgttagaattttacagcataattataactttttatttttgccaaatttttaaaaactttactcattttctcagtggcttcattcattgtttatattcaagtcattttcctttgaaatacccatcacgtcactacgcttgtaaatgtcatcacttcattgtggttggcttttcagttatccagaattgtttgtattaatttaataaaatcctgcatattttataaaatattttgttttctattgcagaataattgctttgtatttgcattagattgcagaatgtttccatcatccccaaatcagctatgatagcccagaaagactctaacctatgcattctcatacctacacagagtatacgtaattggaaaaatattttttactaatactttatttgatatttgatttgtttctaaaatcaccaatttccatttcatgttataacttatcattgttgtcaagttataaaatagtctatttttttcaatggaagaacaataactaaaaactggtaagtataattagacaaataattttttaaaaccacctgtaggtagaaattgctaaacataagtactatagatatactgtgttcttcaatgtagatattgaatccaacgaaagaacagtgatggatgctatcgtaaggcacttgggaaacctcaaagtaccacaagcttgacaaggttggtcactaggttacatcatcctaattctataatcccatgatttctcgatgggtttcatataacaatgaggaagagcctaaaatcagagcttttaattaatttatgggttctgcttcaatctactcatttcaacctataaagaaacataattaacctcaatttattttttaagagtatacctgcatttctagctcccactttcttacatttgagtaaatgtggacagcagtcagcagtttcttattctatttttccttcatcatcaccgtttgcctttccgatataaaacagttgaatacasacaagttattttattcttcataaaattttttgattctaagctaccaattataatcctatagcagggaagttattttatttaatctatacattaaccattgaataaatgatgtgcccattgtttgagtaactgactgaggatttactaccaaccctgaagagattacctgggtgactaaattaatattgttaatactttttattttctatcttctaagttaaaggtttaattaaccactgccctttctgtttgctgatgaatggcttgcttgtactgaaaatctggcctctgctaactggcatcattattttttcttcaaagcgtcattggcctctattagactcttagaggttaaattattcagaattactgaaatgcattttcaaaataagtcaaaaatttaacctaattacacaataatcatcttaacagaattcaacaaattttagaatattatttaatgaactgtttttaaaataattatcttccgatttacagtctgatttggcacacagaaatacgtaggtgtaatggaattctaaattacactgaatttatggagaaggacatagttcattctatagtataggccataatttcattctattaccatacaatttgctttgcaacaaaataatttgcaaactgaagctgatgtactcctaatttcaagaatgttaaatacacagcataacatccagtaaaacaaaaggaagtagccaagactttgatgtttattgaaatgaagttttgtcaataattatcattaccaattttagctgctaggattcactagttgaatagcctttcaattttgccttatttttctgaagtcatcaaatttttctttcatctatgaataatgaatttgaactctctgctgtcattggaggtggcagtatgagtgtaaagacaattagttatcttgttaaataaactacttttcttctctggttaaaattaggtaaaaacaatattttgcatttgtctcaaaacacaaccacttttcagcgtacaaagggagctttacaactgacccagttgtaatacaaagttgctacacaggtttacctccattttatccaataactgtgagtaatagttattcttgatcaacagtggggtcgaacatagatggcacttttcttttaaattcatctttgaagtcatgtaggtgatgaggacgggagactgggaatgggttcgcagtggagtgtgggagtagtatgggggaccctaatatccgaaaaggccaagcatgca

SEQ ID NO: 75692 - DNA, 701 bp, Homo sapiens
atatatatatatatatatatatatatatatatatatayacatacacatatacttaggcatacttaaagcagtaaggcaagatttgacataaagccataaaaatatttagtatgaaaatagaaagcctttctctgtgaaacaaacataacatgcaatttcccccaatatatttttatgaaacattttaaacaaacagaaaaattaaaagaattttacagtgaacactcacatgcccactgcctagattctaccattaacattttactatgcttgcttcgtcacatattcctccacttatttatcaataaaaccttcttattttttggatgtatttcaaaataatttctagacagccagaaactttctcctaaaaacagtacttcagaatatatatgttaactggagttcagtatttgtttagagttatgttttattttgaatatacagttaaagcactaatgaggccgggcatggcggctcacacctgtaatcccagtgctttggtaggctgaggcgggtggatcacttgaggttgggagtttgagaccagtctggccaacatggtgaaaccccgtgtctacttaaaatacaaaaagtagccgggtatggtggtgggtgtctgtaatcccagctactcaggaaggctgaggcaggagaatcgcttgaacccgggaggcggaggttacagtgagctgagatgg

SEQ ID NO: 75693 - DNA, 1773 bp, Homo sapiens
taaaaggtcacctttatattttcagttgttaaatatcagcatcttcaaccttgggcaaggtcaggttttaaaaagctctttctcctagaaaaaaattaagtatttgattgattgcaggaactaaatatagatgctgtgtgagtgaccagctgtcacctcaattttttaaatttggaaaatttaaaagaagttttcttattgtaagtgcaattactttatctyctcacgtaagccttgagctgaatagggattattatgtctggactgatcaataggtactggggagaatgcatagtgtggattttgctgtctgtgtgtaagaagtacagtttgatattattgattacacccttagtttctgctctgtttggaagatgggcagaagtgaacaccaagaggaatagagacatagagattaccatctgtatcagttagggttctccacagaaatagaaccaacaggatatatgcatatatagggaaataaatttattataaggaattgactcatgcgattatggaggctgagagtcccaagatctgcagtcagtaagctagagacccgggaaagccaatgatatagttccagtacacgtctgaaagcctgagaaccagaagagccaatgttataagttccagtccaaaaagccagcaaacttgagacccaaaaggaaacaatgtttcagtttgagtctgaagtcagaaaaagaccaatgtccaagcttaaacaatcaggcaggagtgccctctttctctcaggagagtcagcttctttgctctatgtaggctttcaactgactgaatgaggtttacccacattagggaaaccattctgctttgctcagtctactgattcaaatgttaatatcatccaaaatatcctcaaagacacaaccagaataatgtttggccaaatatctgggcacgttatggctcagtcaagttgacacataacattaatcatcacgccatctccattatgtacataaaggaattgaaactgtataggtcccactcttcacctccaaaagcaaacaattcattatcttgtcaaatgaaacacttaccttctgaaagacacagggttcacccctgtgaagtcccactgatgccatttgtccattaccaagaaaaacagcttatttctggcactttatctcagtccagccttattttttaatataaaaatatattttgatggacactaatgaatagcaagcaaaagaagatgtgttttgcctggaaatgtcaaatagctatgtctgaaaaaggagacagagttgaatggctgataggttaagtggttaaatgatgaacaagcagcgagtgagtgaaatgttcagtgcctatgactagggtgtgctgcaagactgacttttacactatagtatatggcttttcatcaccattgttactcataatactgagaaggaaggttatttctatgaatagtcttctttgttcataatagcaatcagtctctatttgggtggttttaaaataggcaatcatttcacagcaggaacaatgagagcagaatagaattcagaatcttatcaccactcataaacactgacgtttattgtctagtagctagaaaaagcaagaatcactgcagtaaagatgcttaaaaatccatatgtgacttcatagttgaaatagaaaaggaatgtcagctatcaagtttacaaaaataaaatgcaatttatacttcaataatttataagcattttttttaaaaaagggaaaccagctacacacttgccaattttg

SEQ ID NO: 75694 - DNA, 965 bp, Homo sapiens
gcaaatacaaatttagaaagcccagcaacttactgtctcactgccgacctaaggccaaagcctgtgctgctatatgtaaaccacctgcagctccaccccagaaggatataactcaggctataactcctctctgaacccccagcgctcatgtcagccgtgtttctgatatccagcctgtctttggtatttggtgtgacaatgttttgtctgcagcgtctcttctgcttgcagccagagaatatttttggtttttaggggcttacatgattatattgggcmcacccagataatccaggataatctccccatgttaaactctgtaacctgcaacattccttttgccatgtaatgtaacatattcacaggttctaggaataggagcatggacatttgcgggtgggttgggggcagcgggggcaggtcgtctgccagcactttttttttactcacacctgaagtttatttgctctggagaatttaaatagtttactggtgcatagtacaatttggactggtgaacacagtaaaggaccaaacaaaacttaaacgatgaaaatgaaaacttccaagaccttaggtttaattggtgaaagaagaaagctgcctgttcactaacagaaatacatatgagaattcaacttaaagtgaaatattggcaaaggacttcagcagttaattagaattcctaggcaatttgcttctcccaagatgtattttgggaggtgtggggaggagtttattgactgtcagctttaaatgcttagacatgctaatttacattaattctaaagctaatttttcgtgccaatcagccctctactacagcttctaatagcagatttctagttcgtgggttgctggtgacctctgaacgaaagagacctactagcattctgtcatttgatgacacagatgttacttcaaaaaaagaaaaaaatagacggtattttaaaagtcattagttg

SEQ ID NO: 75695 - DNA, 965 bp, Homo sapiens
gcaaatacaaatttagaaagcccagcaacttactgtctcactgccgacctaaggccaaagcctgtgctgctatatgtaaaccacctgcagctccaccccagaaggatataactcaggctataactcctctctgaacccccagcgctcatgtcagccgtgtttctgatatccagcctgtctttggtatttggtgtgacaatgttttgtctgcagcgtctcttctgcttgcagccagagaatatttttggtttttaggggcttacatgattatattgggcccacccagataatccaggataatctccccatgttaaactctgtaacctgcmacattccttttgccatgtaatgtaacatattcacaggttctaggaataggagcatggacatttgcgggtgggttgggggcagcgggggcaggtcgtctgccagcactttttttttactcacacctgaagtttatttgctctggagaatttaaatagtttactggtgcatagtacaatttggactggtgaacacagtaaaggaccaaacaaaacttaaacgatgaaaatgaaaacttccaagaccttaggtttaattggtgaaagaagaaagctgcctgttcactaacagaaatacatatgagaattcaacttaaagtgaaatattggcaaaggacttcagcagttaattagaattcctaggcaatttgcttctcccaagatgtattttgggaggtgtggggaggagtttattgactgtcagctttaaatgcttagacatgctaatttacattaattctaaagctaatttttcgtgccaatcagccctctactacagcttctaatagcagatttctagttcgtgggttgctggtgacctctgaacgaaagagacctactagcattctgtcatttgatgacacagatgttacttcaaaaaaagaaaaaaatagacggtattttaaaagtcattagttg

SEQ ID NO: 75696 - DNA, 965 bp, Homo sapiens
gcaaatacaaatttagaaagcccagcaacttactgtctcactgccgacctaaggccaaagcctgtgctgctatatgtaaaccacctgcagctccaccccagaaggatataactcaggctataactcctctctgaacccccagcgctcatgtcagccgtgtttctgatatccagcctgtctttggtatttggtgtgacaatgttttgtctgcagcgtctcttctgcttgcagccagagaatatttttggtttttaggggcttacatgattatattgggcccacccagataatccaggataatctccccatgttaaactctgtaacctgcaacattccttttgccatgtaatgtaacatattcacaggttctaggaatrggagcatggacatttgcgggtgggttgggggcagcgggggcaggtcgtctgccagcactttttttttactcacacctgaagtttatttgctctggagaatttaaatagtttactggtgcatagtacaatttggactggtgaacacagtaaaggaccaaacaaaacttaaacgatgaaaatgaaaacttccaagaccttaggtttaattggtgaaagaagaaagctgcctgttcactaacagaaatacatatgagaattcaacttaaagtgaaatattggcaaaggacttcagcagttaattagaattcctaggcaatttgcttctcccaagatgtattttgggaggtgtggggaggagtttattgactgtcagctttaaatgcttagacatgctaatttacattaattctaaagctaatttttcgtgccaatcagccctctactacagcttctaatagcagatttctagttcgtgggttgctggtgacctctgaacgaaagagacctactagcattctgtcatttgatgacacagatgttacttcaaaaaaagaaaaaaatagacggtattttaaaagtcattagttg

SEQ ID NO: 75697 - DNA, 731 bp, Homo sapiens
acacacatgaaacaaagttatacattgaccaattgacaaaaatattatggcttgaaccataatatctcataggaacctaatgctgtatttcctccaagaacaatggttcagtacttgctaacttgctgtttgtggaaaatttatagaacaaaactacatgaataaaaatcaactgtatatatacagacatacatatggatatataaataaataacccattttatcaacattttcacaaatattcaattactatagatcacaaatgtttaaagcccaaaataactttgtaaatttcatccaagcttttcatgttatagatgaagaaactgaaaaccagatcaagggatttggataagatcataattagttacagagcagaaagctattactcaggtgttcagacttacaggcctacactaagctkcctttcaattcctaaaaatgtaaagaaactcaaatgttattgtttctctctctctctctctttttttttggtttcatatttctttgattctcataattagcctatgagggcagatattgagaaacagacagagcagggattcaggttttctgaacctagtcattatgttatctctaaaactgtagaaatgggtagctgtggacctttcagaaaataagtaaagcacatattataaagtcagtcacatacaaaagatgaaaacttgcattttccttttccacacatacaacactgtggtgaaagttag

SEQ ID NO: 75698 - DNA, 814 bp, Homo sapiens
cattgtttcttttgattctcatgactatcttacgaagtgtgtgctatcaggaggaaactgaggttacacactagtaagctgatggcctaagtgccaagatgaaaaaaccaggacaggacaggcatggtggctcacacctgtaatcccagcactttgggaggccgaggcaggcggatcatgaggtcaggagatcgagaccatcctggctaacatggtgaaaccccgtctctactaaaaatacaaaaacttagctgggcatggtggcgggcacctgtagacccagctacttgggaggctgaggcaggagaatggcgtgaacctgggaagcggagcttgcagtgagccgagatcgcgccactgcactccagcctgggtgacagagcaagactctgtctcaaaaaaaaaaaaagaaaaagaaaaaaccaggacagccttttaaggctatgatcagaaaaatggtaacctgttaaagttaagcacgccttttgggagaagagtaatcaagagatcttaaggatgtgggtctttctcagaaccgcaatagcagcttacctagcttccttccaggtgtctctgcatgtctctgcatgtctttgctgtygtacatcttctagtcctgttttcccatatcctggtggtcctgctgacataatagctgctaggtaaaatctaagcaaaccgaaaaattcctatttattgactaagattgtttttctgaagtggcatcatctctagctatggtaataggctcctactacccttctcaccagcatgaatttgatcttcaaatgaaattttaaaaattagaaccctt

SEQ ID NO: 75699 - DNA, 618 bp, Homo sapiens
tggggacagcattctaggaagtgggtgcaggaaatatgaaagccatgcaatgagaatactttattctcataaataaagtggtttatgagtacttgctataaagagtacaaaatacagtaatagatgaaagaggaattggaggttgaaaagagatttattgatctgttarttgtttaatttaatataggatgttatcgcatgttagtatgccaatgggatgaaccacaagaaataggaaaatcaatgatacgagagaaagatgtcaagtccttgaataggaaagagggctagggccctgtgtacaggtggcagatgccctggaccaaggctgtggcaggccatcccttgcagcaggaagaaatgcagaggataaaaatacagccacaagaaacattcctgaatgcttagggaaattgctttcctcttaaaaatttccaaaaattcatcttaagcacctattaaatggctcttctggagctgaaggttttgtgctgcctgccaagcaatgatttggggttcacagccaatcccaggggagtaaaagcagggacaggaggtcagagaacacattctcttccatctgtgcatgccttcaataaacgttggattgactggaat

SEQ ID NO: 75700 - DNA, 569 bp, Homo sapiens
tgaacatgaactggtgtatgggaagagaaggtggccagtagccaagcatttcataagactgtgatgcagaccgaaggctttaagtattagtaagattcatgtttctgacttccaccctgtggaatagactgctgacagtgatgaacatggtgacatgataggactcatcaaccatgtgtgcggcaagcaagacctttgactttcagctaatcccagctaatcccakcacgaaatgtaaaaatgcacaggtcattggcaccatggttggtgggaagtgaggtgtagtagctgaacttacaaagcctgttactctacaatgacctatgagatggacttgaagatgctgcagccaaacatgagcctgatgattgatacccagcagagccaagcaaaagagaaaacggaaatatgtccctaatcccacagagctcagaccttaatttgtctatgtcatacataatggatttgagttcagctaaacccattcaaatccagctggttgtttcagtcagtgaatttacagcttgtatttatggtccaaaacagaaactatatgagcatatttctct

SEQ ID NO: 75701 - DNA, 1098 bp, Homo sapiens
aacaaatgaggactacatagaaaactaaatcaataaataaacgtaggaaccaagaraggtaaatagaatgtagaaactgacctttatgctgtgatggcattttgctaaacctaatgaaattgagatttggtttacatgatcttcaaggctgagagatagaagacaatcctaggagccactcaagttggagagtctaactagtagacacctgttgataaatctgggaccctaagagcaagaccctcaaaactggattagttataaactttcttactgacagcccctgaaatattgcctatctcaaagcttggggctaagactagaaagggtagaaaattcttcccttattacttgtaaccacagaccacaactgtcccagggaaaagtcttcaggggctttaacatccatggagctgtcatctcctaagataacaatgccttctttgggaatacttcttgaaggacctgcctgaggctgttttacagttaacttttttttgataagtaagaatacactctaaaataacagtaaaaatatggtccagttggccctccatatccatgtgttctacatctatgaattcaatcaacctcagatttaaaaaaaagtaaattccaggcctcctgcctgcggcatttccagccagagcaacccacccacccatggtttccccctgcagaagcgaccctacccacagcaccccaagctggagtgcctcccggccacaacgcctccaccacttctgctggagcacacctcccaagcccacggtgccccctaccagagcacctcccaccctcagtgcccctgccagagtgcctttcgcccacagccctgcccactggagcatatcctgcccacagtgcccctgctgcccctgctggagcacctacacccatgccctgtcaatggtctgggaacaccccagcctctctatcccagccaaagctcaacagtgagagaccagaggacaaagctgctgacccagtcccagtcccacagggttagagcatgcatcccagcagtatggagctgagtcttgccccctaaaagcatccagaaatgaagtgattcaactatatccagcttacaccaca

SEQ ID NO: 75702 - DNA, 1625 bp, Homo sapiens
agcctccaagcctctccccaagttagctccagagcttggaagaaacaaaagtgctcttttttggcttgagttgcttgaatcccaggtggaaaggtgagtcacagggggaggcgctctgcctctctcaggtactggggcttcactcactttttcagccagatgctgtcacagaggctgtttgctggcatcctcctgctaggatttggggtgtccttcatggttgcactgtgttgccgtttttcttcttgcattagaactcacaaagttgatctttatgtattatgttgctattttcaagtggctgaggcatgcttaaagcatctaatccaccattaagggtccatccaatctcatgtgtgatctatcatcatcttccccaattgaaatttattaataacccacattcctgcaagagttgttcacaaaacacattaaaaaataatttttgtcctcaaataacttaactgctaagaacatgaaatataaattgagttctatatttctggtttgtcagagatgaagtattgagtatctatttgtgctcactattgaaatgatgaatttttaggtcctgctgtatttttaattccacagttttgagttgagaaaaagtggaccaaagtgtcatcacagaaaagtattatatttccttctcacataaaattttgtgagttctcaatacatcaatattatatatacaaaggcatagatatttcttcagattcagatcattaaaaagtcatataattaatgtaacttctctgttgctaggtcctttgcaatgacactcgttgccagtaagtggcaatcattctccagaacgtttgagtggatccagggatctggaagtaattgataacaccagaaagatgtgaggaggcaamttgccaaagctgacttttaaaataatgacaattcactgttggtgagagagtaaattagttcaaccattgtggaaagcagtgtggcaattcctcaaatagctaaaaacggaattaccatttgatccagcaatcccattactggatatatatccaaatgaatagaaatcatttaatataaaatgaatagaaatattctgtaaatattatcaagacacatgcaggcatatgttaactgcagcacaattcacaacagcaaagacaaggaatcaacctaaatgtccatcagcagttgactggataaacaaatgtggtacatacacacaatgcaatactatgcagccataaataaagaacaagatcatgtcctttgcaggaacatggatggagctagaagccattattcttagcaaactaacgcaagaacagaaaactaaataccacatgttctcatgtataagtgagtgctaaatgatgagaacacatggacacagagagaaacaacagacactgaggcctacctgagagtggagggtgggaggagagagaagatgaggaaaaaataactaataggactaggcttaatacctgggtgatgaaataatctgtacaacaaatcttcatgacacaagtttacctatataacaaacctgtacatgcaaccctgaatttaaaataaaagtttaaaaaagtggtgacattggccaggagtggtggctcacaccagcatttttggagactgga

SEQ ID NO: 75703 - DNA, 552 bp, Homo sapiens
tttggatattgtcagtaaagaactgtgattttaaaaaactgtaatgtggagatacacatatatatgcgtatcaattacttaagattaacaatcataaccatcagataggcaaagagagcgaagtgggtagaataacatagcaatctaagaaataaaataaggaaaatttttgttgatagtttgtactttctttcactttgaaggagggatactttgctgtctaccctatcagatgtcaaatcattaacatctactttttggataagtgtttaccaaaatgtgaattcagaattggtctaagtgtggtcctctagagcctatcaataaaggaartgcaaaacagcattgatttcactgctgccaaagtgcccagcttcgatctacgaccatattgaccccattcccagaacaacatgtaagaaaatttatacaacagcagcatcaagtcacttcagttatgccatctgtgaatatcaaagagaatttgattttcagattgtgctaatacattggttgaaaatactgcaattcctgtcaaaacaatgctgtggg

SEQ ID NO: 75704 - DNA, 552 bp, Homo sapiens
tttggatattgtcagtaaagaactgtgattttaaaaaactgtaatgtggagatacacatatatatgcgtatcaattacttaagattaacaatcataaccatcagataggcaaagagagcgaagtgggtagaataacatagcaatctaagaaataaaataaggaaaatttttgttgatagtttgtactttctttcactttgaaggagggatactttgctgtctaccctatcagatgtcaaatcattaacatctactttttggataagtgtttaccaaaatgtgaattcagaattggtctaagtgtggtcctctagagcctatcaataaaggaagygcaaaacagcattgatttcactgctgccaaagtgcccagcttcgatctacgaccatattgaccccattcccagaacaacatgtaagaaaatttatacaacagcagcatcaagtcacttcagttatgccatctgtgaatatcaaagagaatttgattttcagattgtgctaatacattggttgaaaatactgcaattcctgtcaaaacaatgctgtggg

SEQ ID NO: 75705 - DNA, 930 bp, Homo sapiens
aatacacatgtacagcatacatgcacaacttgagtgtatacacgtgcacatacatacagatgtgcacacatgtgcatggatacacattcacacacatgtgcacacactatttctgtctctggaaggcagattcctccttgactataaagatacagttaagtgttggtggcagcactctgggtgcagcaatgtgtggaaagaaaggagagacggcagttataatttatacagcaggagggacaactgccttctcttctgtatgagttcaagcaacagggagagggctgtagtaagatattttttaaaaacgataagagtgatgttgcctcaaacaagactcaatgctgtgactaggcatgagaaaaaatagaaatctgtagctgttttctcccacttgacaatttcagatgactgtgtttgactcggggccttgtacatggacgagtataaacttgttatgtgcagaaatttctttccagttgcatgaagccttatatcctgtgcatctcaggtgtccagtcataactctcaagaccggagtagcccacctcctcttctcaggaattagccacagcggtgaagggtctagaaacttctctgtacaactaacaagagagggcaggaggatgacccggatgagaatgaacaggcttagagggaacttagtcacccttttcaaatatttgaagggatgccagacaggagaggaggcagactgatgctttcaatcaccaaaggaaagctctaggagccagcgatggaaactccatggaagcggatcatcactcagcagaaggaagaacrttttaaccgctgaagagcgccaacgttttggcagcagggagcttcatgtccctgtgtaatgcctttgtagatctcatccccaagcagtaaaatttactggcaagctaattgaattagggtcatgtt

SEQ ID NO: 75706 - DNA, 1268 bp, Homo sapiens
tatcattctcatacacatataaataaatagatgtttaagaatatatttaactcgtaggatgtgagggaattaaacagatgttataaccgattcaaagaaaaaatcaaaatgacacataaaatatatgcagcaaaggaacattgagatcaactgcaaataagcatgaaattggacggagaggaggtcaatgaaaccactatcagcaagtacagaatttgcacatctgtcctatagtttktgtaagctgcctataatttacaaagaattgcataggaatgcaaaattaatgcacagggttgaattctgataaccctgaaaggtgtgctctagatcatgcagttttctagtgaaacacaagactcctacacacccaagcatacagactctttagattcatgattggtcatgttttatgggaagacagccacgctcatgtctcagtggctgctccatctacacaacaccagtgagcagttaccgtggagaccacccggcctccagagcatttactttttggctccttacagataaagtttgccgacccctatttctatcaatatatggcattgcaaaccatatttagttagttatgcatttatttcctaattaatgagtgcccagtgggtgcactggcatctcccccttaatggaattcttcttagccatggacatttgtaagctaagacttaggatcatcactaaacataaaacgatacacaaaccaagtggctaccaactttttaaattattattttgagttttgttaaatgtcttatttttaatacactagcaaacaaagatagtgctgtctgaacaatgaagatgcccatccaactgtctaatctagaccctgaatactgaaaaggctctctccctgacctgaccttggtcaacctcccctaagctgtctttcaaggcctgtccttgggcctatttcttaagaacaagaatcttgttcaagtcagttcaatgagagtcccctacccttgattccaatcactcttcgtagctgatcacaaccctcactcctcagcatccctcagttgacatctgcccacattgaactgccttcaacaagactcctgtccagcccatttatccagaattttttcccccgatgttccctcttagtaattttccattcactgacccccgaccctgctccaaggctgtaaattctcacttttcatttttgtatttgaagttgaacccaatgtgtctttcctagtcattgcagtagtcccgttgaataagatcttccatgccat

SEQ ID NO: 75707 - DNA, 1268 bp, Homo sapiens
tatcattctcatacacatataaataaatagatgtttaagaatatatttaactcgtaggatgtgagggaattaaacagatgttataaccgattcaaagaaaaaatcaaaatgacacataaaatatatgcagcaaaggaacattgagatcaactgcaaataagcatgaaattggacggagaggaggtcaatgaaaccactatcagcaagtacagaatttgcacatctgtcctatagtttgtgtaagctgcctataatttacaaagaattgcataggaatgcaaaattaatgcacagggttgaattctgataaccctgaaaggtgtgctctagatcatgcagttttctagtgaaacacaagactcctacacacccaagcatacagactctttagattcatgattggtcatgttttatgggaagacagccacgctcatgtctcagtggctgctccatctacacaacaccagtgagcagttacygtggagaccacccggcctccagagcatttactttttggctccttacagataaagtttgccgacccctatttctatcaatatatggcattgcaaaccatatttagttagttatgcatttatttcctaattaatgagtgcccagtgggtgcactggcatctcccccttaatggaattcttcttagccatggacatttgtaagctaagacttaggatcatcactaaacataaaacgatacacaaaccaagtggctaccaactttttaaattattattttgagttttgttaaatgtcttatttttaatacactagcaaacaaagatagtgctgtctgaacaatgaagatgcccatccaactgtctaatctagaccctgaatactgaaaaggctctctccctgacctgaccttggtcaacctcccctaagctgtctttcaaggcctgtccttgggcctatttcttaagaacaagaatcttgttcaagtcagttcaatgagagtcccctacccttgattccaatcactcttcgtagctgatcacaaccctcactcctcagcatccctcagttgacatctgcccacattgaactgccttcaacaagactcctgtccagcccatttatccagaattttttcccccgatgttccctcttagtaattttccattcactgacccccgaccctgctccaaggctgtaaattctcacttttcatttttgtatttgaagttgaacccaatgtgtctttcctagtcattgcagtagtcccgttgaataagatcttccatgccat

SEQ ID NO: 75708 - DNA, 652 bp, Homo sapiens
gttgtgattaaattgggcagatcagataacccagaatgatctccacacctcaagaacttaaatcatatctggggaagccattgtattatgtgaggcaatacatttgcaggttctgggattaggacatgggcatctttgaggggctattcttgcttttattttttatttattttcatcttttatgatttttttatttcaatagattttttgggaacaggtggtgtttagttacatgamtaagttcattagtggtgatttgtgagattttggtgtacccaatgtgtagtctcttatccctcaccaccccccacccttccccccgagtcctcaaagtccattgtaccattcttacgcctttgcattctcatagcttagctcccacttataagaatatacaatgtttggtttcccattcctgagttacatcacttagaataatggtctcaattccatccaggttgctccaaatgccattatttcattcttttttatggctgagtagtattccatggtgtgtgtgtgtgtgtgtgtgtgtgtgtgtgtgtgtgagagagagagtgtgagagtgtgtgtgtaccacattttctttatccactcattaaaggatgggcatttgggctggttccatatttttgcaattgcaaattgtgct

SEQ ID NO: 75709 - DNA, 652 bp, Homo sapiens
gttgtgattaaattgggcagatcagataacccagaatgatctccacacctcaagaacttaaatcatatctggggaagccattgtattatgtgaggcaatacatttgcaggttctgggattaggacatgggcatctttgaggggctattcttgcttttattttttatttattttcatcttttatgatttttttatttcaatagattttttgggaacaggtggtgtttagttacatgaataagttcattagtggtgatttgtgagattttggtgtacccaatgtgtagtctcttatccctcaccaccccccacccttccccccgagtcctcaaagtccattgtaccattcttacgcctttgcattctcatagcttagctcccacttataagaatatacaatgtttggtttcccattcctgagttacatcacttagaataatggtctcaattccatccaggttgctccaaatgccattatttcattcttttttatggctgagtagtattccatggtgtgtgtgtgtgtgtgtgtgtgtgtgtgtgtgtgtgwgagagagagtgtgagagtgtgtgtgtaccacattttctttatccactcattaaaggatgggcatttgggctggttccatatttttgcaattgcaaattgtgct

SEQ ID NO: 75710 - DNA, 652 bp, Homo sapiens
gttgtgattaaattgggcagatcagataacccagaatgatctccacacctcaagaacttaaatcatatctggggaagccattgtattatgtgaggcaatacatttgcaggttctgggattaggacatgggcatctttgaggggctattcttgcttttattttttatttattttcatcttttatgatttttttatttcaatagattttttgggaacaggtggtgtttagttacatgaataagttcattagtggtgatttgtgagattttggtgtacccaatgtgtagtctcttatccctcaccaccccccacccttccccccgagtcctcaaagtccattgtaccattcttacgcctttgcattctcatagcttagctcccacttataagaatatacaatgtttggtttcccattcctgagttacatcacttagaataatggtctcaattccatccaggttgctccaaatgccattatttcattcttttttatggctgagtagtattccatggtgtgtgtgtgtgtgtgtgtgtgtgtgtgtgtgtgtgagwgagagagtgtgagagtgtgtgtgtaccacattttctttatccactcattaaaggatgggcatttgggctggttccatatttttgcaattgcaaattgtgct

SEQ ID NO: 75711 - DNA, 621 bp, Homo sapiens
gagcatgcctgtttgcaccccagcaatatatggaggtagtagggttgatgtttttatggttggcacttgaacagctgctattctcttttagggttacccaccgtttaaattttcatggccactagagggcaatacagatctatttttttaaaatacagcaaaggtttttgttttttttttwaaatgttacacgttcttaaatatgtgagtaatttatataaatatatattatatatttttatgtgcacatatatacagggaagactttttctttttgatgatgatgaggagaacaatgctatgtgccaggccatgctgattgttaacattgttagatgtaaacaggagacaccatcagtcctcagcagagacctaagacctgagtaacttagactccacctaggtagttacacatggaggagaagcacaaacagatggttttcttccctttgcttccagcctcctagagctatgaattctagcattcacttacgtagcacaggaggagtgagctagcagaaagtttaagagcagagaccataggggtgtactactacccaagttcaaatcctggctatgccacttagaagacatgggattgtaaaagaaaataaaacctca

SEQ ID NO: 75712 - DNA, 1305 bp, Homo sapiens
agtccattggttcatggtatacacagaagaataatagcctatgatatttgctgtttctttgagtggcaaacatatactattagtattattgttatcatggtcatgtttctgaacactaaaacttaagttataagtattcttattaaaatcaagataaagacaatttctatttttcagagtaataaaatgtaagtggctgggcatggtggctcatgcctgtaatcccaacattttgggaggctggggtatgtggatcacctgaggtcaggagtttgtgaccagcctggccaatgtgatggaaccccatctctactaaaaatacaaaaattagctaggcatggtggcgggcacctgtaatcccatctacttgagaggctgaggcgagggaatcgcttgaacccaggaggcagaggttgcagtgagccaaggtcacgccattgcactccagcctgggtgacaacagtgaaactccatctcaaaaaaaaattaaagtaaaactgtttgccaagttacatatatatgtgtatgtgtgtgtgtgtgtgtgtgtaagagagagagagtgtgtgtgtgtgtgtgtgtgtgtgtgtgtgtgtgtatttaaaagttggctgggcacagtggctcaagcctgtaatcccagcactttgggagaccaaggctggaggatcacttgaggccaggagttcgagaccagcctggccaacatggtgaaacccccatctcaattaaaaatacaaaaattagccagrtgtggtggtgtgtgcctgtaattccagctactcaggtggctgagacatgagaatcacttgagcctgggaggcagaagttgcagtgagcagagatcatgccactgcactccagcctgggtgataaactgagactgcctcaaaaaaaaaaaaaaaaaaagcattttaacaaactcgttgacccagaaactccaattttaggaatatattcaatagaaaaaaattaaaaagtacaaaaatatatacagctagagctattcacataacactgtatgagtggaaacaaccaataggggactggttcaataaattatggtgtattaatacaactgaattttatgaaaaagaatgaggtgtgtcttcatatgctgatatagaatgattttcaagtgcattgttaagttaattttgctgtcatgtaaataaaaacgggaacataagtatatagattatttatagaagaataatgaaaagctgatgataatgtttatttctgggggaggagaacaggaaaaagatttagtctttgtatttgatttttcaaaatatcacgtactgt

SEQ ID NO: 75713 - DNA, 1305 bp, Homo sapiens
agtccattggttcatggtatacacagaagaataatagcctatgatatttgctgtttctttgagtggcaaacatatactattagtattattgttatcatggtcatgtttctgaacactaaaacttaagttataagtattcttattaaaatcaagataaagacaatttctatttttcagagtaataaaatgtaagtggctgggcatggtggctcatgcctgtaatcccaacattttgggaggctggggtatgtggatcacctgaggtcaggagtttgtgaccagcctggccaatgtgatggaaccccatctctactaaaaatacaaaaattagctaggcatggtggcgggcacctgtaatcccatctacttgagaggctgaggcgagggaatcgcttgaacccaggaggcagaggttgcagtgagccaaggtcacgccattgcactccagcctgggtgacaacagtgaaactccatctcaaaaaaaaattaaagtaaaactgtttgccaagttacatatatatgtgtatgtgtgtgtgtgtgtgtgtgtaagagagagagagtgtgtgtgtgtgtgtgtgtgtgtgtgtgtgtgtgtatttaaaagttggctgggcacagtggctcaagcctgtaatcccagcactttgggagaccaaggctggaggatcacttgaggccaggagttcgagaccagcctggccaacatggtgaaacccccatctcaattaaaaatacaaaaattagccagatgtggtggtgtgtgcctgtaattccagctactcaggtggctgagacatgagaatcacttgagcctgggaggcagaagttgcagtgagcagagatcatgccactgcactccagcctgsgtgataaactgagactgcctcaaaaaaaaaaaaaaaaaaagcattttaacaaactcgttgacccagaaactccaattttaggaatatattcaatagaaaaaaattaaaaagtacaaaaatatatacagctagagctattcacataacactgtatgagtggaaacaaccaataggggactggttcaataaattatggtgtattaatacaactgaattttatgaaaaagaatgaggtgtgtcttcatatgctgatatagaatgattttcaagtgcattgttaagttaattttgctgtcatgtaaataaaaacgggaacataagtatatagattatttatagaagaataatgaaaagctgatgataatgtttatttctgggggaggagaacaggaaaaagatttagtctttgtatttgatttttcaaaatatcacgtactgt

SEQ ID NO: 75714 - DNA, 739 bp, Homo sapiens
ctgtgcccagctatcaccaaaccctcggctgatagaaaaatgcaagttagctagatgcaaccttgttgttatcagcacacagcaccagcaccaccctataaaatccctagcaagcctttgtctccttgcattcagcttctctcttactaatctgcatgttgcactcttgcaacacatttttatactttctctaataagtctgcttttctttacctacaactgacttgataaattcttcttaccccaacaccactggcccatatagctcctactcacctgcaacaactagttcatgcattaaatcattattgattaatgcagtggataatgaagtactacattttctgtaatggtagctttgggaagaaaaaagagcaatactcaattttatgaaggacaaggagcaattgtaaaggatttcattatgcttcaccttgcacatggcacaattaagtcaacaaagagaccttcctctttagatgcaargactgtaggacctgaagctgggaagcattagactagaggcttctgcaaagtgtgggattaaagttggtatttatagataggtttcatgagggacaaaaagggatctattttgatcagattttatattcatactcggggatcagcttccagcccagaaatcagaatcaggctccaggacttgtagttggaatcaatacaagtgggaaaaaaaaatctaccagtgaatcagaagtataggccacctcaatagttt

SEQ ID NO: 75715 - DNA, 1519 bp, Homo sapiens
ccatggtgaagaggtggcattrcctctttcttctcctaagcatgtcctccagttacctgtgcctcttccccagctcctctttcccccttctcagatttgcctgattaaccactatatacaaatatggtggggaggtggaattctgtataatgtgtttcactgcgtgctgttggcatctttctctttcaccccaaaatggttttgccctgactggtcagtggtaaatcttcagggctcctggagtccactagaacctgagcccactcccatcacacagccccactacggccatcagcagttataagaaagtggtaagagaatgatgtctgtgcttaggcctccaaagccctagaatagtccacagctggggcccagtgtgtgagaacctgggactctctgctcttactaactcagccttttgtctttctccatttttctatcctgagtgtgtcagctgtgaagtcaccaacagaaatctcacagagcatgcaccagcctcctccacctgcgcatggctcctctgcctgctgcttctcccgggttgtgggggctctgtgggcagagatgagtttaagttcagaaaatgacaagggacccacgtgtgtgttcctggtgataagggctcctgctgctctcctctcccacttctgcctcctctcatggcctcagccagcaccaggaggcatcaccaagctccatgggcccagccgggccagcggggcaccccctcctcctgcctgctcattgcacaacacctggctctgcctccccatcatctggcacttgtaggaccagtgccagggactgggtcatgaatcgggagcagagccctatttgctatttccaaaaatatctacccctgtgtggtttgaatttctctggcatttgtcaaccctctgcttatttagcattttgcctctgatggctgaaattttaggttcatttcgcagcaccatatcctatctctccaactagatagtaagcttttggggaaccaggtcgatgtcccttcatattagctgaccaaaaccttgcttgaggtgttaaagatttcaaaattcccagaagcactgtctccataatttgtatcttggaattgttgtgattcaggtggtcttggcctcttggcctcaaaatacccaagttgaagagagaagggaaaagccaggagtacatgggcctgatgccagatgaagcctcaagcatgccagcaatttaaactagaggatcatggtaaagtgacatcatcttggatgttattggcatccaaggggtggggccctccagccgtgaatgatggatggctttcatcttgatgaccaactctaatgcataagagtgactgtctggggtcctatgtagaagaggaccctgaggttgcacccatgactggtgggaaagattgacgggctcattggcactgtttgcatgggtctagggaagagagagagtgtgctctgttgggcactgttcttctctgaacagtgctgggagtttggagttgggtgaatggcagaat

SEQ ID NO: 75716 - DNA, 271 bp, Homo sapiens
caaacagctttgaccaaatgtaacctgctactattgacagtaaccttacctccatttgtttcactgcatcacttgctttccatcttggtttttttgagaggccatgcctttggatatctcccacgcactcagtattcatacatgcataaacctggaaaggctagagagtaaacaatcctgggatagcatttgacaaagagggtaagaaccatgaaacaaatgatctcctattatatctcycaagcagatcattctaaggccctcagaggat

SEQ ID NO: 75717 - DNA, 574 bp, Homo sapiens
cttcttttttttatttttttgggagacagagtcttactctgtcacccaggctgaagtgcaccagtgcaatctcggcttaattcaacctccacctcctgggtttgagcaattctcgtgcctcagccacctgaatagctgggactacaggtgcgccaccacatctggctatttttttttttttttgkattttttgtagaaacaaagttttgccatattggcctggctggtcttggactcctgccctcaagtgatccatctgcctcgacctcctaaaatactgggattataggcataagtcacggcgcttggtctgttaactccttatttatgtttcattctatagattctacaccttaacatggagaggtcgttttatgatatatttatttatatattaatatatgtatataatagtatatatttaatatatagtaggtatgaacacctatttctgtaattagtaaattagaaaatagtataacatttttgaaaactcaaattttatgtaatactgaaatgatttcatttttgaaacagtcaaggcttagtttaatttttttatttatcataagaa

SEQ ID NO: 75718 - DNA, 853 bp, Homo sapiens
tgcaactagaaaggagagtagcgagatcaagaaactgaacactttgctatatatrttctgttttttgtttgtttgtttgtttgtttgttttgagaaagagttttgcattttcacccaggctgaagtgaagtggcacgacctcggctcactgcaatctctgccccctgggttcaagtgattctcctgcttcagcctcccgagtggccaggattataggcacccaccaccacatccggccaatatttgcatttttagtagagatggggtttcaccatgttggtcaggctggtctcaaactcctgacctcaggtgatccacccgcctcggcctcccaaagcgctgagattacaggcataagccaccacgcctggcctatatatgttttgtgtttttaaaaacttttcaaaattttaatagtgaaaaattgtaaacatacaattatactagtataattgtatagtgacccaatagagaaacttacactaaatcaatgtatacaacagttagcaagattttgccattttgtcttcatctatatatgtttaatgcaatttcctaatttactattatttcactctcgactttgcatctttttaaaatgggcattttttttcacacaaccatgggactgtttttacatcagacaaacgtaacaatctcttggtatcacctaatgccaaattcatattcaaatttctctagttggcttacttttttttctcccctcccttcctttcttcctttccttctttctttccttccttccttcctccttccttccttccttcctttcaacagttggcatgtttgaatcacaatttcagatccacacactgcatttggttgttatgtc

SEQ ID NO: 75719 - DNA, 1047 bp, Homo sapiens
ctgccaggtaaatccctttgccatcccatgggaaatgtcaaatcaggggcaaagtatgggtgctctgtgtttgaatccaaggatttgggtcagaacagatggtagtgggaactttcattcttaccatctgcctctgaggatacttggatggacctcagactgcctggaaacttctagaaaaattctaggttccacaastcaagtgtcagaggaattctcatgaagtctaggggatggggcagaacagtctgaaatacatgaggttcacaggtggcttcgtgcaatacttctcaggcttcctgtatgttagacttatctacggagcctataaacatgcagatccctgagacacattccctgggattctaattcataggtcctggagttgggattagtaatccacatttttatgagcattccaaactgattctaatgcaacaaggtcatataacaaactccacttagaaaaacactgatttatgaaggtgttggcaaagtaagcacttaaatcaatctgttatggtaagtatctggaccaagaatgggttcctcaggaattataggaggatgactatcagcaacttcccctgtttgagcactgccttgtgcctaagcagacttcctcagcaaccaggcttctgacagcctttaatcatatgcattcctgtagttaggtgaagctatcctagaggtcaaggatggtagcaagtaaagggaggaaaccttctttctgttggggccagactgatgagctcagtggggaaatcccagtgatggagagtgaaatagagcatttccatatcaaccagtatgtctggccacacccctctaagggatactaccacacgggcagccccccatttccaggtggccatattgagtaccataagaaggtgcttccctaaccacaactgattagagaccaagggtgggttgaacccaaggcagccaattatcaattataggatgtgaagtggcatgaaaagacattaattaggccaatcagattaccactgttgggaaccgggaaatgtggagaatccaagc

SEQ ID NO: 75720 - DNA, 1047 bp, Homo sapiens
ctgccaggtaaatccctttgccatcccatgggaaatgtcaaatcaggggcaaagtatgggtgctctgtgtttgaatccaaggatttgggtcagaacagatggtagtgggaactttcattcttaccatctgcctctgaggatacttggatggacctcagactgcctggaaacttctagaaaaattctaggttccacaagtcaagtgtcagaggaattctcatgaagtctaggggatggggcagaacagtctgaaatacatgaggttcacaggtggcttcgtgcaatacttctcaggcttcctgtatgttagacttatctacggagcctataaacatgcagatycctgagacacattccctgggattctaattcataggtcctggagttgggattagtaatccacatttttatgagcattccaaactgattctaatgcaacaaggtcatataacaaactccacttagaaaaacactgatttatgaaggtgttggcaaagtaagcacttaaatcaatctgttatggtaagtatctggaccaagaatgggttcctcaggaattataggaggatgactatcagcaacttcccctgtttgagcactgccttgtgcctaagcagacttcctcagcaaccaggcttctgacagcctttaatcatatgcattcctgtagttaggtgaagctatcctagaggtcaaggatggtagcaagtaaagggaggaaaccttctttctgttggggccagactgatgagctcagtggggaaatcccagtgatggagagtgaaatagagcatttccatatcaaccagtatgtctggccacacccctctaagggatactaccacacgggcagccccccatttccaggtggccatattgagtaccataagaaggtgcttccctaaccacaactgattagagaccaagggtgggttgaacccaaggcagccaattatcaattataggatgtgaagtggcatgaaaagacattaattaggccaatcagattaccactgttgggaaccgggaaatgtggagaatccaagc

SEQ ID NO: 75721 - DNA, 1047 bp, Homo sapiens
ctgccaggtaaatccctttgccatcccatgggaaatgtcaaatcaggggcaaagtatgggtgctctgtgtttgaatccaaggatttgggtcagaacagatggtagtgggaactttcattcttaccatctgcctctgaggatacttggatggacctcagactgcctggaaacttctagaaaaattctaggttccacaagtcaagtgtcagaggaattctcatgaagtctaggggatggggcagaacagtctgaaatacatgaggttcacaggtggcttcgtgcaatacttctcaggcttcctgtatgttagacttatctacggagcctataaacatgcagatccctgagacacattccctgggattctaattcataggtcctggagttgggattagtaatccacatttttatgagcattccaaactgattctaatgcaacaagrtcatataacaaactccacttagaaaaacactgatttatgaaggtgttggcaaagtaagcacttaaatcaatctgttatggtaagtatctggaccaagaatgggttcctcaggaattataggaggatgactatcagcaacttcccctgtttgagcactgccttgtgcctaagcagacttcctcagcaaccaggcttctgacagcctttaatcatatgcattcctgtagttaggtgaagctatcctagaggtcaaggatggtagcaagtaaagggaggaaaccttctttctgttggggccagactgatgagctcagtggggaaatcccagtgatggagagtgaaatagagcatttccatatcaaccagtatgtctggccacacccctctaagggatactaccacacgggcagccccccatttccaggtggccatattgagtaccataagaaggtgcttccctaaccacaactgattagagaccaagggtgggttgaacccaaggcagccaattatcaattataggatgtgaagtggcatgaaaagacattaattaggccaatcagattaccactgttgggaaccgggaaatgtggagaatccaagc

SEQ ID NO: 75722 - DNA, 965 bp, Homo sapiens
agggtcatggacaaggaagccaaagccaatgaccagagtcttgtctgggtgaggattactccacggcctggactagctgcctggggtaccctgaggctgaatgggtggagaagggggtcaccttctcttgtgtgcccctcactactcttgactcacttagtttggagggtttcttgcttcagaaacttagtcctactgaaagaatattcttgattgttgcttgttatgctcagtgctagtgtgagatttttcctcttgctagctgtctgttggcttttgggtctccattctctctgtggactctgtgatgtggggcacataatggcaataggaagaaggttttactcctctttaattggcaagggtcactttctttttgaagttggttctgagaacagcttcccccaggatatagaacatggccccttacatttttgtgcacactaggcaattcctcaatgcctggagctgacagcccagcacctccctgattgccagctttccatccatggrtgcatgggttatgcctgcactgcccacttgctttcctcacctgctgctgcagaagacaggttgcttttttggttgtcctctctgctttgcattctttcccagccagtctggacttactccctttccgtcttccacctgttgtcaaaaacccagaggcttcaagttctgtgtaggatggtaagtatcagagaaaaacaaaagaacttccaagtgccccagtgccagatctttaaggattttccttccctctcttcttcctttcctttatgctacttggagactctccgtttcccatccaacaattcctcacagtttacagaatatccagattatttgttcagaaacaatatctggttctaccttttcctcccacccttttcctcttccacctaccctttcccttcctcttcctggtttcctgagcacccacacaagagtctcctctcaggttg

SEQ ID NO: 75723 - DNA, 965 bp, Homo sapiens
agggtcatggacaaggaagccaaagccaatgaccagagtcttgtctgggtgaggattactccacggcctggactagctgcctggggtaccctgaggctgaatgggtggagaagggggtcaccttctcttgtgtgcccctcactactcttgactcacttagtttggagggtttcttgcttcagaaacttagtcctactgaaagaatattcttgattgttgcttgttatgctcagtgctagtgtgagatttttcctcttgctagctgtctgttggcttttgggtctccattctctctgtggactctgtgatgtggggcacataatggcaataggaagaaggttttactcctctttaattggcaagggtcactttctttttgaagttggttctgagaacagcttcccccaggatatagaacatggccccttacatttttgtgcacactaggcaattcctcaatgcctggagctgacagcccagcacctccctgattgccagctttccatccatgggtgcatgggttatgcctgcactgcccacttgctttcctcacctgctgctkcagaagacaggttgcttttttggttgtcctctctgctttgcattctttcccagccagtctggacttactccctttccgtcttccacctgttgtcaaaaacccagaggcttcaagttctgtgtaggatggtaagtatcagagaaaaacaaaagaacttccaagtgccccagtgccagatctttaaggattttccttccctctcttcttcctttcctttatgctacttggagactctccgtttcccatccaacaattcctcacagtttacagaatatccagattatttgttcagaaacaatatctggttctaccttttcctcccacccttttcctcttccacctaccctttcccttcctcttcctggtttcctgagcacccacacaagagtctcctctcaggttg

SEQ ID NO: 75724 - DNA, 965 bp, Homo sapiens
agggtcatggacaaggaagccaaagccaatgaccagagtcttgtctgggtgaggattactccacggcctggactagctgcctggggtaccctgaggctgaatgggtggagaagggggtcaccttctcttgtgtgcccctcactactcttgactcacttagtttggagggtttcttgcttcagaaacttagtcctactgaaagaatattcttgattgttgcttgttatgctcagtgctagtgtgagatttttcctcttgctagctgtctgttggcttttgggtctccattctctctgtggactctgtgatgtggggcacataatggcaataggaagaaggttttactcctctttaattggcaagggtcactttctttttgaagttggttctgagaacagcttcccccaggatatagaacatggccccttacatttttgtgcacactaggcaattcctcaatgcctggagctgacagcccagcacctccctgattgccagctttccatccatgggtgcatgggttatgcctgcactgcccacttgctttcctcacctgctgctgcagaagacaggttgcttttttggttgtcctctctgctttgcattctttcccagccagtctggacttactccctttccgtcttccacctgttgtcaaaaacccagaggcttcaagttctgtgtaggatggtaagtatcagagaaaaacaaaagaacttccaagtgccccagtgccagatctttaagkattttccttccctctcttcttcctttcctttatgctacttggagactctccgtttcccatccaacaattcctcacagtttacagaatatccagattatttgttcagaaacaatatctggttctaccttttcctcccacccttttcctcttccacctaccctttcccttcctcttcctggtttcctgagcacccacacaagagtctcctctcaggttg

SEQ ID NO: 75725 - DNA, 965 bp, Homo sapiens
agggtcatggacaaggaagccaaagccaatgaccagagtcttgtctgggtgaggattactccacggcctggactagctgcctggggtaccctgaggctgaatgggtggagaagggggtcaccttctcttgtgtgcccctcactactcttgactcacttagtttggagggtttcttgcttcagaaacttagtcctactgaaagaatattcttgattgttgcttgttatgctcagtgctagtgtgagatttttcctcttgctagctgtctgttggcttttgggtctccattctctctgtggactctgtgatgtggggcacataatggcaataggaagaaggttttactcctctttaattggcaagggtcactttctttttgaagttggttctgagaacagcttcccccaggatatagaacatggccccttacatttttgtgcacactaggcaattcctcaatgcctggagctgacagcccagcacctccctgattgccagctttccatccatgggtgcatgggttatgcctgcactgcccacttgctttcctcacctgctgctgcagaagacaggttgcttttttggttgtcctctctgctttgcattctttcccagccagtctggacttactccctttccgtcttccacctgttgtcaaaaacccagaggcttcaagttctgtgtaggatggtaagtatcagagaaaaacaaaagaacttccaagtgccccagtgccagatctttaaggattttccttccctctcttcttcctttcctttatgctacttggagactctccgtttyccatccaacaattcctcacagtttacagaatatccagattatttgttcagaaacaatatctggttctaccttttcctcccacccttttcctcttccacctaccctttcccttcctcttcctggtttcctgagcacccacacaagagtctcctctcaggttg

SEQ ID NO: 75726 - DNA, 538 bp, Homo sapiens
gcctattgagattggctcagaatttgggacaggcttgattgaccctgcagttagaaccatcagcagaacracctgcaaaaggtagagaaagtagaaagaggaggcagatctgagaataaatgtccccttctcccacaccccagaaacatctgatcacaggtttcactccctcagtggttgtgactcagtgttgccctcctgccaccaccctattttctcaataacaacagcattgctcaggggcgactctgcctcccatcaggacacaaaagctcctatgtttcccattgcaccccatcactgtcacagcaagtcactgatgaactgtggaacaatccaatgggtcactcttgctttttaaaatggttccctagccaggcgtggtggcaggcccctgtaatcccagctacttgggaggctgaggcaggagaattgcttgaacacggaaggcagaggttgcagtgagccaagatcgcgccactgcactccaatctgggtgaaagagtgagactccgtctaaataaataaacaaataaaa

SEQ ID NO: 75727 - DNA, 538 bp, Homo sapiens
gcctattgagattggctcagaatttgggacaggcttgattgaccctgcagttagaaccatcagcagaacaacctgcaaaaggtagagaaagtagaaagaggaggcagatctgagaataaatgtccccttctcccacaccccagaaacatctgatcacaggtttcactccctcagtggttgtgactcagtgttgccctcctgccaccaccctattttctcaataacaacagcattgctcaggggcgactctgcctcccatcargacacaaaagctcctatgtttcccattgcaccccatcactgtcacagcaagtcactgatgaactgtggaacaatccaatgggtcactcttgctttttaaaatggttccctagccaggcgtggtggcaggcccctgtaatcccagctacttgggaggctgaggcaggagaattgcttgaacacggaaggcagaggttgcagtgagccaagatcgcgccactgcactccaatctgggtgaaagagtgagactccgtctaaataaataaacaaataaaa

SEQ ID NO: 75728 - DNA, 538 bp, Homo sapiens
gcctattgagattggctcagaatttgggacaggcttgattgaccctgcagttagaaccatcagcagaacaacctgcaaaaggtagagaaagtagaaagaggaggcagatctgagaataaatgtccccttctcccacaccccagaaacatctgatcacaggtttcactccctcagtggttgtgactcagtgttgccctcctgccaccaccctattttctcaataacaacagcattgctcaggggcgactctgcctcccatcaggacacaaaagctcctatgtttcccattgcaccccatcactgtcacagcaagtcactgatgaactgtggaacaatccaatgggtcactcttgctttttaaaatggttccctagccaggcgtggtggcaggcccctgtaatcccagctacttgggaggctgaggcaggagaattgcttgaacacggaaggcagaggttgcagtgagccaagatcgcgccactgcactccaatctgggygaaagagtgagactccgtctaaataaataaacaaataaaa

SEQ ID NO: 75729 - DNA, 2465 bp, Homo sapiens
catggggtgttcatggatgtgtttacaatgaaaaatgaagatagactatggtagagttgatgagtgtttgaaaatattttactatccactgcgctcctcttcacaggtccagtgcactccctgccccctgactttaggctgggccacgtgacttactttggccaatggaatatttgtgactaagatgcaatgcaaggcttgaaaaacatttatgtgattgggctttgcactcctgcacttttgtcaactctagctggcaacgcgatgagaagatcccaggaagggtgtaagaggctcagggagcagagcccgctccacctcattacgtaccaataccacctcagccacgctgaaaactcacgagcaagaaggaagtgcttatttctatctgccttatttttgtagttgttacgcagcaatattatggcaagagttaacagatatacaacttaaatttcaaaaaatagggaatttaataaattgcaacacatcacatagtattaaaccgtcattattattaatgacaatgatctatatttatatatacatgggatatgtctaaaacattaacaaaaaaagtggcggggcatggtggcacatgcctgtaatcccagcactttgggaggccaaggtgagtagattgcttgagctcaggagttcgagaccaacgtgggcaacatagtaagactttgtctctacaaaaaataacaaaaattagccaggcatcctggcatgtgcctgtggtcccagctacttgggaggcttgggtgggaggatcgcttgagcccaggcagcggaggttgcagtgagctgagatcccaccactgcactctggcctgggtgacagagcgagaccctagctcaggaaagaaagaaaggaaggaaaggaaggaagttacaaacaatgtatgtccagcatgaatctcttattttatacaatataaacacatatgtgtgcttacacacacagaaaagaacctggaccgaaatacacaaaatgttaacagtgtttctctctgagggggaagaatataaatatgttcacttttttctttctcaatcactattttttgcattaaaaaactcatagcagttttaagtgcaaatgaaaataataaagttatagagttttctaactgtaagctgccaggtatcactggccttcaacaggaaacacagttttttttcaaaccttctcctaaagagtgaagggtacgtacttttaaaatctggcaactaaaagctgaagtatgcttcaaaatttaaaccaaatccccatcaacatataaaaaacagcccagcctgtttcttccccaaatttgtctgtttattccatcgactaatgaaaagtctctgtttcagactccgagatgcatatctgtgaattagtgctcagtttcccaaaactaaagttaaccttctttcctgcctctcactcttcatttgtccttgatccttccataaaaccccaaatccagaagcaatgattaggaaactgcagactctagtaaaagtaatttcactagtgtcagagaaagagaaaggttacccaattaaaagaactaaggcttggcatcagaaacagaagttgtgaacatgacaaataacatgaacaaatggagatggagaatgttatttaagcctaatgggaatcggtgcaaaatatgtccayctagtaccttactcaggtaggggagtcattgaaaacacctgacaaaaaaaaaaaaaaaaaaaggcagaagaaagaaagtaaagaaaagccaccagtgaacaagtgatcagcatttacagatcccagacatggcttgccaaaaaaaaaaaaatacactctgcctaattttcctgcaggtgtttctgttcccctcgactgccactgcactactgggggcccacagctctctggtgttaaggattatagttgtttcagttaaaggatacaaagcagacctgtggtttcaggaaatattaaagacctgttcacttgcagaaaaatgacagaaactttcatctctgttaaccagcaaacagtcccttttctaatggcccattagggaagcccaagaggaataacctctcagaacactttgcccagtgtctggaaaaggctcatatgattctcgtcctttgtggtcccctcatttggttgccagagtcttccctttatcagaaatacagtccccaatattttattattgcacatcccataattactcttggcataactgtgttttaggccacatagaagtgatctgaattttggctgctacctaccattgaaattctttctacttgcctcctactgacattcaaggtctaaatctctcttcacaatgctgcactattttataacaggttactacaggtgctgttgtgactttgattttgttcatcttttgggtggagtccaccaaatcgggttgtctataaaaagttgcatttttctgcttaataaatagatcctcaca

SEQ ID NO: 75730 - DNA, 595 bp, Homo sapiens
atcagggcagaaggactgtagtactgagcactagaaacatgtgtttgcatcactttggaagaggacaaacatcacccagcccatgctcagctgttccacacaagaaaatacaagccagcattttgcatatcattccaggtctaccctcttgacttattttgtagttgaattcagtccagtgttcacataacatcctgagggaagggttgtcctagtgactttacaactgattgcagacaagcagtttcagaatttttaaagtaatgatttttaattctcagggaccatcatgcagcatttgtgtgtatataatgctttctccaagaaacactcactcactctcaaygggaacactgtctttcgtgaactgcctgtgaccttcaggatgaaaagccagagtcccaccacacagagtcacagattttggaagcagaatggactttgacaacatctgcctggacccttgtagctcatggagaggcaatttggacaggagcaagtcagtggcagagtagggccaagaactcgagtttcctgaccaccattcgaagctgtcttttagaagctgaaggaaagcttcaccaccagatcttat

SEQ ID NO: 75731 - DNA, 696 bp, Homo sapiens
ggatcccattgactataaaattcctagtacctctaaaaatatttcattttcctcctggggatttttttttttattatacagcatacttttcccatctctaacccaacacacagattttaacatttttgaaattagattgtttcacaattagaacacaaattaaatttaatcattttttctcttttttcccttcttctcctcctcttcccctttctcttcctccccttctttctcctcctccttttttatcctgcaaagttgtcattaaattgataatgtatctcagaattaaagaaaaacacaaaactcaaacataaacaacacaaccactaccaccacaaacaataactaacctgtcccaaaggcttggttgatrtgtaaatagatttgcatactgaaattggagaaagagaattttcaagtgttattactacttaatttcttttgagttcaggccctcttccaaggaataaatcataatttatctgtagcagctatgatccctgggtttccctggccaagggtgacagcactgtatcagaaacaaaacacttactttttggaactaaaatgtctcaatacatttgactatgtcatcatctgcatgtatgtatgactaatctacgtgacgccaatcatttctctgtagtcaactgagaatacttaggcgcccctctttactccaggcacatccaa

SEQ ID NO: 75732 - DNA, 1101 bp, Homo sapiens
gacaaataacttaattgagccacaaagataggtttaagaaaatagagtgacaagtatctgtcatcctgaaatgcacatactctatttaaatttattttaaggcatcatgaaagccaaatataatgtagattgggctaatgatgttctatttgtttttttaaataggccgatgtggtatttttcactgggtgctattgacattgggtgggcaattctttcttgtaaaggactgtcctgcacattgccaaataattttcatttttcctcactcccaaccctcactgacgccccagtcactagttgtgtatagcacattccctctacattttaggatgccttctagggagacagttccaccctgatttatggggtcaatattaggattagggaatagcattattttttagtaatgtgtgttgtttcacctgaactgaactcaaaatgttgaatgataattgacttttgcttctgctattgaggtctgtgacaccttggtgacacttcggctcatctttcaatatggagactacttctaaaatggacaaagttctttagaagttaaagtttattactctagccaaatattaattaggtttatatatttcttatgtatatgaaaatggttcaacaatttcattaaatgttgatgggttttccactcaattaggcactcaaaaaacatattgattaattttttaaaaagcgcatgaattaaagaattgctgaaggcacaggaagtgaactaagtctgtgacctttctgacacaggctttacctcgtcaataaagttacactttatgatgcaatataaataatagataacaatgggtgatgaacccagagggagaaaatggcaggaggtgaagcattctaagcttggctgtgcattatcttcaacacatttgttgcattgtggtttcatgaggactagacttccagagtgttgcttgctaatggatactaactagaaggtgagaaatctctctgtcacttgctgtggtcagagagagaaaaaatcattgtggaatggttagacactcatccaatagtcaactgactgcctaatgcagaatttatcaraaggagctcaatcttccccac

SEQ ID NO: 75733 - DNA, 753 bp, Homo sapiens
tacatgtgaaataattaaatcatgctgattaatatatctatcacctcacctatactttaggtttttgtggtaaaaacatttaaaatctattcttttagccattttgaaatatgcaacacagtattatcagatatgatcaccactgtgatcactaaacttactcttcctaactaaaatcttgtacccttgaccaacatctcccatttccccattgaaaacataaaattgataatgattgtataaattaggataagcaagtgtgatggttaatattgagtgtcaacttgattggattgaaggatgcaaagtattgttcctgagtgtgtctgtaacaatgttgccaaaggagattaacatttgagtcagtggactgggagaggctgacccaccctcagtctgtgggggtaccatctaatcagctgccagtgcagctagaataaagcagtcaggagaagaccraaaagcagactggctgaatcttccagctttcatctttctcccatgctgatgcttccttggactccaagttcttcagcttttgtactcttggacttacaccagtggtttgccaggggatctcaggccttcagccacagactgaaggctgcactgtcggcttccttacttttgaggtgttggaactcggactagattccttgctcatcagcttgcagacagcctattgtgggacttcatcttgtgattgtgtgagttgatactccttaataaactcccctttatatatacatctat

SEQ ID NO: 75734 - DNA, 1649 bp, Homo sapiens
  misc_feature (1)...(1649): n = A,T,C or G
ccccccaccaccacatcccccaccccaccagcaaaaaacacccctgcataagacataaggacattgctatttatttaggttcttctagcaatggaagaatgaacagagtgtgctggaagcctcaggaagagcactggagtctgcatacaggaaagggcaggtgggggaagcggccaccacagcagatgccagagcctgagcaagacaacacaagatagaaatctgccatgtgggcaagcaggacaggacatttccagggaagagcagaggctacaacacagaggtgtgagagagcctggttttcctaggactttaagggaataataaatagcactgtggagggagtgggtttcctaatgagtgacccatatattgaactccttctacccaaaactagggccattcctacccaaagcagagcccaccccaatccatgaacgttggaaaacagacctgaatgcattttgcttcaagacaagaaagggtcgatgcccagctgagtgtgttctgtnnnnnnnnnnnnnnnnnnnnnnnnnnnnnnnnnnnnnnnnnnnnnnnnnnnnnnnnnnnnnnnnnnnnnnnnnnnnnnnnnnnnnnnnnnnnnnnnnnnnaatggcctttgctccagaggggacactatatcttccaaggctgttcactacataaacatgcttagacgaggctgagaaagacagtccaggacaaaaggaaagtcagtacctttgtgtttaaaggtactgactttgtgtttaagtgcaactgtaagatgcctactttcatagggagttacaaatgtaaatgcgtacagggaccaggcaagtaggtgtgtgagcgaggtgactagatataagaactgggagtagtggggattgcagaagataggagaggccatgctctatttgaaactggcagccaatactcagttccaactgattatttccacggaagaatgaggatcccaagttgtttcacctcttttttcccaaaagaactaggaaatgtgaatttttatgtgctatatcacccaccctttaaatgttggtaatgaattagaatttaaaatacaggtgcagtggctcacagcttaatcccagtactttgggaggtggaggcaggaggattgcttgaggtcaggagtttgagaccagcctgggcaacatagtgagaccttgtctctatcacattaaaaaataaaaataaaataatgttaagtggccaagagaaaacccgaagaagcagtggttggaactgatggagcagccttataaaggaagaagcaggctctgatagacacctgatctcccccaagtgggtagttaaagccctggttgatcacagccttaatggtaagcccaatcaattaagagaacaaaaagctagggattgtggagagaactctgctagaatcacaatcctgtcctcttgccctactccaacttcttctccaagaaagaaagaatagcttattttattgggagttcagacaaaagaaccatgcatgcccggactggctcactcctatccttctctttgagatttgcctatctccaaagaaagtcactggatgtctatgccatatgttttacagcagccaatctacatrgcaagaggggcaggaggtcagggaacagggtcctgtgggctgttta

SEQ ID NO: 75735 - DNA, 1388 bp, Homo sapiens
tgtgggtgcttcacggcctagcagcatcctcagtatcaggccatgtggtctttgctttctccagaatcatcatcatcatcatcatcatcatcatctgagaaggttcttacagagcagctcttggcatccaagcccatccacggaccaggatgccctacagaggcaaaggcagatggggaggggagggctgagacagacacagggaaaaacaaaccttacaacaagacaagttataatacaggaatggaaatgatgtggcaccaatgccaccactccccactaccatatccagtagcagagatgctactcatagtactactcataggacactatataatttccccttaaatgaggttgatgcagcctcagaatccttctcaacacagctctccaggtagctacaaccaattggttgaacttgacatacaggttgcaacctatttttcatcagatccatgataccagaaggaaaggagaaaagytatactcttgaaacaatgacataaaacaagagtagctaaaacttattgagcatttattcatgccaattcctgttctaagcactttacatgtattactcacattttcttctcactacaacaatcttacgatgtgaatactattattagccccattttccataagagaaacctgaggcacgaatcggttgttccatatgacttgttccatgtcacccagtgagaagggagtaaagttaggtttcgaatccaggtggtctggctctaaaacttgcatatttaattagccactatgctgtactcatcctgtccagtgctgggggtatttttagctattgaccatagcaaaagacaaagatgaaatggctttatagttttgcatgttgatataagcaaaagtgacataacattctcaaagactgttctctaaagttttcagagagatgcctttgtcaatcaatgcactttgctctggtcctgcttctcaatgcggccggtctcttcactttttacttccccaatgcagctcatctgtaggcccagtgctggccataccagagcccagcacgcagcatctacattgaagactcctggctgaggcagggcctccccgctctccctcctcaccttgtcaggtcctccagtgcctgtgtatttttctgacccaactgcttgcctaattacagatccctggcacagtctaaactggcccggctagacctggaagtccccggaatccaggcattctgttaacatcaggtgtagaggagaacagatgcagagaaagccagctccaccccgcccatgttgctgatggcaacgagccagatctccaagaaaacaagttcagtggcagaatccaagcgcttaactcggccaccatattacatcttttatagacggaaccga

SEQ ID NO: 75736 - DNA, 752 bp, Homo sapiens
tttttgagtaactgccatactgctttccatagcagctgtccattttacatcccaccagcaaagtacaaggattccaattgccccatatcccacaccaacactggttatgtactggttttttgtcgttgttgtttttctatggtagccatcctaatgggtgtgaagtgccagccgatgtttccaagatcatttgggtgggaggacttgccaacacagcctaaccaaactcatgtggcccagacagttgaatactaggagggcatctttctccatctacttctggtactatcgaagctcctaggtcacaaatccaaatgactccaggtcattcagttataccctcccaagctcctctagctcctgaaaggcagactcattctgtgccttacatatgtccttgatgacttccttggtacctttaamaactcaataatctgtacttacattaacattttaaaaaaacactttttaataatagctttactcagatacaattatcataagataaaattcaccttttcagagtaacacttttttttttattacactttaagttctaggatacaagtgcagaacgtgcaggtttgttacataggtatacacgtgccatagtggtttgctgcacccatcaacccgtcatctacattaggtatttctcctaaagctatcccttccctgtcctcctacccctccgacaggccccggtgtgtgatgttcccctccctgtgtccatgtgttctcattgttcaact

SEQ ID NO: 75737 - DNA, 752 bp, Homo sapiens
tttttgagtaactgccatactgctttccatagcagctgtccattttacatcccaccagcaaagtacaaggattccaattgccccatatcccacaccaacactggttatgtactggttttttgtcgttgttgtttttctatggtagccatcctaatgggtgtgaagtgccagccgatgtttccaagatcatttgggtgggaggacttgccaacacagcctaaccaaactcatgtggcccagacagttgaatactaggagggcatctttctccatctacttctggtactatcgaagctcctaggtcacaaatccaaatgactccaggtcattcagttataccctcccaagctcctctagctcctgaaaggcagactcattctgtgccttacatatgtccttgatgacttccttggtacctttaaaaactcaataatctgtacttacattaacattttaaaaaaacactttttaataatagctttaytcagatacaattatcataagataaaattcaccttttcagagtaacacttttttttttattacactttaagttctaggatacaagtgcagaacgtgcaggtttgttacataggtatacacgtgccatagtggtttgctgcacccatcaacccgtcatctacattaggtatttctcctaaagctatcccttccctgtcctcctacccctccgacaggccccggtgtgtgatgttcccctccctgtgtccatgtgttctcattgttcaact

SEQ ID NO: 75738 - DNA, 752 bp, Homo sapiens
tttttgagtaactgccatactgctttccatagcagctgtccattttacatcccaccagcaaagtacaaggattccaattgccccatatcccacaccaacactggttatgtactggttttttgtcgttgttgtttttctatggtagccatcctaatgggtgtgaagtgccagccgatgtttccaagatcatttgggtgggaggacttgccaacacagcctaaccaaactcatgtggcccagacagttgaatactaggagggcatctttctccatctacttctggtactatcgaagctcctaggtcacaaatccaaatgactccaggtcattcagttataccctcccaagctcctctagctcctgaaaggcagactcattctgtgccttacatatgtccttgatgacttccttggtacctttaaaaactcaataatctgtacttacattaacattttaaaaaaacactttttaataatagctttactcagatacaattatcataagataaaattcaccttttcagagtaacacttttttttttattacactttaagttctaggatacaagtgcagaacgtgcaggtttgttacataggtatacacgtgccatagtggtttgctgcacccatcaacccgtcatctacattaggtatttctcctaaagctatcccttccctgtcctcctaccccyccgacaggccccggtgtgtgatgttcccctccctgtgtccatgtgttctcattgttcaact

SEQ ID NO: 75739 - DNA, 752 bp, Homo sapiens
tttttgagtaactgccatactgctttccatagcagctgtccattttacatcccaccagcaaagtacaaggattccaattgccccatatcccacaccaacactggttatgtactggttttttgtcgttgttgtttttctatggtagccatcctaatgggtgtgaagtgccagccgatgtttccaagatcatttgggtgggaggacttgccaacacagcctaaccaaactcatgtggcccagacagttgaatactaggagggcatctttctccatctacttctggtactatcgaagctcctaggtcacaaatccaaatgactccaggtcattcagttataccctcccaagctcctctagctcctgaaaggcagactcattctgtgccttacatatgtccttgatgacttccttggtacctttaaaaactcaataatctgtacttacattaacattttaaaaaaacactttttaataatagctttactcagatacaattatcataagataaaattcaccttttcagagtaacacttttttttttattacactttaagttctaggatacaagtgcagaacgtgcaggtttgttacataggtatacacgtgccatagtggtttgctgcacccatcaacccgtcatctacattaggtatttctcctaaagctatcccttccctgtcctcctacccctccgacaggcccyggtgtgtgatgttcccctccctgtgtccatgtgttctcattgttcaact

SEQ ID NO: 75740 - DNA, 926 bp, Homo sapiens
aattattaatttaaaaaaagacttgtttgtttcagagacaaactctattgaaataggggaggataggaggcaacaagcctggaggaggaagatcccaggtggaagagcagggcggaacccaagtctgctctcatccctaggtgctcatccacgtgcagcttggctggtagtgactctaattcaacagcaatcaaacacaggttaaaacaacttactgaagtaatagatgaataagaaatataaaatttaccaaaacccaatttcctcctacacaccacacacactttgtttaaaataagtatgctgttctccctacttcgcccccatccctagtctaccctaagcaacttcgttacctctctacgaacccatcagagcgcttagctatcagatcaattagggcacatttaaccttatatactatgcaataattacagtttctaggtatgtgaagtaggctgatggggttttgtgtcgtcaaagttttgggaagaccagaattctaaagtatgcatttaaaagaaagggctgggtggagcacgtagggtatgtgtgtgtcgccgcagttcccttggtttcaagaggagggattttaggtaaagcaaagggaaagtgtgacggaaaggattgctgtgctaaatgggagcagcaaatgccagtaccgatgcctttgggcatttagatccaaagcctgcctttctcgttcttcagttccccggggaggcctgttgtgggtggggaggtgtcttccttctattattccagtctccctaagaacttcgtagacagttgagcaatactttctaagggctggtcggagtcaggaaagtcaggtaaggcgcctcacgtgcacctcaacgcgtcgcgggagcgcgtccygacctcacacatggacaagctccgcccgcggccggcctgagtgggtg

SEQ ID NO: 75741 - DNA, 1336 bp, Homo sapiens
tgtcttactttacctattgatcctataagctggggacgatcctccttgttttgtagaagagaaaattgaagcttaaatctattaggtaacttgtcaatgaatcaaataataataaagaaacaaatgctaaaagaccaggcagcatactgagataacgaaaaaggtcagtgagattattttaacttggtcttcattgttgcttcctcatttccttaggatgggcttttcaagttggcattataattaatattaaataaatattccaaagtttatttgtttctagacagcctggccagaaacctcaaataatttcacttaattgcaagttttacattcagatgggactgactgaaagtttctcctataacacaggtgagaaagtggggcatatgggaaactgcttgactcatgactgagaggaaccccaagaagcagaggaggtgttagcctagaaagcaagtaaaagtagatttactatgggactmgctgaaagtaaggaatgaaggtgtggaaattgatgtaggtgtgaaattttaaaaatgcctcctcaggcagataaaatgcaaaaagtcacccaatttgcagaagcataaattgcaatatgacagtcctttcactgctaatatagtgtcatcctaggatgtagtatccggtaagtagagtatggctagtttctcaccttccatcctctgctagatacctttgaacagggcacaaacttagcaatgacaagagtgccactggacatgaggagccaacttaaaatttaaaggtgagcccactaaggcttttaccatagaaggatcaccttcaatgatagaaacagttcttaccaccatttcagggcatatagtcagctttttccacagatgctttgcacaggtcctattactacacctatacggtatattttaagggtgaaacaaccacatacaaataaaagctaattttatattggaaggtgtattgtgcaatggaaaggtgacctcaactgtactcagtaagagtgatataaaatcataaatcctagccacagctgcggtatattagaggccacacattacatttgtaaacaattgcaaatccattctggggacagtgctgagtgacctggttttaggtgctgtaagggacagcattggaaacatgtatttaaggatgcactgctaactccttagctacaagaagaaaagccatatgtcaattggccagccatacacatcccacgttttatagaaattctaaaaaggaggcacatttgtaatttatattttaatgttgattaatcacagatatgttaaatttttacccattttgttttaataaatacaaatgc

SEQ ID NO: 75742 - DNA, 1336 bp, Homo sapiens
tgtcttactttacctattgatcctataagctggggacgatcctccttgttttgtagaagagaaaattgaagcttaaatctattaggtaacttgtcaatgaatcaaataataataaagaaacaaatgctaaaagaccaggcagcatactgagataacgaaaaaggtcagtgagattattttaacttggtcttcattgttgcttcctcatttccttaggatgggcttttcaagttggcattataattaatattaaataaatattccaaagtttatttgtttctagacagcctggccagaaacctcaaataatttcacttaattgcaagttttacattcagatgggactgactgaaagtttctcctataacacaggtgagaaagtggggcatatgggaaactgcttgactcatgactgagaggaaccccaagaagcagaggaggtgttagcctagaaagcaagtaaaagtagatttactatgggactckctgaaagtaaggaatgaaggtgtggaaattgatgtaggtgtgaaattttaaaaatgcctcctcaggcagataaaatgcaaaaagtcacccaatttgcagaagcataaattgcaatatgacagtcctttcactgctaatatagtgtcatcctaggatgtagtatccggtaagtagagtatggctagtttctcaccttccatcctctgctagatacctttgaacagggcacaaacttagcaatgacaagagtgccactggacatgaggagccaacttaaaatttaaaggtgagcccactaaggcttttaccatagaaggatcaccttcaatgatagaaacagttcttaccaccatttcagggcatatagtcagctttttccacagatgctttgcacaggtcctattactacacctatacggtatattttaagggtgaaacaaccacatacaaataaaagctaattttatattggaaggtgtattgtgcaatggaaaggtgacctcaactgtactcagtaagagtgatataaaatcataaatcctagccacagctgcggtatattagaggccacacattacatttgtaaacaattgcaaatccattctggggacagtgctgagtgacctggttttaggtgctgtaagggacagcattggaaacatgtatttaaggatgcactgctaactccttagctacaagaagaaaagccatatgtcaattggccagccatacacatcccacgttttatagaaattctaaaaaggaggcacatttgtaatttatattttaatgttgattaatcacagatatgttaaatttttacccattttgttttaataaatacaaatgc

SEQ ID NO: 75743 - DNA, 1109 bp, Homo sapiens
ttgttcaaactaagctttcttccacctcccagattcaaagaaaaggacatatgcatcatgccatacgttcctaaaaatatgtttaaagacacaaacaaaaatatgtttaaagacactaaaaatatgtttaaagacacaaacaatttcctaccagttatttgagatgcactatgttgcaagaaattagataccaaaggaggttttaaggtagacagtattggtctgttaaatggtcataattaaagtacatcttctagaaatgatacatctgcatattggcaaaaagggtccatccaacttcctttatacttgctttgtttaatctgaatggttatttcttaatttacaggtgggctagtgaagtccttgatgccctacataagacttaacaattcgataatattcatttttaattatggtatattttacattccaaaaaatcattgcctaaaagtcctttttgtaagtttgaaccccaaagtagattaaatacagtgtgactttatgaatttttaaaaattgttccataaactacatgtaaaaatcaattctaataatttttagttagacctctgttatatatatttgagacaggatcttgctatatcacccaaggctggagtacagattcaaactcctgggctcaagcaatcctyccacctcagccagccacttcatctatgttcacctcctcctcctcaaggtctttcagagagttcacatcacacacagaaactgttctccaaataacagcactcccacctgtcttctcaaatcttctggatttctctttacaggattctacatgttttccaaaacttgataattaaaaaagcagctttcagtcgacaataaactcatgacacatactaacaatttatgcatttagctagtaagttatatcttatatagttaaaatcctttcagtaattatttcgattcaaccaataagaactgactggtgccaaccatcactgttaagtgctagttaaccattttcccaccagcataccaccagttacaagcagaagttaatactgactgtaagtgtaaacatgatatttctctttaatcttctaatcagagaaagtaaacataaacttaaaagg

SEQ ID NO: 75744 - DNA, 1109 bp, Homo sapiens
ttgttcaaactaagctttcttccacctcccagattcaaagaaaaggacatatgcatcatgccatacgttcctaaaaatatgtttaaagacacaaacaaaaatatgtttaaagacactaaaaatatgtttaaagacacaaacaatttcctaccagttatttgagatgcactatgttgcaagaaattagataccaaaggaggttttaaggtagacagtattggtctgttaaatggtcataattaaagtacatcttctagaaatgatacatctgcatattggcaaaaagggtccatccaacttcctttatacttgctttgtttaatctgaatggttatttcttaatttacaggtgggctagtgaagtccttgatgccctacataagacttaacaattcgataatattcatttttaattatggtatattttacattccaaaaaatcattgcctaaaagtcctttttgtaagtttgaaccccaaagtagattaaatacagtgtgactttatgaatttttaaaaattgttccataaactacatgtaaaaatcaattctaataatttttagttagacctctgttatatatatttgagacaggatcttgctatatcacccaaggctggagtacagattcaaactcctgggctcaagcaatccttccacctcagccagccacttcatctatgttcacctcctcctcctcaaggtctttcagagagttcacatcacacacagaaactgttctccaaataacagcactcccacctgtcttctcaaatcttctggatttctctttacaggattctacatgtttyccaaaacttgataattaaaaaagcagctttcagtcgacaataaactcatgacacatactaacaatttatgcatttagctagtaagttatatcttatatagttaaaatcctttcagtaattatttcgattcaaccaataagaactgactggtgccaaccatcactgttaagtgctagttaaccattttcccaccagcataccaccagttacaagcagaagttaatactgactgtaagtgtaaacatgatatttctctttaatcttctaatcagagaaagtaaacataaacttaaaagg

SEQ ID NO: 75745 - DNA, 543 bp, Homo sapiens
gtttcagtctttagttcaaattcctcttatgccttctcaaacttttacactgaatgtttttcatgacttgttttccatttttcctcactagcttttccccccacatttgtcaggcagtttgtttacatggtactttcacatacattatcacgcagttcatttcttcactcatcccatcatgcattcatgtaccatgtatttatcagacatccactatgtacaggaaatagggtttgcctttgcatgtttaccatattaaaataaaatatgttgtttggaacagttttagatttagagaaaaaaaaactgaatggtaagtacagagttcccatttacccctttacctcccacacagtttcccctatgttaacatcttgcattagtactgtatatttgttgaaattaattgctgagccagcgttgatacgttattattaactaaagcccacagtttacattgaggttcattctttgtgttacacattctacggatttcaacaaatgtataaygacatctatccagcattatggctaggacctgat

SEQ ID NO: 75746 - DNA, 2194 bp, Homo sapiens
ctgctgtgtgtgtttatttcagttctgaagctagcctgaaataacctctactttataaggaaattgatgctgagttgtcattatgcccaacatttctaatacatatacagctaatttgaatgttataagtatagaaaaaatatcaggtaagtctgtattcaaataggaatatcaaagtaaaataaccagtgattaaacattccagtggtagtacatgggaaccaagtgagaaaatatgtaagaaacatgcttggattttttgtttgtcttttttttttttctcccacaaatgtggatttaatttgtgtcttatgagtgaaattttaaagtagaagattatgagagctcttcttttgggaattcccctagtaaatacagcttctaagttcactgtttttgttcttccttgagctaatgagagaggttaacatatttgtagtagattccaggttttagaattttttcttatggaagagaggcaaactggaatcccattcagtcacaatatttggttcagtcacaatatttgattagacttcarttgtcttggacagaagtaagactgttctccatattcttaaaaaatggaaatgtgcgtaaattattttctgtacattcactattttaaataattatttccctttcactcttatgctgagctgtatattgtgaccacatggatgaaagtctacctcttttcttcttcacaaggtttccgacagtgagattttgtgagtgatttggtttatttcaagaatggtggaattatcacaataatgtatattttaaaatgcttttgtagttatgcctcagaataggcagatagatactgcctattcatatttgaacttctgtcctgtgaagagctagccccagaagggatcttttgcttttgattatttagcctatatttaagaggtttcttttctcttgaattgttatccccagctacttgttcagagatgtttgtaaatgaagggagtgagtgggaggaaaagcttatgttacttgtagaccagagaatagtatagcagctagaagtggtgtttgtctgtaggctacccttagttgatttgtgttgtcatgcaagaaacattttgatgcatttatttcaggacacggcattttggagacttcattaaatgctacctgttgctgtttgtgatggaatctagtctagaatgttaagaggcagtagaaaaagctgaaatggcaagaagatggcactcttcagtctttaagattcacctgtttgcattttagaaacacattaccattctttttgcttctcttaaaattggagctatttggattaaaattaaatttatcattatgatgtgacctacttggtgtcagttatttttactgtttcttttaatccctaaggtaatcctgtgaggaggttaatatggaaatctgttctgaagtctgtgaatcaaagatgctaaataattttctcatgatcagagagctagtaagtgatcaagctggaattgaaaaacagaacatttaaaaattattttgaaaaaatgtcagatatatgtaggagttaggaggacagttaacccacatatacctatcccatagattacttatggagattttattacatttcctttattccctccttccttttttggagacagagtctcactctgtcgcccatgctggcgtgcattggtgcagtctcggctcactgcaacctctgcctcctcggttcaagtaattctgcttcagcctcctgagtagctgggactacaggcacatgcgaccccacctggctaatgtttttatttttattagagatagggttttgccatgttggtcaggctggtctcgaactcctgacctcaagtgatccgcctaacctcagccccccaaagtgctaggattactcttcttttttctttgccaaagtattttaaagccgatcccagacatcatgttaatgaatgcgcacattttaactgtgaggctagtgtttagaattctgtacctgatggcctaaggtataaaagagcatgacacaatatgaagactgtgagcagtagaagccatattttttctacaacataagttatatatctgcattgagttttcttgatatggttagccgtcatttgccactcatttgttaaaaaaagatcaatgcaataactaatatttattgagtactgactctgggttaggaaca

SEQ ID NO: 75747 - DNA, 1243 bp, Homo sapiens
tgcatgcaacttttttttttttttttgagatggagtcttgctgcgtcacacagactggaatgcagtggcgtggtctcagctcactgcaacctctgcctctcagtttcaagtgattctccygcctccgcctcccgagtagctaggattacaggtatgcgccaccatggccacctaattttttttttttttttgaaatggagtcttgctctgtcgcccaggctggagtgtagtagcaggatcttggctcagtgcaagctccgcctcccgggttcacaccattctcctgcctcagcctcccaagtagttgggactacaagtgcccgccaccacacccggctaatttttttgtatttttagtagagatgggatttcaccgtgttagccaggatagtctcaatctcctgactttgtgatcctccttcctcagcctcccaaagtgctgggattacaggcatgagccaccgcgcctggccaatttttgtatttctagtagagatggagtttcatgatgttggccaggctggtcttgaactcctgacctcaagtaatccacccacctcagtgtctcaaagtactgagattacaggcgtgagccaccatgcctagctgcagctttgtatttataggaaccactctgtcttcacacacatttaatcatataatattattattaattaaataattgtttatgtattacataataattttgtaatatcaattaattatgtagctataataaacaaaatgatgtagtcaaaagaaacaaacacaaatgtttgggtaccagactaattcttagtaagcaaaaaaactgaaaacatgaaagcagagtggcataaaatactagagtagtcaggcagcatcgctaattcagtatggtatgagtatcagtgcgttatatagaggaaatggaaaacattggttaaaacagctagtcagagggcagtgtatctactacaatatgttgatcttctaatatattctcatttagttgttttattgaggcccctgtgtaaaactatgcccagtaggtggaagatagagtctacactaaagtgggtgcatattctgagtgtcaatgatcaatgttgggaggatcttagacagaaaataaatttaggttttttattttagtttttattttaagttctggggtacatgctcaggatgtgcaagtttgttacataggtaaacgtgtgccatagttgtttgctgcacctatcaacccatcacctaagtatta

SEQ ID NO: 75748 - DNA, 1243 bp, Homo sapiens
tgcatgcaacttttttttttttttttgagatggagtcttgctgcgtcacacagactggaatgcagtggcgtggtctcagctcactgcaacctctgcctctcagtttcaagtgattctcctgcctccgcctcccgagtagctaggattacaggtatgcgccaccatggccacctaattttttttttttttttgaaatggagtcttgctctgtcgcccaggctggagtgtagtagcaggatcttggctcagtgcaagctccgcctcccgggttcacaccattctcctgcctcagcctcccaagtagttgggactacaagtgcccgccaccacacccggctaatttttttgtatttttagtagagatgggatttcaccgtgttagccaggatagtctcaatctcctgactttgtgatcctccttcctcagcctcccaaagtgctgggattacaggcrtgagccaccgcgcctggccaatttttgtatttctagtagagatggagtttcatgatgttggccaggctggtcttgaactcctgacctcaagtaatccacccacctcagtgtctcaaagtactgagattacaggcgtgagccaccatgcctagctgcagctttgtatttataggaaccactctgtcttcacacacatttaatcatataatattattattaattaaataattgtttatgtattacataataattttgtaatatcaattaattatgtagctataataaacaaaatgatgtagtcaaaagaaacaaacacaaatgtttgggtaccagactaattcttagtaagcaaaaaaactgaaaacatgaaagcagagtggcataaaatactagagtagtcaggcagcatcgctaattcagtatggtatgagtatcagtgcgttatatagaggaaatggaaaacattggttaaaacagctagtcagagggcagtgtatctactacaatatgttgatcttctaatatattctcatttagttgttttattgaggcccctgtgtaaaactatgcccagtaggtggaagatagagtctacactaaagtgggtgcatattctgagtgtcaatgatcaatgttgggaggatcttagacagaaaataaatttaggttttttattttagtttttattttaagttctggggtacatgctcaggatgtgcaagtttgttacataggtaaacgtgtgccatagttgtttgctgcacctatcaacccatcacctaagtatta

SEQ ID NO: 75749 - DNA, 1053 bp, Homo sapiens
gcgtggtgcccctggtaagtatctgccgtgagctctgactgacccggtgcctgggagccctgtgggcctcctagtccctcccatcccccacccatcaccccttcctgtcctgagaacattctctcttccaacstgggctggggcttcagttctaagaggacttgagaggggtagagggatggccttccagaccacagggaaagagaagggagaggatgttaagcaagggcaggcctgccttgctagagtgctccttccccaccactcacttctatctcccccatttccctctgagtctcccacaagccccagccttcatacccccaagtggacctctttctatgggtcttcccacctataagacagcaggacctccatctgctatgcaagcactagggactgtcatccttaaataaacaaagtatacaacccattttgtcagggagagtgtacccagcaccaatgcacccaaggtgaagttgccctttctaggcccagggagagttaactccccaccactccccaccactccccacctccacctctctgtatcttagcagaaataggctggatgtttttcataaggaattttagtaagaaactaaggccagaaaagaaaataaaacaatactaaagcataaaggccagcaaacaagatgactacttttcagccatcttttgagcagtacttttaaaagcatcatcaggcgtggatcattcattcaagcaagtgttgcccctgcaggaatacaggagtagtagctcccctctgtcccctgcatcaataacagctgagactgagtcacatgcctggaccccgcctgcagtgggcagaacctcacgtgccaccattcgcatggaatagagtggcatccccaaaagctgtgtaataaggagtctctgtttgtggggctccctagaggtttagaatgtgcctcaggagataccagcccccttgctcagtcaatttcttcccatgggacactctggttcattgaatttttcactcttaaaagatctgggaggagtatctaccaaagctaacatacatat

SEQ ID NO: 75750 - DNA, 765 bp, Homo sapiens
attacaggcgtaagccacagcaccggccgaccttattttgtggttatagagggtacattttataaaattactgccacggagtgggtaaggctccttttcttcaagccgcacagaacgaatgttcagcggtgcaatttcattgcaatctatttttgcttcactttgctcataatgactcttttaggatttcctcaggtaacaatcttctttcaatgttcaataatccaagcagaacattttctcacttcatccgcctcccatgctaggttcacactgtgaaattggcttatctctgacctaaccacttccttcaccagacatagagctggtgtagctcaagggaaagaggcacggcgctgggaaatgattaggccccaccgtcccaagcaagagctcaggggagttctgaggctggagagaccattcgggatatcaccccgggttcctgagaacctgagatctgcggggaggcgtcaggcatccggaaacgcccgagtctggggagacggaccccctcagactttcctctaggagactctacaggtaaaggggagtcctgggactcgaggggagccccggcatccaaaggtaagatcagttttgctcacctggccgggcggcgttgcgtcgccttggtaaccacaacttccggcttgaaccggaagtccgcgaagttgctctacagaaagtgygcccgccccctctggggcggagagactcagcccctccccctcagcggataacctgggactgaccgttccctgg

SEQ ID NO: 75751 - DNA, 722 bp, Homo sapiens
taagctcaccgaccagacatcaagcctgtttagactttttcaaggagctagcagggaggcagacaggggcacagtcatccatacggcagtgtggtgagagtgagccctggatagacacctgtgaggacaggagcagctgaggattattattatgagacaggtttttaattattattattatgagacagcttcctggaggaagtggctttaagctgggtgttcaaagatgagtaggaaagagccaggagaaaaaagcactgaagaaagcatcaggtgcaaaggcccagagttgatagagaagtggkaggttctctcaacagccggtagctcagacaaggcgggaaagaaactggctgaggaagtcttctgtatccactgctgaccactgacccagcccaccagccagagcccctagatagcagcagcaccagctggggcctcacccagctttgcccttagagacgatgcagttagatggttgggaaactttgcgcgcggtcagctctcaggagtctccgtccccaggctttggctcccttcccttcctccattcaagcattgctcagggctgagctgggccaaatgaaatcacaatgctggctggccctggctcctcctgatggccccctgatttatgtcacagcattcccaatatgccttattgccaaactgggccaactcatagcatttactttagtgcttttcaaagttcaacatgcatt

SEQ ID NO: 75752 - DNA, 722 bp, Homo sapiens
taagctcaccgaccagacatcaagcctgtttagactttttcaaggagctagcagggaggcagacaggggcacagtcatccatacggcagtgtggtgagagtgagccctggatagacacctgtgaggacaggagcagctgaggattattattatgagacaggtttttaattattattattatgagacagcttcctggaggaagtggctttaagctgggtgttcaaagatgagtaggaaagagccaggagaaaaaagcactgaagaaagcatcaggtgcaaaggcccagagttgatagagaagtgggaggttctctcaacagccggtagctcagacaaggcgggaaagaaactggctgaggaagtcttctgtatccactgctgaccactgacccagcccaccagccagagcccctagatagcagcagcaccagctggggcctcacccagctttgcccttagagacgatgcagttagatggttgggaaactttgcgcgcggtcagctctcrggagtctccgtccccaggctttggctcccttcccttcctccattcaagcattgctcagggctgagctgggccaaatgaaatcacaatgctggctggccctggctcctcctgatggccccctgatttatgtcacagcattcccaatatgccttattgccaaactgggccaactcatagcatttactttagtgcttttcaaagttcaacatgcatt

SEQ ID NO: 75753 - DNA, 722 bp, Homo sapiens
taagctcaccgaccagacatcaagcctgtttagactttttcaaggagctagcagggaggcagacaggggcacagtcatccatacggcagtgtggtgagagtgagccctggatagacacctgtgaggacaggagcagctgaggattattattatgagacaggtttttaattattattattatgagacagcttcctggaggaagtggctttaagctgggtgttcaaagatgagtaggaaagagccaggagaaaaaagcactgaagaaagcatcaggtgcaaaggcccagagttgatagagaagtgggaggttctctcaacagccggtagctcagacaaggcgggaaagaaactggctgaggaagtcttctgtatccactgctgaccactgacccagcccaccagccagagcccctagatagcagcagcaccagctggggcctcacccagctttgcccttagagacgatgcagttagatggttgggaaactttgcgcgcggtcagctctcaggagtctcsgtccccaggctttggctcccttcccttcctccattcaagcattgctcagggctgagctgggccaaatgaaatcacaatgctggctggccctggctcctcctgatggccccctgatttatgtcacagcattcccaatatgccttattgccaaactgggccaactcatagcatttactttagtgcttttcaaagttcaacatgcatt

SEQ ID NO: 75754 - DNA, 661 bp, Homo sapiens
atatagtctgctcatttgctgcacgtacttagagggctgagtctgcatccttgtggagtgaacaggtataattaataagcaaatcctaaaggttagccaagccctgtgtagctgggaatcaatggaaagcatgagtctgaatgatcctcctaaagaaaaacctaaatgctgaataaaatattaaacaagggcgggcgcggtggctcacgcctctaatcccagcactttgggaggccaaggagggcagatcatgaggtcaggagattgagaccatcctggctaacgtggtgaaacctcgtctctactaaaaaaatacaaaaaaattagctgggcctggtggcgggcgcctgtagtcccagctactcaggaggctgaggcaggagaacggcctgaacccgggagatggagcttgcagtgagccaagatcgcgccactgcactccagcctgggcgacagagcaagactccgtctcaaaaaaaaaaaaaaaamaaaaaaaaaattaaataaaatatattttcaggtatatcgtcagtgaactgaggtatatcctcttaggtatatccttgtgaactgacacaaacataagtaatccatagaccccaaaactgaggattaaggagacttgaaactggctggtactctgagggtttctgcaggatcc

SEQ ID NO: 75755 - DNA, 805 bp, Homo sapiens
ccttgaagcaggtgcatctctgatgcatgcccrctctccgggggcaactcttttcccttccctgtgaccctcttcggacagttgaccatctcaacacctagtggttaaaaagaagagcatggacggcctggggcctgcactggctgtgctgggagtttgtcatgttgatagctaagcaggcccagccccaaggcctcactgccatctgcttccctctcacacctctcttctccctcctcatgctcactcagagcccccttgcaggtcaggaaggaagagaaggagggaaagaacggtacttgttggtgattcatatagctcccatcattcttcttcacaaaaatcctgccaggcaggcaccattaattcaccttttacaaggtaggaagcagaggctcagacaggctgtgactagctgaggccacaggcttcttagatgtggtcacttggccttttgagtgcaggtctgagcgactccagagttcccacacagacagaagaaactggcccgggtcttgaggagtccctgcagacaagggcgaaagagggcaaagggcctggggcccagagatgctggggaggcagcaggccttgggatttgagggctccaagtcacttccttggcacagaagccactgctagattctcatggggaggggcagggctcacccaaacttggccctttccttccagtcacagctgccaatgagctggcctgccgaggcttggaccacctggaggaaaagatccccgccctccagtacccccctgaaaaggtgagcccttcccacctctcgaagcctcc

SEQ ID NO: 75756 - DNA, 1146 bp, Homo sapiens
tccctctgtatttcacaaatcaaatatttatcaagaacgttggcatcgaactgtagcaccactcaccagtttaccatgctatttggacctgacactcagcaattatttttctagcatcaaatgtaacactaatcctcaacaatgattcatctagcaaatctgactctgcaagcttctacccccaccccaggttaatatcctttggaattattttgagatacttatcgctgaggagtgtccacacctgctagatattcccttagtcattaaaaggattgggaatatagcatttaacaggagatcaagctgcagtgagttataatatgattgcactacagcactccagcttgacaacagcataagaccctgttgttgttgttgtttttaaagcaatcaactctatttccatcaggtccattgagtttatattctatattgatgagatagacaacaaacacatatatactatgttgtgataactatttctgtaaaatactaattgcaaaagatactcttttagatgggaaaatcacaaaaggcctgtcttaggaggtgatctgaaagacagaaggggcaaattgcatattcctatggaagaacattctaggcagaagaaacagcgtatgtcaaagctctgaaatgagaatgtttagggtattcacagaacaaggaggccaggagccgggaaagagagagcataagaaaaagaaataggagcasagaaaggaggaagaggagaacatgcaggatctttcaggttaaggtgagaagctcattggagggttttaaccaaactatgaacagttgtgatgtctgtggttttcacaatctaactactctggagaagggtagaagcaggtcaactggaaaggtactcaaataaacaaagtaagatgaccatgcctgtaataatttggaatcaatggagttagtgataaatgatcctaaattggatgtattttgaatctagataaaatgtaaacaataagacaaaagaacacaataattttaaaaagtaatggaaggcaacaccaaagtcatgatccaggaaagatgtaattgataagctggagtccattaaacttaaaagcctgttctgcaaatgacaatgtcaagagaataggaagataagccacaaactaatag

SEQ ID NO: 75757 - DNA, 1305 bp, Homo sapiens
gaggtaatggatatgctaattagcctgatttgatcattccacaatgatgtatcaaaacttcacgttgtacttcataaatatatacaattattatttatcaattaaaaataaaataaaacctaaaaataacgtaaagactacaaaagagtttcatttattaggtatcaaagttagtcattttcactctggtatacacgtatccaaaatttactggtttaaccagaaattatattatcataggccttggtatatacagacgatagcagaggaacaaagaaacactggctttgcttacaaaagatatgatctattagatataaataaaataagttaaattatatttgatatattaattattctaaatttattttaactgaatatccatggtgataatatacaatgtttttcattttataaaatgttttggcatacctcgactcatttgggcatcacaacaaacctataaactaaattattgttttcatttagccttagagatctctgagattcagagaagttaattgatacactaatgaagagccagtgctcaagcgtaggcattctaatttcaaatttcatgtttgtattgctccattgtgtgcaaatcaaaacaatatgaatattatagcaatctgattttttaaatattttcagacttattaaatacaaacttctgggatattttaatcgataccctttttttatttgttaactctttaattactattattttcttcatgaagcctgctccaaattaataaccaaaaacttagttcttcacacatccaaaaaaagatttccttttaacagtcaagggtatrggatgttaaaacatcaactaggattagtgattaattataaatgcttgtggtgatgcacatcttatatgaaacctgaaagtcacatggagcaatagagctcctgtgcttagggaagtagcctgagtggaaagatcaataactgaagtttactgtaagtggagatttaaagacatgagcgaaacaatttttagtagcctaacctttttactactcatctgacctacacatggtgagatgtgtttgattctggagcttttctttgtttctttttctcctttcctttttcctttcatttcttttttctctttcttttctcttcttcctttctttctttatttcttccattttctttccttctttattttttttttcctctcctctttctcttacttctcattttttggctgtaatgcagtggcatgatctcagctcactgcaaactctgcctccagcgttgaagcaattcttctgcctcagcctcctg

SEQ ID NO: 75758 - DNA, 855 bp, Homo sapiens
tcattattttattgttttctcttcacactaatttattaaacacctatgatgtgtttctttaatatgtttatttcctttaaaattatttatcaaataccaacaatgtaccaagcactctgctaaggactggggatatattatctcaaatatattgtgggctggttttacaagccatagttcctggagtgcaaacatagggtcataaaaatagagaaaataccatttgctggttcttacccctctttatattgacaccttcatccacttttcaagtttytgcccagcgatttgtgtaaaatcctggcaatgactcctgtatgtttatgagccaaatcctctgcacctccatttgtctttttttttttttttttttttttttgagacggagtttcattctagttgtccaggctagagagcaatggcatgatctcggctcaccacaacccggcctctcaggttcaagtgattctcctgcttcagcctaccaagtagctgggattacaggcatgtgccaccacagccagctaattttgtatttttagtagagacagggtttctccatgtcggttaggctggtctcgaactcccgacctcacatgatccgcctgcctcggcctcccaaagtgcagggattacaggcatgggccaccacaggctgtcctcttttattctctggctctctgtggtgtggcgcgtctcctgaaaagtagctgtcagtgcctgaccaaaaatgcagcaccggggtggtgtttgtgctcacctatcgtttcttctacccccgcatgtgaagctttcggatatgtttgcccatttttttaaagatgtggttatcttcacaaaggagcactgcaatgc

SEQ ID NO: 75759 - DNA, 689 bp, Homo sapiens
ttgacatttgtcaccccactggccttctcaagtgcaatcagtaaaaatgctgagaactcttggatcttaatcttcatgactgagttttttttagttgtatagttatcatctgcctttcttcactttgcatttcttcttgaatccattgcagattgacttccactcccactccttcactaaaagggctcttaccaagatcaaatctaatgggtacattttagttcctatgtgatttggcctttcgatgtcaatcatcactcccagccattgattttggtgacccacttccctgtgatgatcttctgatctagtttctcaggttccttcgctrgtcctttttctttccctgcccctgacatattgacatttcctggagttggttttgtccttgattcattctcatgtcattctgcacacagtctctgcatgaactcaggcagacccttcatttaatgaccaccttagggctgatgattctcaaatctgtattccccgatcttgcatttgagctccagccccactcatcctctcggatgttctgcaggcccagcaaactcatcatgtccaaagtgaaactttttctctttcctgtctcctctcctctgatctgttctttcttggaacaccacccaagaacgtcacctcctccatcagattgtgagctcctggagggcaggagctgtgtcctt

SEQ ID NO: 75760 - DNA, 1219 bp, Homo sapiens
tttcagcataggaaaatagccattgccatttatagagttacagtttattagttgatggtcaatgyccatgtgaagtagctggggcagcaaagattatgccaggggaaattgaagaagagcaacttgcagaaaactgctttgatgtagttgtactagttaaaagataggctcactattgtaatagaaaggcctcaaaagatacaatggctcaaacacaataaaaatgtctgtcttgtttacataacagggcttagcagataaacaggccacacagttattcaggaacccaggttgatggaggatcttttgtcttcggttcaaagcttgccgttggttgactgcattccagtcaggtggaaggggcaaagagcctggaggagcaggggtaggactggactggtcctggaagtgatgacagtgacttccatttataattaactctgtcaaagggtcacacctaacttcaaaggaggcagacgtatgtatgtagtctggctgtgggttcagtagaaagaggagaaaaaagattttccagagtagctacttgtctctgccatagaattgttagatagtttactgtaggtggactgtaaataaatgtttgcttagttctaacatttgactgatattgggttgatcctttgagacttggtatattgtggatatgcctaaagtttctttttctaccaaagatgtgatgtaatctatgtcgttacagaagtaggagagggaaggaaactaccattaaaatcagtccttaggagcccaggcactgttctagatgtttgcatatattaatatgatttcatttcatctttacagtaacctggaagaaagatatttaaataatgactttccagatcaaaaaatgagttttgatggcttttctcagttttcataattggcagaactgatttctgaatcctttaagttgatcagttgacaggaatgcatttatgatttttatcttttcttttggggttacttttcagtttgactttgaaggatcactttcccctgtcattgcacccaaaaaagcaaggccttctgagactggatctgatgatgtaagcattattatttcttgctaatataaattaatttatggatattcatactattcttccacttctgtggtattcctatcaattcctctatctttccaacacctttcactttatttattttaatactgaatagcaattattttgaagagtag

SEQ ID NO: 75761 - DNA, 806 bp, Homo sapiens
gattacacatggaaaagaaaagtcttccaaattggagaggaagaaatggcagaggggatgtcaaatgtgagggagttcacctgcccttacttgctttgaacatgaaggaggccatgagcctgggaatgcaggtagcttctagcagctcataatgatccagcatgtaaacaagggtctataactacatggatctggattcagccaacaatctgagtaagtctgaaaagaattattctcccgagctactggacaagagcccacttctgctgacatcttgattctggttgtattagtgtctgagcagagaatccaaccgatccttccagatttctgatctacagaactgtgagataatcatttctgttaagacttaaattagtggtattttaatggcagcaatagaaaattaatacacccaactcaacaaactgctctatcacgacactttgtctctgactcaatctgttcccaatcttacttaacggcttactctacattcctactcttttcccttttttttttttytttttttagataatatgagcagaactgcaacttactgttttctgtgatggttctgtgtattcctcatttcaactccaactgcaaattctagacagtggaacttctggcagtcactttctcactctaggaaaaattttgagaagtacagttttctaactgcatactctgctgaccatacttgaaaatctaactgctgtgatactcactgaagttttcctacttccaaataaaatctctcagaggagtattccaccgaccaacaagatagacctgggctggga

SEQ ID NO: 75762 - DNA, 871 bp, Homo sapiens
actctatttatggcactacatctatacataataagattttatcacaaaaattaayaaaattaaaaaataaattataattatgtttaccatacctaatttaagcataaaaagacagaaaatatgtaacttttataaatttaccatagaaacattaaattttataaaatctcatgatttatatttctataggcaatttgaaattattaatggaatttttcaacttaactattattctatttcattatgaaaatagcgaatatctatagaagaattgatttctgaacactattatgattgaaattcagcaggttttccttaccattttttgtgtaaaatctgaaggctgaaaaaagaactgcttatcagattaacaaagaagttcagcattcaagggaggaatttgcattttttgaagagtcactttttgatataccctctccatgttacaggagtgaaatacctatggggaattaaatattcatggattataatttgccatatatttgttacttgattttgcaaaaggatagttaaactaattcgccccttctttagtaattatggtctcttgccatccattttaacagtgtttcctgattcaactgtataatcagctaccatacattttcttactcagatatcttcttttccttaacatcatgagaaaattatattagggtattaagtattttgatatttttctatagagactatttggagatgtttttaaagagaaaataatctttctgggtggttgtcatgcagctctgactgaaggtgcaacatggaagaaaatctgctggcatttctttgacctctatgatcagaacagctgcctaaagggcgctgcgtttttctttttttttcatgc

SEQ ID NO: 75763 - DNA, 1065 bp, Homo sapiens
tttgtatcttttgtttctaaatcactagaacaacatctgctaggtgtaatttcattttctcacagtgaatgctgaagaaaattgcttcaccttcttgtaggcgaagtgcactactttgagtttgctgctagcccttttaaatttcagtcactaagtgtgaacctaagttttcagcttcacacctcttttcctagtatttaaatctgtcttactgtcaatggatgctcattgtcttaaagctctgcataacatccaaacatagtgacccataagacttcttttgctcattaatctccaagtgtctctaatgtaaacctacaaaggaagaatttgktaactccctgcaaaataattaaatcaagactttatggtcctcaaagggagagtactccctaaagtaactctagcagcaaaagctcctcctttttcacttaaaccaaatatccattttctgtagcataatagagaattcatcaaatgaaataaattcttgtaacagcttaatctgatgttaaaagaaataagtaaaagaattaataaaaaggaagataatatcaggtataatttggtgattaatgtccaacaatgtgttaaaatagagagtgaaagaaaacttatgcaaaaagggaaaaaagcagagaagagaaaaatgaacaaaatcttaaagatatataaggagaaactgaaaaaaggaataaaaaatgacaataagaagtaatttttttaaagagattggaaatttcttactatcgtaaagcaaagcattattattttagtaacaatatcaaaaatgttaaatcacagggtggttagtaaacaaatacaaaattttttttaaagttgttacataccactgtattgctttttatttaattaattactgccattttaataaaaatatctatatcctcttatatcataggatggattatttcatatagataagctcatatgaaaacaaagtaatcacaatgtctcaaatgcagaggactcatgtgtgtacgttaatcagaatattcaattctacttgaataagcacaatttaatgctaaacttttaatattt

SEQ ID NO: 75764 - DNA, 1153 bp, Homo sapiens
tctttctgttccacactatgcttattcatacatttaatttttcaccttttccccctcaaattgatctttatttcattgaaaaagcaaaaaagagacttgtaaggtatattaatcraagggtgctgatggttagagtagatgcctggggctggaacgagggctgaacctggaaagatgatctgaaacacatctaaggacagatcagtctcttgggcttatgtcaaatcttctcttccctctgtatatctattaatacataattttccactccccatcaactagaatcatttgtctaaaaattgatgctttttcatggccttacttggcccctagcctaactcatgacatctttttatggactgtaggctgccaaatagttcagtctttaatttcagcttctcaagaacgagttacttattgaacttgtttatcttttcacaaaagactatgtcacaggttgttgacagtgctaagaatcagtagcccttgaatcagatgcctactcctagttgacactgctgtggctagaaagaagcaaatcacctggtggaagggcctgattatgacctttaggagtacaaagaatcaaaaactatagtgtgaaatgataagcttacatgtgtgctctaattaaaatagattgattcaataacttcaaatcttaaaactctggatagatttattagagtgaaatctccctccttcttactccctcccttcctccttccttctctcttttgtgtacccacacttttctggtcacttaagctgagcaattgtttggtctgagtactgggaatatggcactgtctggtagaaaacaccactatgtggtcaacaatggctgtgtaaagattaactcctccagaagaggatatggatggcagcaatattaacctcaccaatgtgttcaagttgtccttttctcctcctatcaaaatatgttcatcataacagggcctgctcaggtacaacttcttcaatgaggttttgcttagcaaccttggcatttattgattcctttttccctctgaactcctggaacccatataattaaaaccaaacaaatttcagctttttatttacatttactttgtattttctgtttttattcacattgttggtgtttagactcattttaatttaaagatgc

SEQ ID NO: 75765 - DNA, 761 bp, Homo sapiens
cccctgccttggacagcrtcactgctactctgtgctccattgctgcctgcgattcctccttgcctcctgcgctttcttctcatgccggaattcctgctgtcatgtttgcctgatgattttctccactctcgttaacccagtatttctttcttctacatagcctgacttttctaactactatctgtagggaatgttcatagggcaatgatccttttgtttattcagtaaacatttatgaattgtctactctatgtcatgccctatgttgagtgcaagagatattgagaggagtaagctagaattagttttgttctcaaggaccttgttgtcccatagatttataactaaatattggggaagaggtaagaattatgtgaatgaacatggtcccagcagtgtgggaataacaatagcagtgttttgatatgcacacctggcatgttaaaaagcagtataattgaatatgacttgtggctggcacgttataggctattctgttgtacctagatatttaaaaacatactctctaacagctttacgttgatgggataatgtttgaatcaaggagtttctccttccttaagagaaggaatttttcctgattagcaacgtttggcttagagtccgcgaggtctttggaaacttgaacctcagtctttcaccactgtggttgagtggcagggccggcgttgttggggttcaggttcccagcgtctcacatgcgtttaacacagtccagcctttggcaagctgccactttc

SEQ ID NO: 75766 - DNA, 734 bp, Homo sapiens
ctggctgacttcttttgcctgccccttcatcaaggtctctgggtcatctttggtccccttttctcccttaccttttcgcatcctctggcttttccagcccactctgtggcttcagctgctacttgcaggccagaccctctcctccaggtgcagacccatccagccagctgcctgttggggtcttcccctggtgtcccactgacatttttaatttagcatgcccccaagtgaaactctccttctctcttgactggccctgtggcctgggtccccacttccagtagaaagaccttttaccccatctaccagaaatmcctctttccccctctgcccacatcccattggttttatgaattcctgtctgtcctccttcctccttccatgttcctcctttcttagtccaggcttcacttccagaatgagtgaatgtctgttttcccaattagaaatagtcttacacaatggataaactagatttctctaaaacaaatgaaagttgatattttgcagagtatgctactttaatggaatctattttaaattctctgtatggagtgaattctcacctattaatttaccatttatagaaattaagtttttacctccttgcttggtttaaatcaaaacatgcctagaatactgtctaatgtatagtattcatgtgagtccctggacaatactttctagttaaagggctttgatttgaagacttgatgttttcttgggaccttaat

SEQ ID NO: 75767 - DNA, 622 bp, Homo sapiens
tcagagtttcgaaaatttactatctcctgtttttccacattaactcttaccaacactctgcactcttttttttttttccttttgtctagggaatgggactttgatctgaagaaattaccaaacattaaaatgagaaaaatttgcgctaatgatgcaattcccaagacgtgcaagaggaaaactaytataactgtagaccaagatttgggggaattggaactaaacgatgaatcaagtgattcagatgaggaaatgactgcagtggcctaattgtcttcacttgaattgaaaataaataatttgagagcttcaaattatattcattgattatggtacctaattgtcatgatacaaaaatttgatactgacattctcttatatgatgagagtttcatttgcgtttcaaaaatggtgttatgatacttattttaaaatgaagattgcttttcatttccattaagttgctaaaatagatagatgtgatctgcagaagttgtttagtcttcatctgaatttcaggctgggagggagcaatataactaaggacaaaaaatgttttgtttttcttgtgtatttatgatcacctaatttcacgttttgtgaaatggacagtaacctgttt

SEQ ID NO: 75768 - DNA, 655 bp, Homo sapiens
caaaaggaaaatccatatcgaagttagaaagtgacacatcttggctcaggatagcatctttcatgtcattatatccagtacttgcctcaaaggtatcctttttctagatgttgattgaatatatggcttgcttactggcttgcaccccattacagccttaatgaacgtaaagatccaacataaaaaagaaaataattgggcagacattaaaatgctggaatgatgttactaactatgcaagggtgttgtcactgcctttagtttgtcaatttgcaaaatatttttcttgcaacacgctccattttttgtcattttcatatttggggaactacattataggaaattacttttgtccaaatgtctrcaattagtgaaaatgtaaacgttggccctcaaatattttaactacaaaatctagagatatcttaataataacgaattttgatgaaaaatgctgtcgtgttctataaaataacttgtcagtgcctttttatcattcaatagtgatcagataaggaatcagttttctttatagtttcaatgaaggcatattttagattagtatattatttaaatgtgcaaactacaaattgacaacatctggtactttaatgaaagaggatatggcactggttgtaagatcaagcttttagga

SEQ ID NO: 75769 - DNA, 655 bp, Homo sapiens
caaaaggaaaatccatatcgaagttagaaagtgacacatcttggctcaggatagcatctttcatgtcattatatccagtacttgcctcaaaggtatcctttttctagatgttgattgaatatatggcttgcttactggcttgcaccccattacagccttaatgaacgtaaagatccaacataaaaaagaaaataattgggcagacattaaaatgctggaatgatgttactaactatgcaagggtgttgtcactgcctttagtttgtcaatttgcaaaatatttttcttgcaacacgctccattttttgtcattttcatatttggggaactacattataggaaattacttttgtccaaatgtctacaattagtgaaaatgtaaacgttggccctcaaatattttaactacaaaatctagagatatcttaataataacgaattttgatgaaaaatgctgtcgtgttctataaaataacttgtcagtgcctttttatcattcaatagtgatcagataaggaatcagttttctttatagtttcaatgaaggcatatttyagattagtatattatttaaatgtgcaaactacaaattgacaacatctggtactttaatgaaagaggatatggcactggttgtaagatcaagcttttagga

SEQ ID NO: 75770 - DNA, 191 bp, Homo sapiens
taataaataacaaattttactcactaattagggctctgtcagttggtgagaaatgsctcaatatacatttttcttttactaagcacgttataaatataattacatttcattaccaagaaaaaaatatatttaacctttttatctacttcaagtgagtgtaaaaaattatataaagctgaaacctttatttg

SEQ ID NO: 75771 - DNA, 643 bp, Homo sapiens
atagagtttgtgtgttgttaactccaaacgaatcaaacatgccatgtattatcatttactttggtatttaagtatacaaaactttactttttatttaagtttgtgtatgaaactacagaatataattgtttacatttctatttctggcactagaggaaattaaaatccctgattgagattcctgatgaaaacaatgaaaaatgataaagttttaaaaagtattttaaatatatttaataactaatatttttaaatattttaaatatttttagctgcaatagctaattgttgatgccccacccatatcccctaggctctcaccattccagccatgctttgctgtattatagcataatatgcgactttcgccctttgcttcctcttcccaggaggcaggccctttccaaggagcagccctcagccaatgacagctgatggctaataattagagatcaatgcctcagcttcctcgccccaagggaaggcaaggcaactcagaggcgtgctcttcagtgtttcccagacttcaccagggagatggaatctccgtggcccacagtgaaagctcgctcaccagggmaaagcacatcaccttttatagagttccttctgtgccttgactcactttcctgctgttttcctg

SEQ ID NO: 75772 - DNA, 564 bp, Homo sapiens
ataaaataacatattatatataatttatacataaaataacatatatgggatatatatatgggataaaaatgtttttgaaaaaggaagtactttgcagacagaaaaatagcaggtgcaagtccctaatgtaagaatgtggttgttacaagggagaagtggcaaagccagtttgtgtgcagcagcaagaggagggagtgggaatgggtcagtgatggggagtggaagggcgagaggatactatggagccctggaggttatattcaggatattggatttgacttggagtcatgtaagatgccttgaaatatttttggtggatgagtgcaaagtctgatgaaatgttaaagaatgattttggttgttctgaaaacaatctaaaaattaaccctttaaaccctttaaactaatgcaaaattatacaacgagaggagttttttgtccatcaacgtggcagaataatttaaaatattgaaagcatgtgattgttaaaaagagtgaagaagacaaacatattggcatgggaatacattaaakatattttgagtacaaaatcaacacaaaaat

SEQ ID NO: 75773 - DNA, 684 bp, Homo sapiens
aagagttgagaggaagagggttgtgaagtgccacgggatcctcaaggaacagatgtttgtgcaatgagaggctatcttcccccaggcaggctggcctttctcccatccagaggaccatcctctctctagccttagggctttcctgcacactatgcactgctcctttgccctgatttcaactcttccctccatccaacctcctcctttatgtattcttcaggcctagctcaaacatcacttctcagggaaacccttcttgacccctcagacaaggttagatttcccagttacaaactcccatgatgccctacacttgcacagacagcacttagccccacttattattagtcatctgtctgggtcttcacagcatcgtaagcatcgtgaggcagggaccgtggctgttgcaggataccaaatgctaataaccagcacagtgcctggcacatttagatattcggtaaatgtttgtctgacaatggagtgaacgaatcagtcaaycaatctgaatacaacacgatgtgggggtgaatgcttcaatagcacactgtccccttaagtgcaacagaggcgactatagatgcccattctcctgtgctgccaccaatggcttcctatctcttggagggaaagtgatgacaaaacactggaatgcagcaggagattgtgtactgaatacaatgt

SEQ ID NO: 75774 - DNA, 1157 bp, Homo sapiens
aagagatgaaacagaaagaggtgggcccacatcagtctgtgaaggtaaggcccttgcatgtcattagtgtcccgrtattatgtcactgctttctaaaggagtctcatgttaacagtagaaacatgtaaaatttaggaaccagacggaattgtgattttaaataagccaatcaatttccctagtctgactgttcttatcagtaaacacagaatacaagggatataatgtaagcacatagtatttgtaatagtagttgacattcattgagtgctttcaatgtggtaggtactcttgtttattttaaaagaagcattttactagaatcatagtagaaacttagtggtcagacttcatgtagcatcacttacaaccttcattgaatattgtgaagaaacttagtggtcagacttcatgtaccatcacttacaaccttcattgaatattgtgaagtgcttgttgaatctgagacttaaaaattttgttcttttagaggaaacatggagaaagccattgacatgttcaacaaagctattaacctggccaaatcggaaatggagatggcccatctgtattcactttgcgatgccgcccatgcccagacagaagttgcaaagaaatacggattaaaaccaccaacattataaaacagggggaaagcagactgaccctctttttaaaagtttaccccctcttcaactgaaccctaaagacactgtcatgaactgtgttgaatggtggaaatcagtatttctgtttgtggtgttgttatttgttacatctgtttcatgtctaggtgttgtgggtgtggctgttgaaggaagtttgcagtcttgcagcttttattccctgtgcaacaaaagattagaacatgttaaagggatttttaaataaagttgcaaagagtacaaatgataattggccatgcaaataaaaactgatttgttgattttttttttaaggggggttggcagttgattatgttctggatgattccgtctatatatgtgtgaataatgtaagtattttacagcatgttgatttttaaattaacgtagtaaatgctgtaaaatagatttatattcagttaaccgctttcagttgattttttgaaagaaacaaaggttaaatgggggattaaagtaaaattgagagaccct

SEQ ID NO: 75775 - DNA, 1157 bp, Homo sapiens
aagagatgaaacagaaagaggtgggcccacatcagtctgtgaaggtaaggcccttgcatgtcattagtgtcccggtattatgtcactgctttctaaaggagtctcatgttaacagtagaaacatgtaaaatttaggaaccagacggaattgtgattttaaataagccaatcaatttccctagtctgactgttcttatcagtaaacacagaatacaagggatataatgtaagcacatagtatttgtaatagtagttgacattcattgagtgctttcaatgtggtaggtactcttgtttattttaaaagaagcattttactagaatcatagtagaaacttagtggtcagacttcatgtagcatcacttacaaccttcattgaatattgtgaagaaacttagtggtcagacttcatgtaccatcacttacaaccttcattgaatattgtgaagtgcttgttgaatctgagacttaaaaattttgttcttttagaggaaacatggagaaagccattgacatgttcaacaaagctattaacctggccaaatcggaaatggagatggcccatctgtattcactttgcgatgccgcccatgcccagacagaagttgcaaagaaatacggattaaaaccaccaacattataaaacagggggaaagcagactgaccctctttttaaaagtttaccccctcttcaactgaaccctaaagacactgtcatgaactgtgttgaatggtggaaatcagtatttctgtttgtggtgttgttatttgttacatctgtttcatgtctaggtgttgtgggtgtggctgttgaaggaagtttgcagtcttgcagcttttattccctstgcaacaaaagattagaacatgttaaagggatttttaaataaagttgcaaagagtacaaatgataattggccatgcaaataaaaactgatttgttgattttttttttaaggggggttggcagttgattatgttctggatgattccgtctatatatgtgtgaataatgtaagtattttacagcatgttgatttttaaattaacgtagtaaatgctgtaaaatagatttatattcagttaaccgctttcagttgattttttgaaagaaacaaaggttaaatgggggattaaagtaaaattgagagaccct

SEQ ID NO: 75776 - DNA, 1117 bp, Homo sapiens
tgagctaacatttacctgccctgcccaagggggtctgtatgaaccttcccaacctgatatcataaagctttttcctctctgaaagtctcttttcataaagtttatattcctgccaaggtcttgaccgagaggtctgtggattctaagaaggaaatgctgtagtcaggtggggaggtcatgagaaagatggggtcacagaaatggtggtagcttaataacaggaaaggcagatggaaccatgcctccttcataagggagaacctcacwcaaagatgggctttaaaaagttgcaataaacacagaactcagaattaaggtgagaaagagagaaaaagaaaacatgctctgaatataccacatactgagcaacacgaaattattaatacacatattatctcatttcatgttcccatcttcccttgcagtaagagccattatcctcattttcacagatgaggaaactctggctcagagaggttaagaatcttgttcaatatcatcaagcaagtgagggatagaaaacccaggattgaatctgctttgtctgattgtaaagacttttttttccctcctacagatacagatatttagcctagattggaccacccatgcacttctaaggcatacattgttcccaaattagccctacatccccatgatacctatctttcatagtttaagagagaggttactgtcttctcttattgtctggctctgtccatcaggaagttgtagaatcataggatataaaaactgtaagtacatgagtggtctgttggaacagtggtttgtacatttatttgtagcagaattcatgtttggaattcctatacatgaaactgacattgcatgcagcagactcctcagtattcatctgtatctctctggaagggactcttcaggctcttctaaagaccactgcccctccaagaaacacagtctgatgtactctcaccctcattttctcatttgtacatgaggactctggagatcagggtcaagaagggcttgcccaaggttactcaatggaagaacaaggacaagaatctgtatctcgtgctttctattctacacagtggccaagaaatattcatcagggtaaaggaaaaggtatcct

SEQ ID NO: 75777 - DNA, 668 bp, Homo sapiens
aaaattaacaatggtgacctctgggacagraagtgaggagtgggaaatgaagaagttccatattttactctatagactttgataatggtttttttgtcttgttttgttttgttttgtttttgagacgaagtctcacactgttgcctgggctggagtgcagtggcatgatctcggctaactacaacccccacttcccaggttcaagtgattctcctgcctccgcctcctgagtagctgggattacaggtggctgccaccacacctggctaatttttttttttttttttagtagagacaggatttcactatgttggctgggctggtcttgaacgcctgacctcatgatccacccacctcatcctcctaaagtgttgggattacaggcgtgagccactgcgccctgccagactttgataatgtttactcatcttcaacaataatatatttattcacagtcacacagggatgtgggtatgtgtggagggtgagagaaataaagagagagagagaactctagccagtgtacccagtaaaccatttctccatattttctcaataaatggatggaactagactttatgaaacactcaccatgtacgattcacttccatatacactcatttcatctgcactgcaactgtattaaaagggacttagtaatatttaac

SEQ ID NO: 75778 - DNA, 668 bp, Homo sapiens
aaaattaacaatggtgacctctgggacagaaagtgaggagtgggaaatgaagaagttccatattttactctatagactttgataatggtttttttgtcttgttttgttttgttttgtttttgagacgaagtctcacactgttgcctgggctggagtgcagtggcrtgatctcggctaactacaacccccacttcccaggttcaagtgattctcctgcctccgcctcctgagtagctgggattacaggtggctgccaccacacctggctaatttttttttttttttttagtagagacaggatttcactatgttggctgggctggtcttgaacgcctgacctcatgatccacccacctcatcctcctaaagtgttgggattacaggcgtgagccactgcgccctgccagactttgataatgtttactcatcttcaacaataatatatttattcacagtcacacagggatgtgggtatgtgtggagggtgagagaaataaagagagagagagaactctagccagtgtacccagtaaaccatttctccatattttctcaataaatggatggaactagactttatgaaacactcaccatgtacgattcacttccatatacactcatttcatctgcactgcaactgtattaaaagggacttagtaatatttaac

SEQ ID NO: 75779 - DNA, 551 bp, Homo sapiens
aacattttgcttgtgaaaaagcatattgtaggcaagaatagtcctgtgtactttatgcaggcaaaattctgtatcattttcttctatagtcagtttaaaggatatgtaaggctttctttagctttatacaaatataaatgttaaaaatatctataaggtacactataattctcagaagctcttyggtttactaagtacagtggttacttagtcaaaatatgctgagtgaatctgacctaagaataaatttactttaaaaatgatacaaaataatgacttagtgtggtaataaaatgttgtcaattttattaaaagctgattccatttcttcacacagttaagtacgtttctttcttgttttgttaaagcccatttcataagattaagttggctctgtgagaccatcactgataaagacacatacagttagcaccacacatttataaatgcagatagccacaatgacctttccaatatgtacaagctccatttacacatccacacatgtatttacagctaataaataaaatgtaaagccagaacatccttga

SEQ ID NO: 75780 - DNA, 551 bp, Homo sapiens
aacattttgcttgtgaaaaagcatattgtaggcaagaatagtcctgtgtactttatgcaggcaaaattctgtatcattttcttctatagtcagtttaaaggatatgtaaggctttctttagctttatacaaatataaatgttaaaaatatctataaggtacactataattctcagaagctctttggtttactaagtacagtggttacttagtcaaaatatgctgagtgaatctgacctaagaataaatttactttaaaaatgatacaaaataatgacttagtgtggtaataaaatgttgtcaattttattaaaagctgattccatttcttcacacagttaagtacgtttctttcttgttttgttaaagcccatttcataagaktaagttggctctgtgagaccatcactgataaagacacatacagttagcaccacacatttataaatgcagatagccacaatgacctttccaatatgtacaagctccatttacacatccacacatgtatttacagctaataaataaaatgtaaagccagaacatccttga

SEQ ID NO: 75781 - DNA, 551 bp, Homo sapiens
aacattttgcttgtgaaaaagcatattgtaggcaagaatagtcctgtgtactttatgcaggcaaaattctgtatcattttcttctatagtcagtttaaaggatatgtaaggctttctttagctttatacaaatataaatgttaaaaatatctataaggtacactataattctcagaagctctttggtttactaagtacagtggttacttagtcaaaatatgctgagtgaatctgacctaagaataaatttactttaaaaatgatacaaaataatgacttagtgtggtaataaaatgttgtcaattttattaaaagctgattccatttcttcacacagttaagtacgtttctttcttgttttgttaaagcccatttcataagattragttggctctgtgagaccatcactgataaagacacatacagttagcaccacacatttataaatgcagatagccacaatgacctttccaatatgtacaagctccatttacacatccacacatgtatttacagctaataaataaaatgtaaagccagaacatccttga

SEQ ID NO: 75782 - DNA, 1727 bp, Homo sapiens
tgaagtgagacgtactataaaattagaagaccaaaagagaaggaactaacattcttagattcaaatagctcagatgttcttaaggaagcttgagaaattgtttaattattatgcttatttctcttacaagttttcagaaatgaaaatgacaacaaaattagaaaacatctctaaaatcttgaattatgttggaatagtcaaaagcttcaaccagaattttaaagagtagtcatttgttatttatggaatatcttattttgggttcccctgaatgcagagcttgaggcaagggtttgagtacaagtatgttagtttggaggtgcggtggcagaattctaaagattatccttcaaaatttcccattctaatttctggaacagtgaatatggttgagatagcatgatggggattatgttaacattatattgccaaagggactttgcagatgtgattgagttgctaatcagctgtctttgagttaatcaaaaaggagattgtctaggtaggcctaatctaagaaatgagccctttaacagcagaaagttttctccagttgattgcaaaaggggaagacagattcaaaacccaggaaggaactgacatgccatgacaggctttggaaatggagggagacaggcagaaaggagctgagaatgaccccctggctgacagtcaggaagcaggcacctcagtcccaccactgcaagaaactggattctgctaacaaactgaacaatcttggacgcagattcttccccaaagcctccagagaagtgcccagcctggtggagacttgatctcagccttgcactattctaacctgagaacccagtcaatcccagtcagacctctgacctacagaacaggtaatgcatctgatacaggtaataaataggtggtaatctgtaatgcagcaataaaactctgatactggaggtgatctcaggaagcaggagtaagggagtggagagtgaagagggaaagaggaaagctaatataagtatgcctgatgggaggttgtggttgggagcaatgagagcttgatgatcctgtgatctcctaagaagcatgcagaatgccatccagaattatccatcgaaagccgtgagatgacagcatctacctgctggctccacccagctcagacccccacccctacttaggttagggggacttaattaccggcactcaaaagctatccttgcagcacagtgtggaagtatccagagtggagcaggggaaaaatgcagaaagattttttttttctagctgaaggctggacatacaaaatcagtctgagtttgcacagaatgtkctagaaagctgtagttgaaaatagaattaggtgaaagtctaatgaatagactggttaaaataaaatagcaataaaaataaataagaaataaaaattctaaagagtcaggtctgagcctcagagaggagaggggtctcactgaaaggaggcaagtatgtggacgtcagggtcagagtggccactccagccccgagatgacagtgcagcctctctccactgcccctggagcttcagccttgtaggaaacactgtgttaaaccaatgaactcaaggtgggaatgcaaattagttcagccactgtggaaagcaatttggcaatttctcaaagaatgtgaaacagaattaccatttgacccagcaagcaatcccattactggctgtatacccaaaggaatgtaaatcgttctaccat

SEQ ID NO: 75783 - DNA, 1727 bp, Homo sapiens
tgaagtgagacgtactataaaattagaagaccaaaagagaaggaactaacattcttagattcaaatagctcagatgttcttaaggaagcttgagaaattgtttaattattatgcttatttctcttacaagttttcagaaatgaaaatgacaacaaaattagaaaacatctctaaaatcttgaattatgttggaatagtcaaaagcttcaaccagaattttaaagagtagtcatttgttatttatggaatatcttattttgggttcccctgaatgcagagcttgaggcaagggtttgagtacaagtatgttagtttggaggtgcggtggcagaattctaaagattatccttcaaaatttcccattctaatttctggaacagtgaatatggttgagatagcatgatggggattatgttaacattatattgccaaagggactttgcagatgtgattgagttgctaatcagctgtctttgagttaatcaaaaaggagattgtctaggtaggcctaatctaagaaatgagccctttaacagcagaaagttttctccagttgattgcaaaaggggaagacagattcaaaacccaggaaggaactgacatgccatgacaggctttggaaatggagggagacaggcagaaaggagctgagaatgaccccctggctgacagtcaggaagcaggcacctcagtcccaccactgcaagaaactggattctgctaacaaactgaacaatcttggacgcagattcttccccaaagcctccagagaagtgcccagcctggtggagacttgatctcagccttgcactattctaacctgagaacccagtcaatcccagtcagacctctgacctacagaacaggtaatgcatctgatacaggtaataaataggtggtaatctgtaatgcagcaataaaactctgatactggaggtgatctcaggaagcaggagtaagggagtggagagtgaagagggaaagaggaaagctaatataagtatgcctgatgggaggttgtggttgggagcaatgagagcttgatgatcctgtgatctcctaagaagcatgcagaatgccatccagaattatccatcgaaagccgtgagatgacagcatctacctgctggctccacccagctcagacccccacccctacttaggttagggggacttaattaccggcactcaaaagctatccttgcagcacagtgtggaagtatccagagtggagcaggggaaaaatgcagaaagattttttttttctagctgaaggctggacatacaaaatcagtctgagtttgcacagaatgttctagaaagctgtagttgaaaatagaattaggtgaaagtctaatgaatagactggttaaaataaaatagcaataaaaataaataagaaataaaaattctaaagagtcaggtctgagcctcagagaggagaggggtctcactgaaaggaggcaagtatgtggacgtcagggtcagagtggccactccagccccgagatgacagtgcagcctctctccactgcccctggagcttcagccttgtaggaaacactgtgttaaaccaatgaactcaaggtgggaatgcaaattagttcagccactgtggaaagcaatttggcaatttctyaaagaatgtgaaacagaattaccatttgacccagcaagcaatcccattactggctgtatacccaaaggaatgtaaatcgttctaccat

SEQ ID NO: 75784 - DNA, 833 bp, Homo sapiens
gggatccatttctcagccacagatcacagggcaggggaccctggagcatcagagggcgctcatccagctggcgacgtgccactttgcgctaggggagtacagagtgagtactgcacacatacatgcctgccgcaggtgcacggggccacctggcctttctcctttccctagcgtggcttttcattcagtgcacgtttatttcaatttgatctttctgcctagatttattacttaatctgctagtgaacatcacaatgattttgttttacgtaattttctctttactacagcttccctgaaataaggcatcagtactttttacatttcttgttcattgttccatttgttggaggatttttctttttattattatttttctttttattattattacactcttgtctcttctgytgtacttggaaacacaaggccattattaagtgggaaatggagatttatatttagcttactcaaacttcagattctctctttaaatggtaataacacgcccgggtgtggtggctcacacctataatcccaggactttgggaggctgaggccagcacatcacctgaggtcaggagtttaagaccatcctggccaacatggtgaaaccccatctctattaaaatacaaaaatgagctggttgtggtggtgggcacctgtaatcccaactacttgggagactgaggaaggagaatcacttgaacctgggaggtggaggttgcagtgagccaagattgtgccactgcactccagcctgggtgacagagccagactctgtctcaaaaaaaaaaaaaaaatggtgataatacccaataggggcagattt

SEQ ID NO: 75785 - DNA, 1066 bp, Homo sapiens
ggattagttggagaagtctggggagtacagtgatttattgtctttaccgacctactctccttaacttgcaacttggaccatttgatcaccattaagggactttaggaatccaaattttggcctagcacagcatgactcaggaaatggtgttgggattgcatcctcaggctatcccattgtggtgrtgtgagcttggactttgcacataacctctccccatttgtaatggggcaatggtgccaacctcatagaattattatgaggattagaaaagatgtatttgagggcctggatcacatagtctttggatctaaggtgcagatcttgtgccaattcttagcgtctcatccatgatgtgatttctgctgccacaccagtgccatctggaaacataaagattaagggaaatatcatcatcctcagcttatgctgccaaattttataaatcttattattgattcttatctcctttagagctttctccagttgtgtgctaagaaggaatttcattttgattatgaaacctttgtgtttcacatttggctgaggaggcattgtctttgacttagcaatctcttgattaaaagaccctggagttgttggagccctgtcagcggaatgggtggagtcggagaagtgccttcattccagataccttctcttaatctcatgtcagcagatttccattgtaggtccagagcctgttacaagaggatgaaggatctgagccctgataaaggaatgaggtccctatgctggaactctagcacaggctttctgagtgaagtctgttcaaagcccacatttcctgaaaaatcagtcatcatgaggaactgatctgtgaggaccagagaacagagttgccaatgtaattcgatggagagaggatatttttttcaacaaattgctggaataatttgactatgtaaaaaagaaattattgccacaactaccacaacaaaaacaaaaaacacctctaaccacagatagtaccatatacaaaaattagctagaaatgggctaaatgtaaaacagggtgaataacaacagtatgcgtacaaacaca

SEQ ID NO: 75786 - DNA, 566 bp, Homo sapiens
  misc_feature (1)...(566): n = A,T,C or G
acaagtcaggtagtggttacttgttgggggaaggagggagataaagatgagcatataggggctttgtgggagacaaacttctctttctccacctgggaagtaattaccaaagatgtttgctttaaaataattcactaagctatgttttcattttggtttggtcatctatatccatgttttacaacaaaaacattatttctaaaacatcataagattaaaaggcacactataaaaagtccatctatgttagcaaatgattaatattcttatttaataatctttaaaaaattaataagaaaaaacttagctcactttaaaaatgagcgaagatatttcatagaagacctayattgagcaataaacatattttttaatgttcaaacnnnnnnnnnnnnnnnnnnnnnnnnnnnnnnnnnnnnnnnnnnnnnnnnnnnnnnnnnnnnnnnnnnnnnnnnnnnnnnnnnnnnnnnnnnnnnnnnnnnnatgtcgttgagcatggagagaagtagcattctcctacaatgctgataggaatctagtttgtcataacttgtttggagagtaat

SEQ ID NO: 75787 - DNA, 620 bp, Homo sapiens
acctgcttgccagcttccctccaacaggttaaatcaggtaacacagtcactgggaccagtccctacaaactcaaggccaagttcctgggctgcagatacccacttcctcacctcctgcctggcgtgccctgggagtctgtgctctaccaccactaagccagtgcaccttatgtcccctgccctctgagctgttttcccctaagagggctttgatgcccactcttacatgtctacaatgccgtccccacacccccattcaatctagctgtccatcaagttccacctgctccaaggagacttcattgaccacatctcaatttctgtacttacaaaagtttgttgaaataatctatttacatgtctgtatttcgccacagactgtgagctcttacagggcaagaactatggcttctcccatatttttatcctcagctcagagcagtttcttatacacattaagtgctcaatgaatgactgaaaaatagtgactccaagaaactggggcagacacagggggccccaaaaaactggggtacagcagcagggtcaggaatgggtcaggcatgaatgkgtgtgtgtgtgtgtgtgtgtgtgtgtgtgtgtgtgtgtgtgtgtgtgtg

SEQ ID NO: 75788 - DNA, 620 bp, Homo sapiens
acctgcttgccagcttccctccaacaggttaaatcaggtaacacagtcactgggaccagtccctacaaactcaaggccaagttcctgggctgcagatacccacttcctcacctcctgcctggcgtgccctgggagtctgtgctctaccaccactaagccagtgcaccttatgtcccctgccctctgagctgttttcccctaagagggctttgatgcccactcttacatgtctacaatgccgtccccacacccccattcaatctagctgtccatcaagttccacctgctccaaggagacttcattgaccacatctcaatttctgtacttacaaaagtttgttgaaataatctatttacatgtctgtatttcgccacagactgtgagctcttacagggcaagaactatggcttctcccatatttttatcctcagctcagagcagtttcttatacacattaagtgctcaatgaatgactgaaaaatagtgactccaagaaactggggcagacacagggggccccaaaaaactggggtacagcagcagggtcaggaatgggtcaggcatgaatgtgkgtgtgtgtgtgtgtgtgtgtgtgtgtgtgtgtgtgtgtgtgtgtgtg

SEQ ID NO: 75789 - DNA, 707 bp, Homo sapiens
tcagaccatacattaaaagaacaaaaacggagaaacaacatttgagctaaatatatatatagatatatggaccaggcatggtagctcatgcctataatcccaacactttaggaggctgaggtagaaggacagcttgagcccaggagttcgagaccagcctgggcaatattgcaagatctcatctctaaaaaattagctagctaggcatagtagcacacaggagctagtactcagctactcaggaggctaaggcaggaggatatcttgagcccaagaggtgaaagttgcagtgatcagcgttcatgccaccgcactccagcccagatgtcaaagtcagaccctgtctcaaacacrcacacacacagacacacacacacacacatacatacatacatacatacatacatacatacatacatacacgatgggggccacttaatgatgtagggctatactcacagatggtaggttaaaaaaaaagctgaatccccaactgtatctcctacaggcgactatctatgttgaatatgtatttacatacaagttaaactcgtgcccgagttaactaaaggataagctttctacaaacacggtgactcggatacaccatcagcttctggatttgcctcctggctcggcttcaggtatcacactccagtgcacaagcaacagcaattccccgctcatgctccatccaagggtaggat

SEQ ID NO: 75790 - DNA, 707 bp, Homo sapiens
tcagaccatacattaaaagaacaaaaacggagaaacaacatttgagctaaatatatatatagatatatggaccaggcatggtagctcatgcctataatcccaacactttaggaggctgaggtagaaggacagcttgagcccaggagttcgagaccagcctgggcaatattgcaagatctcatctctaaaaaattagctagctaggcatagtagcacacaggagctagtactcagctactcaggaggctaaggcaggaggatatcttgagcccaagaggtgaaagttgcagtgatcagcgttcatgccaccgcactccagcccagatgtcaaagtcagaccctgtctcaaacacgcacacacacagacacacacacacacacayacatacatacatacatacatacatacatacatacatacacgatgggggccacttaatgatgtagggctatactcacagatggtaggttaaaaaaaaagctgaatccccaactgtatctcctacaggcgactatctatgttgaatatgtatttacatacaagttaaactcgtgcccgagttaactaaaggataagctttctacaaacacggtgactcggatacaccatcagcttctggatttgcctcctggctcggcttcaggtatcacactccagtgcacaagcaacagcaattccccgctcatgctccatccaagggtaggat

SEQ ID NO: 75791 - DNA, 904 bp, Homo sapiens
tgcatctaagacgctcagcagatgacttggcatctagcatttgctctataaatgatggctaatattaactcatcagtgatagctacaattaaattgttactaacaatagcctaaaggattattgcctagagagtaacatatggagtaatcaggcaggggatgagggaaaagaaggagttagccagcagggaaggggttgactgtggaacaagtgttcaggatcaggaggcagaagacctttgcagaaagaggaggagggcctgtgattaggccagcaatggcagggtggagtcaggccaggaccagagctgatggctaaggcactcaagtagaagccgctagagtatctgtggagaagcctggggtatagaggtgatacaagactcaccattttaaaaaatgttttttagtgaccrgatctcactctggcacctagactggagggtactggcatgaactcctgggctcagatgtcctcccacctccaccttctgagtagccggaattacaggaatgaaccatcatgctcaggtaattttttaatttttttttcttttgtaaacacaaggcctcactatgttgcgcaggctagtcttgagctcctggcctcaagcaattctcctccttcagcttcccaaaatgctggaattacaggtgttagctgccacacccagcccaaagctccccattttttacttactttcatctccgtatctttgatgcaagtcacccaaaaaagcagcatggcaattatcccaaaaataggccaccaaggaccagtgcacagcccctgcctttgtcaagatctggtagagggaggcctcctgggcactgccagcccctgggtccttctaagctttggaattctcacacctgccaaatgcagtgtggagcagcttaaggg

SEQ ID NO: 75792 - DNA, 1334 bp, Homo sapiens
tgcatgtgccaataaatgttaccaatagtaatgattatcgtaacgtttatctctgtgccatgcagatcagtgtcctgggctaacgctctctgttcacctcttgtctccgccaggcagtgcctctgattatgagcgcaccctcaagttcgcccaaagtgcagtgtggagggaggattcctgaatttggaggcctcagtgggaacagatagacccaagaggaaacaaactaggagtccagtcaagccactggaggcccagaggatgttgcaaggacagcagacatgtggtttagaggaacagggggcagacaggcagcagagtccagcaatagctgagacaatggtacaagggaggctgcctaatttatagcaccccacggtccccaagtgctgattgtggcccaagaggagtcagagaccagcaggtgagttctattcttgattgctgcaggttcacaggtgctgtggttgcttctcagcagggcggtgggtggggtggccaaagtaaaagcaatgcaaatggtgtgggcagctaagcagcatttccaagagcagagaggacccgattctcctgcagacctgggtctgcagatgctgctctttccccatcattctttcattaaagtggagccaggaactttgcggaggtggggcatagtagcggttgggtagagatgcttatagcgaagctagaaggtctctcctgagttcttcaaattagagtcagatccctcagggctcaggcagacgtaaagtttggaaggaggggaggctgtttgatggatggaaagaataaaaaaatctattagcagtgctttgagctctttagagaacagttcctgaggaagccaagtaaataacttcctgatacccaagatttgttaattaagcactttgaacaggctctgggaggaggggcagacaactgtagaatccgacttctgagtctcccagtctcaggagagacggcacatgtctcagtggctcgaggtgtcgcccagcctccgtgtaagggatggggctgcttcactacaggagggaggcctggtgcacggtggaaccycatgtagagacgacagggcagggcctgagttgtgcacacagtggcacatgtgttgtgctatccttcttgactccatgagctgtgtatcatggagagacagcaacagctgacctgtctaggagaaaagccacctggcctcacccaaggggattctagggaggaatgtttgcctgtggatgccagcatctgtgcaggggtgcatcgtgcatctggtttaagcccaggagaccctgggctcctcttctgacgtgcacatactcctgggaaaagta

SEQ ID NO: 75793 - DNA, 1334 bp, Homo sapiens
tgcatgtgccaataaatgttaccaatagtaatgattatcgtaacgtttatctctgtgccatgcagatcagtgtcctgggctaacgctctctgttcacctcttgtctccgccaggcagtgcctctgattatgagcgcaccctcaagttcgcccaaagtgcagtgtggagggaggattcctgaatttggaggcctcagtgggaacagatagacccaagaggaaacaaactaggagtccagtcaagccactggaggcccagaggatgttgcaaggacagcagacatgtggtttagaggaacagggggcagacaggcagcagagtccagcaatagctgagacaatggtacaagggaggctgcctaatttatagcaccccacggtccccaagtgctgattgtggcccaagaggagtcagagaccagcaggtgagttctattcttgattgctgcaggttcacaggtgctgtggttgcttctcagcagggcggtgggtggggtggccaaagtaaaagcaatgcaaatggtgtgggcagctaagcagcatttccaagagcagagaggacccgattctcctgcagacctgggtctgcagatgctgctctttccccatcattctttcattaaagtggagccaggaactttgcggaggtggggcatagtagcggttgggtagagatgcttatagcgaagctagaaggtctctcctgagttcttcaaattagagtcagatccctcagggctcaggcagacgtaaagtttggaaggaggggaggctgtttgatggatggaaagaataaaaaaatctattagcagtgctttgagctctttagagaacagttcctgaggaagccaagtaaataacttcctgatacccaagatttgttaattaagcactttgaacaggctctgggaggaggggcagacaactgtagaatccgacttctgagtctcccagtctcaggagagacggcacatgtctcagtggctcgaggtgtcgcccagcctccgtgtaagggatggggctgcttcactacaggagggaggcctggtgcacggtggaaccccatgtagagacgacagggcagggcctgagttgtgcacacagtggcacatgtgttgtgctatccttcttgactccatgagctgtgtatcatggagagayagcaacagctgacctgtctaggagaaaagccacctggcctcacccaaggggattctagggaggaatgtttgcctgtggatgccagcatctgtgcaggggtgcatcgtgcatctggtttaagcccaggagaccctgggctcctcttctgacgtgcacatactcctgggaaaagta

SEQ ID NO: 75794 - DNA, 678 bp, Homo sapiens
tgtgttggggcaggggatatgaggtacatctctgtaccttctacccaatttggctgtgaacctaaaactgctccaaaaataagtctattttttaaaaaaggaaaagatacaaaacttatcctgcctttctagttggaaatgtatttcaaggtaactaaacaaccctagctagtgatggcaaacttttctttgtagaaaaatgccagtaataactgtagaaataacagaactataagaaagttactactgtacaactctaataaaataagtgattcaggcaaggattgaaaaactgaagctacagcacttaggtggacgactgatggagaactgggcactcacatgctgccacggtatctccccatggattatgtgtcagttgtgagggaaagttactctacaatgaagatttttgactttcatctctttgatctagtgaccaaacttaagacagcaggagaaccacaaatactttccaatttgacrccctatacaacatacaacatgacctttattcttgcaaaaatgttcaacttgagtctaatcaagcccttgattcaaaatttcaggttataggaaatgcaggatagacgaataagttaatcattattaggaggaaacaacctaacaaatccagtgtgagacttctacaagtcaaccggcctggtctccttcata

SEQ ID NO: 75795 - DNA, 812 bp, Homo sapiens
tgctgggattacaggcgtgagccaccgcgtctggccgcaaataattattttaagcagaagaaaatgcttactgatttttgtttctcatctttctgaaaaccaagagaaacactttggtttcattgtaaactcatttgtattaaatgattttytctccctaaatcgtaagagaaatttaaaacatgcattcttaaatgaaggacattgaaagggttgtcaacaacagttttacttttttacaacttgcagaaaaattctccttatggccaaggacctcaaaataaatcgaaagctaagggaagtatttcggccagaataaagcttatgtagcccaggtgtttttgatgatttagcaagacaacaggacatctcttagagaaggcactcaaccaaggaatagaactcagatggtggccagctggtcagcagcctatttctggtaagtactatctcatgagatcatctgttaacgtccttctggtttaagactcatacatcttaagaaccacatcatacatatttgaaaggatgcttattttccctttttttttgtttcttagaaggtggcaaatctatgaatgggatcaagttattaatcaacaatttaagaaggaaaaaggggaggggacaaaacactctctggatttccacaaacaacttctttttttaaaaaattgaaaatagttatgggtacatagtaggtatgtatatttatggggtacatgagatattgtgatgcaggcatacaagatgtaataatcacatcagggtaaatggggtatccagcacctcaagtatttataatttctttg

SEQ ID NO: 75796 - DNA, 744 bp, Homo sapiens
tctagaatccaggttgaatataggtccaatcacctagtgcaatggttctcaaactttaatgtttataagaattaactaggaatcttagtttaaaagattcttattcaatacatctgaagtggggcctgagattctacatttctaagaaattctcaggtaatgccagtgctgctgggccctgggtgtgggtgtggagttacataattttagagtctagagaagaggttctcaaactttagtatggatgagaatcacctggagagcttgttaagacagagcgctcagactgtagtctactcttgtgtcatcactgagtcttggccaatcaaaggtgaccaactcttcaaactgtgttcaaatgatgcaaacatcaagtagcaacccatctggttgtttctgtacctcacaccattttctgtatgtcactttctttcttctatctataaatcttccaccatttggctgtgctggagtccctgagcctactctggctcaggagkctgctcaatttgcaaattgttctttgctcaatccctcatccccagagattctgattcagcaggcctagggtggggcctgagaatttgtgtttttgacaagttccctgataacactgatgtgagtgggacacactttgagaactactgctctcaaatagagtgcagccctttcctaagtacctcctattaattgccatctaccagaaaaaaaggtacagtcccacccagtgaagagatggatccc

SEQ ID NO: 75797 - DNA, 654 bp, Homo sapiens
cccagtgggagggaaacttgaccccatggcagaggctgctgggtggasaaccaaggcccagggtggatggaggaggcagctgagaccatggggagctgctgctctagcaagaaccaagacaagggagtataactggaggggacacagtagacccccagcagaccaccagatcaccaattatactgactgtggtctcagaagcttctgccagggggatgcctaatggacagacaggacatcatctcaaaggccagaggggaccagaagacagtatgaggagcagcaggttgacatcctcacagcaaagaggacaggtaagctttcctctccatccagttgccatcttatggaagactacatcttgtgagaggcacctcttgtggaaagtgccttctagtgagtggctctccaagacgagaaacagtactaagaggggcatggaacttaaacttgattgagtctttatccagaagacataaacaagtctttaaaagactatttaagccagcagacatggaaatatcttctatgcacaaatttagggtttttatttccccaccaatggtgggaatgaggttttcagggcgcaatgatgatagtttctttcccacatctaaatgtagtgtgcaaatatgtcacctttcaactcatcaa

SEQ ID NO: 75798 - DNA, 1716 bp, Homo sapiens
aaaggttgcactaaggcccctgggcgccagggggctctgtggagactttgggcttcaggcttttctgttgggttctagactgttttgcaaactatccgtgtccaagaaccaggtttttcccctaagcttttacagaccattactttttaaaaatgcaataaaagttactagaaagacacaataaagacatagaaaatacaaggcctgattttctccaacagtgttactgtgaacattgtaaaatatataaaaagtcgaaataattgctttgtacagtgaacaccaatatacccaccacctggatcctaccattagcattttgttatatttgctttattatttattgatccgtgtttctatccattaatccaagtttggttttttttttgttttttgtttttttttgtttttttatgaacttaaagtaagttgctgacattagtgcacttcacccctggacagttcagtatacatatcacggacgatgtttcaatttttttttttttttttttttttttactttagtagagacatggtttcaccatgttggccagaacggtctcgaactccctggctttgagtgatccgcccaccttgacctcccaaagtgctgggattacatgcgtgaaccactgtggccagccaggtttcaatatttttacgaatttttttttttgaggcatacttcacatactgtgaaatgcacagatcttaaatgtactattcaaaaaagaatcttcagaaatgcatatacttgtctaacctcaaacagtaacaagatacagagcttttccatcatccagaaggttctcttgtgcaccttagcagccaatttgcacaacagtttaaccataagtcctaattttttttattatttgattcaagaataaagttagtttgtcaaactgccattagattttctaaatacacattttaaattcctgaacttacctcctcatgcactggtgataagcagctcctgaacagcctcgctgggggaccactgtgtaagtaaagcctattctgagatgctgggttcacagcccagggccctgtgaccgtattcaaagtccacttgcttggaagtctccaaagctcatctctctgatgggcacatcctgtgacgtcctctgcatattccctgtgctcttgttgttttcacctccaaagggaaggagagattacatggtgcggtgggtctgtagggagaatgagaggagctcctttctttaccctctcccttctctgctaccctgcaacggaagcaaaagggaccccacggtgggactcccatcgccaggaataattcccccaggaaaccttgcaggcttctccccmttcacaacctccatgtctgcaggtggtctccgtgcctcagcagggggcaaaaggtggtgctgccgcctcaagactgcggaaggctgaactgtgggcggtgattcccaccacaagttcttctagaacaaggcatcttccttttatccacacctgaagtggggtcttacctagacactggtgtgtttggttacttcaccttaaaatgagtttgtggcacctgagagatgctctcagactcccccgcaaacacggctttcagagctgcggctctcaggatgaagttttgggattgcaggccggtcctctggagggctatcgggttggctctgtgaaacactcagctatcccacaaaaaacgatggcgtgtgtgctgtggga

SEQ ID NO: 75799 - DNA, 476 bp, Homo sapiens
gatttactcactgctcctggccacacctaagcctggtctaggctggcttgggctcattgggtttagcatttcctttcaggccaatgcagaggaacttagcttgagagctcagagacagagatgtcaatgtgaaataggaaataggacagactactaataatactggatcaggaaactccaagataattaaggttgtccgctgaagtccactggacactattcacacctcatttctcacttctctgttgtgacagcccaacatagttgagatcctcaggaaagaaaacaaattcacttgatccttgctgaggcttcaacatttcaaccactgaaaactttcttcaaatcttttcttacttgagtttaccttgtaacttctccagacaaccatctaaaataatgttcttcaaagttgtggttcataaactacctacattagaatttcytgaactacttgttgaaaaatgcaaattcta

SEQ ID NO: 75800 - DNA, 476 bp, Homo sapiens
gatttactcactgctcctggccacacctaagcctggtctaggctggcttgggctcattgggtttagcatttcctttcaggccaatgcagaggaacttagcttgagagctcagagacagagatgtcaatgtgaaataggaaataggacagactactaataatactggatcaggaaactccaagataattaaggttgtccgctgaagtccactggacactattcacacctcatttctcacttctctgttgtgacagcccaacatagttgagatcctcaggaaagaaaacaaattcacttgatccttgctgaggcttcaacatttcaaccactgaaaactttcttcaaatcttttcttacttgagtttaccttgtaacttctccagacaaccatctaaaataatgttcttcaaagttgtggttcataaactacctacattagaatttcctgaactacttkttgaaaaatgcaaattcta

SEQ ID NO: 75801 - DNA, 589 bp, Homo sapiens
tgccatgtccgtaggagttccttatctaaatctttagaagaaacgctgcccagtgcataaatagctaacaaaggccaattagatctttaaattcaatttgctgaaattttgtgtgtgtagtttttttttttttttttttkctttctttctttctctctcttttttttttttttttttttgagacggggtcttgctctgtcacccaggctggagtgtagtggcatgatcactgctcactgcagccactagctcccaggctcaactaatcctccaacctcagcctcaaaatcacctggggctacaggcacatgccaccatacctggctaatttttaaattttttgaagacataggtctcgttgtgttgcccaggctggtctcgaactcctgggctcaagtgatcctcccactttggcctcccaaagtgctgggattaaaggcatgagccaccatgcccagccaaaattttgttttttaataagataaaatgtaaaatgcttagcaggttgcatatgtaaaaattttacatatttatagtcattataactacataactcttaaagtatcacatataattggcagaaaatgca

SEQ ID NO: 75802 - DNA, 589 bp, Homo sapiens
tgccatgtccgtaggagttccttatctaaatctttagaagaaacgctgcccagtgcataaatagctaacaaaggccaattagatctttaaattcaatttgctgaaattttgtgtgtgtagtttttttttttttttttttgctttctttctytctctctcttttttttttttttttttttgagacggggtcttgctctgtcacccaggctggagtgtagtggcatgatcactgctcactgcagccactagctcccaggctcaactaatcctccaacctcagcctcaaaatcacctggggctacaggcacatgccaccatacctggctaatttttaaattttttgaagacataggtctcgttgtgttgcccaggctggtctcgaactcctgggctcaagtgatcctcccactttggcctcccaaagtgctgggattaaaggcatgagccaccatgcccagccaaaattttgttttttaataagataaaatgtaaaatgcttagcaggttgcatatgtaaaaattttacatatttatagtcattataactacataactcttaaagtatcacatataattggcagaaaatgca

SEQ ID NO: 75803 - DNA, 589 bp, Homo sapiens
tgccatgtccgtaggagttccttatctaaatctttagaagaaacgctgcccagtgcataaatagctaacaaaggccaattagatctttaaattcaatttgctgaaattttgtgtgtgtagtttttttttttttttttttgctttctttctttctctctyttttttttttttttttttttgagacggggtcttgctctgtcacccaggctggagtgtagtggcatgatcactgctcactgcagccactagctcccaggctcaactaatcctccaacctcagcctcaaaatcacctggggctacaggcacatgccaccatacctggctaatttttaaattttttgaagacataggtctcgttgtgttgcccaggctggtctcgaactcctgggctcaagtgatcctcccactttggcctcccaaagtgctgggattaaaggcatgagccaccatgcccagccaaaattttgttttttaataagataaaatgtaaaatgcttagcaggttgcatatgtaaaaattttacatatttatagtcattataactacataactcttaaagtatcacatataattggcagaaaatgca

SEQ ID NO: 75804 - DNA, 729 bp, Homo sapiens
gagaaaattggcgattaataggttgtgggagtgaggacatcagaaaagatccagtagtaaaaatggtcacagggtgacctatgacatttgacttaatcaggagtaaattactctgcaccccgagtagaactgagagctttctggtgcacaacatttcttacatgtccccttcatgctgagctggacacattccagatagcagaaggcagggagaatcccagcatctcagcccggggaccagcagaggctccatatgagctgctgtgagcatcctccgctcctcaccagccrtgggaacaaggaacacggaaggagccgctcaacctctcccgcctggaaacccactgtctccctcccccatcagggccacctctgaggatttgggttggccccaccgacttccaggaagcctcctggatggccccacccacttccaggaagcctcctggatggccccacccactcaacgctcaatgtgaaggttgactgcccagcatggcgtcagtctggctaggtcctgagttctggttcctcagggctcagggggtggtgcccggcccatgggcatcacctggagacttgccagaaatgcagaatgccaggccccaccccagaccagaatctgaatctgcaccttaatgagtttcccaggtcatccatgcacaaaaggcttttcctgggggtgctgacactcgaggactcatctccaggacaggaagagagacattg

SEQ ID NO: 75805 - DNA, 729 bp, Homo sapiens
gagaaaattggcgattaataggttgtgggagtgaggacatcagaaaagatccagtagtaaaaatggtcacagggtgacctatgacatttgacttaatcaggagtaaattactctgcaccccgagtagaactgagagctttctggtgcacaacatttcttacatgtccccttcatgctgagctggacacattccagatagcagaaggcagggagaatcccagcatctcagcccggggaccagcagaggctccatatgagctgctgtgagcatcctccgctcctcaccagccgtgggaacaaggaacacggaaggagccgctcaacctctcccgcctggaaacccactgtctccctccccmatcagggccacctctgaggatttgggttggccccaccgacttccaggaagcctcctggatggccccacccacttccaggaagcctcctggatggccccacccactcaacgctcaatgtgaaggttgactgcccagcatggcgtcagtctggctaggtcctgagttctggttcctcagggctcagggggtggtgcccggcccatgggcatcacctggagacttgccagaaatgcagaatgccaggccccaccccagaccagaatctgaatctgcaccttaatgagtttcccaggtcatccatgcacaaaaggcttttcctgggggtgctgacactcgaggactcatctccaggacaggaagagagacattg

SEQ ID NO: 75806 - DNA, 1141 bp, Homo sapiens
atgatatattaaactatagaatttggtgatggatgagatgaaggccatcaaagatgattctaggctttcagaattgaaagactaggaaaatgctaaaattacctaagatagagaatacagaagcaggaacaggctaaatgtgatggcaattagttgactattatgcatgaggtgccatagtacatctgggtagagatatctactagatatttgaattaaatggtcctagagttaatgggagaaatgtagacctcaggctatatgagagctgtcagtgcaaagacagaagttgaatctgtgaaagcctctggaatagagtcacagttaaagatattggaagttgtgaaagtatattataaccgattagtcattagatttataagtttacaacttaaaataaagggatagccctgtatttgcctacaattagactgagttattcctagaaagcgtttggccatttctagcagcctttatattttgaaacagcctttgctgtggtgactaagagttatgtagttcaaccatgtgagttatatttaggtaaaataattttttatggataaaaaatattgtataacatccaaaactagttcatattgatatcaaaaagtacctgatatttaattcataacaaatttccaaagaacatatgttaaaaaaacaggcttcctagattattcaaaattagctctgggttttcattaatttatggtgttgattaacaatccataaattattaattaaacatttgaaaaactactacgtgtaagatgctgggctaatagtctgtgagatacaaagatgactcaaacataaaatctgtccttaatatacatatggactagtacggggaaataagacacatacttaggtaartatacaaggagtggagagttagaaatcatagataattttaaaataaagaaaaaattccatttgcaatagcattaaagagacataagatacttaggaataaatttaacaaaagaagggtaaaacctatattctgaaaactataaaatattgttaaaagaaaatttaaaagatacaaataaatggaacaaaaatcccatgttcatggaccacaagcatttttaaacattattacgaaaatgatggtcccaaattagtttatgca

SEQ ID NO: 75807 - DNA, 665 bp, Homo sapiens
tggagcaaaagattaggtggagacatgcaataggccatgtaaggccctgaaggaacagtgaggtagagtttctttgaaaaatctgtgcattcaaaagcaggttgtataagagaaactttaraaagccatgcacatgctcagagatgccctgagaagaacctcagctttcagatcacactcatccctcagctcaatgcacaactcctaagtgttgaaagaattctctagcacagggatgatctgcaaagattgagagtgatgtttgtttgtttgtttcttgtgtgtgtgttctgttttgtgctctctcagtctctctctctctctctctctttatttctctctctggctctctcctgttgaaggaaatctgctaaaactagctgaacagcagttagggaacagagattacagtgaccacacatgataaagaacacaatctttcaaaaataatttttaaaagttactaaacgtgtgaactactactgttgtcgacaatcagaaaaaaatagcaaaaccaaaggaagggagagtatatgatttacaaggttactacattataatattcaaaagtccagctttcaacaaaatatcaggaaacatacaaagaaacaaagccatagttccttcaaaggaacacaataaattgttatttatgattccaataa

SEQ ID NO: 75808 - DNA, 1534 bp, Homo sapiens
tggaaagtaagggctaattcttaggcaaatttttgtcttcagccctaagcatagtatctgggtcatagaggcaaatgataaatacatgctaaataaatgaataagcacaggaacaggttttgtcaactgtgaaagagatttaaggcattaggggttaggtggatccaagaggccattttgtaatccatggaatcccactctgtagacatctaccttaaggtcagctctgggttaaaaaagggctgtctctgctccccactgggcaatccctggggaccagagctgactgagcccacaggacctggactggtgaggcccatcagcctgcaagcccctgagggagttagcctgctttattcagcattgtatctccagccccagcacacatggggctttaggagttcgtgaaatgtgccccaaaggaaattcttccaaatagagactgttgtggccaccgggtggtgccattgttccagccgaagcccacagagcctactgggaagaccacattgtttggaactttgagttgaagccaaggttcttcaacatatctctcaggctctaatctcaatgcagtatattctcatcccataacaaggggattaacaacacaattgtagttaatttgaattgagaaaatctatttcagaaagcaaaattccaagaccattctttctctcagccagccaagaagggcccaacttgttgataggggaaggttctgcacaaactggcaaatcggcttgcaggctgaacttcctacacagctcactactgtgctgattcacagaactgcagaactcactaagcattccggcccctgtgcactatcttggtacccatcataaaggcagctggagacaaatacaggaaggatcctcaacctaaattcccatcactccttccacagcactctttgctcgcaagctcttggtgtaggatgcgtctctactcttctccatatgttcatatcctacctttcctttaacgttaatttcccaaagaggacttttgtgtgccccctgctcctaaaaccaaaaccttctctgaatcctggaagcactctgaccaaatgggctctgagaarcagcactgtgacccacatttttctgtacctgttgtttcttgactcatgattaaggtggtaattccctttaggacaaacttcattttttgagtttgttgtgttcctgcacacaaaaagcactcagtagatatttatggatgttgaacagcaaagtaaaacatactgcttcatattcaaagggctgagagatgtttaatagctaaacataaaaagagagagttccgtgggtcattactcttgttctcagatagctatagattatgattttagattataatctgtacactagcagtatgactttgtattatattattattagaaataatattaataataagtgcatttattgagtgcctaatatatagtagtcactgtgctgtgcattttacatatgtacctaatttttttctcaacaaccctgggaggcattatttccattttccacag

SEQ ID NO: 75809 - DNA, 806 bp, Homo sapiens
ccaggccctactccctggaatttgttaatgttaccttatatagaaaaagggactttgtggatgtgcttaaattaaggatcttgagaagggaagatttttctggattatctaggtggctgctaaatgtagtaagaaaaattactgataagaggaagggaaagagaaattgggctacagacagaagagaagaaggccatgtgatgaaagcagagggaattggagtcagaagcagagagagaagctgctggctttgaagttggaggaaggggccatgagccagccgagatatgcgaaaaatgcagctgcagggactggaaaagtcaaggaaagagactttcccctagagtctctgaagggagtacagccctgctaacaccttggttttgactgtttaccattttggacttctgacttttaggactgtaagagaatacatgtgcattgttgtaagccatcacatttgtagcaatttgttacagcagccataggaagctaatacatgggtggtttggcttgaatatttgtgagtgtgatccattttttgtcctgttcatttcttctgccatgtgaagatatagcagttttcctctccagaatatgcagcaacaaggtgccatcttgtagcasacggaacaagccatcactagcccctgaatctgcaggcaccttgatcttggaattcccagcctccagaattgtgagaaatttatattgtttataaattacctggtctccggtattttgttgtagcaaccagaacagactaagactaagacaatgggctaagatgaaaatttttatccatg

SEQ ID NO: 75810 - DNA, 634 bp, Homo sapiens
ggatccttatgagaagaattataagtaaaagtgacaggaattatgagacaaaataatgcataaattaaaatcacagtcagctattgaaatatatttaattttcaagatttctgattctgttcattatctttttatattttttctattttaagcattttaaagatgctttggccagtatcaaattgatactcctaagggtgtatcaatttgacttgactaaaagtcccagaaatattaaagatgacaagatagaaaaatatgcctcaaagaatgtagaaattacataaagaactaaattgtctaattttatgtttaacagtttcccaaatgtgacaacaactctattgtcccaaatgtgacatttatggaaataaagtgtacaactgaaaaacaatttccaaaactattgatgrcaaaaagcaaatttggatcaaccacactagaagattgattgatttactatttaattctctctataaacaatgacattgccaaattattgacatgtgagaaggcaatccaaagaagcagccaaaaatgtactgagaggagctaatccaggaaactctatttattagatgatgctgaaggccagtgtcataactccacatcccagcactagctgcatctccag

SEQ ID NO: 75811 - DNA, 634 bp, Homo sapiens
ggatccttatgagaagaattataagtaaaagtgacaggaattatgagacaaaataatgcataaattaaaatcacagtcagctattgaaatatatttaattttcaagatttctgattctgttcattatctttttatattttttctattttaagcattttaaagatgctttggccagtatcaaattgatactcctaagggtgtatcaatttgacttgactaaaagtcccagaaatattaaagatgacaagatagaaaaatatgcctcaaagaatgtagaaattacataaagaactaaattgtctaattttatgtttaacagtttcccaaatgtgacaacaactctattgtcccaaatgtgacatttatggaaataaagtgtacaactgaaaaacaatttccaaaactattgatgacaaaaagcaaatttggatcaaccacactagaagawtgattgatttactatttaattctctctataaacaatgacattgccaaattattgacatgtgagaaggcaatccaaagaagcagccaaaaatgtactgagaggagctaatccaggaaactctatttattagatgatgctgaaggccagtgtcataactccacatcccagcactagctgcatctccag

SEQ ID NO: 75812 - DNA, 1277 bp, Homo sapiens
tgtatactcaatatacacatatatagatgtgtttgaaaaatatttctataaaatattcatattttgtagagatttgattttgcataaatgtctataaagtgttaataattattataatttatcattattcaagataaaatgtagggaaaaacgtggtattttagagagttaaagtgtgtaaatttttgcagtgtgttttagatacctcactaaatgtaagaatattctaattctgtttcagttattaatcacatttaaatagagtaaattcaactctataaaacgtcatacggcatacatttattataaattccagttctgttgaaaacaaactatgcaatttttatttataatcattaattttttaatcttgaattgaattttgttcctctcagctagcaatgttccctggttgtgctgttattatgtcaaagagaaatttttttaggtagttgattagttactgtcatcctttaactctgaaaactgtagtggcctcctatgttttggtctgtacccaatacaggcacacagctgtaggaaaagacaaagaatgtatttgaaatcatttcccaatgttatgtcccctaaaaaaatgatttataaggaattatgcagacattttggcacttttttttccacagtttttattacacttgtgacttgtaattctataaacagtgttgtcccagatgctgagtgtcatcttcttatactagggtaaaatccatacttaaatgctccccactaattgyaaccccaaaatactaacctggtgactcacattataaatctgaggttgaaaaccagcaactcatcatgacaacaattgatttggacacatcttaatatacaggctcatttctcagcctcagttttaatttggtgcttgagatgaaattctgtttatgaaaattaaatagaggttaactgaagattaggctgttctgctttttaaatgttctcggctttaatatgacaccatgtgacatccaggttttatttctgtttgtgtcggtgtcatcttcctgactcacttcctcaaaccagctaataaacacaaaaggtgaatacaaattagtatgcttgtcacagctgctatcactctggaattcccttttaaaaattcagaatatgaaagataagtaaaacaatgcctgcttattgcagcttaatttctaggaaagattggtgtccagaagccacatctcaggcagtactctgtcaatgttaaagagctttttagctagaaacaaaaaagaggttgtagatgcatt

SEQ ID NO: 75813 - DNA, 692 bp, Homo sapiens
ggatcccttccttacaccttatacaaaagttaattcaagatggattaaagacttaaatgttagacctaaaaccataaaaaccctagaagaaaacctagacattaccattcaggacatagggatgggcaaggacttcatgtctaaaacaccaaaagcaatggcaacaaaagccaaaattgacaagtaagactttgattttgattgctctctrtggactcattcttaccttcacttctcttctttccttccatcccaaaatatttttgattctctaatcccagtcttttagctactaaggaaatagtagtgaacaaagtaagaaaagggtgacagggagtgtgtatatgtttgtgtgctgggggttgacgtggtgctgttgacgaggtttctcaaattcaagtggaatgagcacatacttcaccagcaataaaacaccagtctaattttttaacagttcttttatagcaactaaacataaagacacgcagaataagtcctcagatttttgcatcaatattatcattgttcaaaataattatgttagagaacagcatatgggcaaaaaagaaagatgggaaacaatacaatttagaaagggaacattccagtctttataatctaagaaatctatgtttaaatcccaattcttttgcttctggtgtaaaaccttaggaaatttttttgacctctct

SEQ ID NO: 75814 - DNA, 868 bp, Homo sapiens
gagattttaattttagctaatttattatttaaataatatacatttcagcaatctaccaattatatttatatgaatacatactataaagtatgcttttacttaatcagaataaaattaattgaaatccacattaatttgcccatcaacttacaaaaagaacaggaggctttttatgcttgattttaaaaggaaaatgaaaaacaatgacagaaggataaaaaaaaggatttttttcaaaaagttcataacacttgtagggtcagattctatacttgatcccaacaaaatgatttacattataaattcacattatgaacattataaggtttttgaaaggattactttttggtaatagcaaaacccaagttrtcaaagaaagatgataggttaatatacatcccttgataatacattttggttgtatttttcaatagcatgggttaataaattatttttcgttccactttcaattattcagcacgttctatgtttttaaggtttttttcatagctattctcatcaaacatacatacctctgctttatcttttgcatttgatcattcatatgaaaatattaaattatgtccttttcagtagctcaacatcacacactgcagcctccctaaagggaggatatattacttagagataagcaattaggtattttaaatatttagatacccaaatatcattctacagtcttagtctctcttattgagacaaattgttccctgtttctgcatccataaacatcaccagagagaacattaataatccttagatatgtgcctcagtagaaactgggaaatagtataatgggattttaacttaaatgaagaccaactgtgagtaacacttactttgcaat

SEQ ID NO: 75815 - DNA, 657 bp, Homo sapiens
ctcatgactccattaatgccctctctggagggcagatgagtgagttctttctctattagttcctgcaaaagctgtttgttaaaaagatcctggtacttccctctgctcgctcttgctcsctctctctctctctctgtctccctccctctctctctctcccctcccctcctttctgtctctctgtcttgctcacttcttctccactcatgtaccctctgcacaggcaaactccctttcatcttccactctgagtggaagcagtctgaggccctccctcaatgcaccatcatgaaccttccagcttgcagaatcgtgagctaaataactctcttttctttataaattacccagcctcagcattcctttataccaacacaaaacagactaagacactcatttagcagtattttttctcaaactggattcagcaaggacagagagagaaccccaaggtcagcctagtcaagcagaggactcagaggggctggatacaagttttgatcaaaggaggcagtctttgtcacagccactggggacatacaatcaggccagattcggtaaataagaataaccttttataagtcgagaaagatcacgaagaggcaggatattgctctaccctgggttaggaggatcatgagcaagcctttcttcctc

SEQ ID NO: 75816 - DNA, 635 bp, Homo sapiens
ccactaatcacttcatttttcttttggctctagagaaagccagagtgttttattccttgatgagcatttgagaactgaatcctttaatttatcttttggtccaccttccaggacatgtgtgcacgtgcatacacacacgsgcacacacacacacacacacacacacacacaatttatccatctctctcttgcttttgtggcaagcacgtcttcacctgttttttttttccccttgcaaacttgagcattgattcacatttcaagccaattgtttattgctgttgctattgagaatgtgacattagggagattcagaacaatgcatttcagctcactgttgactcatgttggatgatttcagcagcagcagctcaagctggtggcctgtgggatcaagataatgagcctgaatagctgccgctgcagcactgagaggacaagtagggctggagggaccaacagctgggacccttccagaattctaaatgatcatgcaaaagacagaaacaaggcagtttgcatcaggaaaaggtgataaaggtagaacaacttattagaacagagaacaagataaaaggagtgatagggaaaagaatgaagccagaaaatataatagtgtataaccttaggctagg

SEQ ID NO: 75817 - DNA, 724 bp, Homo sapiens
aatacaaaaaattagctgggcatcgtggcgggtgtctgtagtcccagctacttgggaggctgaggcaggagaatggcgtgaacccaggaggcggagcttgcagtgagccgagattgcgccactgcactccagcctgggcgacagagcaagactccgtctccaaaaaaaaaaaaaaagaaaagaaaaaaaaattctaactattaaactacaatattgatgatgctcttacaacctccctgttcactmcatatcccacccatcgagaggagggtctgatatgcccccctaggaagaagtatcccttcattaagggtcacaggtaggacatgcttgttaataatacttgctgattgtagactctacttttcccctgataaacttcctcaaggtagtttctggacctcagttccttccatgtaaaagacacacagcaaaacttgaaaaggttgttatgaaaattcctgggattatctgtggaaagtgcttggcacagtgtctgcaatatagtacatgttcaatgaacgacagataatagtgatcagggctgctgtgtacagttgtatgagctgtactatacagctccaggggttgcaaatttaactgcgatgtgaaggatggcccctggaattgggataggtaggaaataacagttagacggatagacagataaataaaaatatctatgtacattcatcccttggtgttggcaggggattggttccag

SEQ ID NO: 75818 - DNA, 724 bp, Homo sapiens
aatacaaaaaattagctgggcatcgtggcgggtgtctgtagtcccagctacttgggaggctgaggcaggagaatggcgtgaacccaggaggcggagcttgcagtgagccgagattgcgccactgcactccagcctgggcgacagagcaagactccgtctccaaaaaaaaaaaaaaagaaaagaaaaaaaaattctaactattaaactacaatattgatgatgctcttacaacctccctgttcactccatatcccacccatcgagaggagggtctgataygcccccctaggaagaagtatcccttcattaagggtcacaggtaggacatgcttgttaataatacttgctgattgtagactctacttttcccctgataaacttcctcaaggtagtttctggacctcagttccttccatgtaaaagacacacagcaaaacttgaaaaggttgttatgaaaattcctgggattatctgtggaaagtgcttggcacagtgtctgcaatatagtacatgttcaatgaacgacagataatagtgatcagggctgctgtgtacagttgtatgagctgtactatacagctccaggggttgcaaatttaactgcgatgtgaaggatggcccctggaattgggataggtaggaaataacagttagacggatagacagataaataaaaatatctatgtacattcatcccttggtgttggcaggggattggttccag

SEQ ID NO: 75819 - DNA, 492 bp, Homo sapiens
  misc_feature (1)...(492): n = A,T,C or G
ggggatccttgagaaacaaaggcattcataatcactaatgggaacatggaaaaaattatggacggctggaagttttttttttttttttgcaagtgactctaagtcttgtgggatgaaaaagacttctcttggacaaggatggtgaaatgaacattacaaggagagaaaatatcctggaaaattgacaaaagcttattactttatttgaaatcttgatgtttatataaatcatctttgcatacctcttttcttccagctcttagtctttctccacctggctcctacatacgtgatataaaaaaattatcaaaatattaaaatttaatataaaatctgaaaatcttcaccccaaagctttagagagttttaagatttaagagatttaagrgagnnnnnnnnnnnnnnnnnnnnnnnnnnnnnnnnnnnnnnnnnnnnnnnnnnnnnnnnnnnnnnnnnnnnnnnnnnnnnnnnnnnnnnnnnnnnnnnnnnnnt

SEQ ID NO: 75820 - DNA, 601 bp, Homo sapiens
accccaatgacctcaggaaggcactgcttttagcatttccatttgggtgaatacagtcggactagaatatttaaacattttctataaactctggggaatatcttaattcacatcaaagagtagcatgcacattcagtggttcgcaagcctggtgtgcatcaggatcttgggtagatctgaatcctaacattagtgaagacttctaagcttatttccaataagctcctcaggaaagcagatccttacgcatttagcttggctgtggtctgaagatcaacttgggaaaaaactgcattaactccatattttgcaaactttctaatcttaagaaccacctgagggaattactaatcataaaaaaaattctgggcgttttctctaaagaatattatttggcacatatgaaattrgatgtgggaatctatatttacatgagcctccacatgatttttataagaaataaagtttgggaaattctgcattaactaattctatggactgaatatttgtgtctctctcaaatttatatgttaaaatttgaatcgccaagatcatggtattaggaggtgggacttttggaagatgattaggtcatgaagat

SEQ ID NO: 75821 - DNA, 1263 bp, Homo sapiens
gcatagcctttacccaggtgattctgctgcaggttgtcctttgaccattggtttaggatctcactctcaaccttgcagcctcagaaaactgaaactattttaagttcattaactatggatctctctgtctggagtagactcatatcgccaacaagttcacagaaaaaaacacataactcatgagttcacagggaccaaggtatataacaaaatgctgaagtatttttttaaattaaaactacaactttcatgcaaggcagtatacttaggtcagtaagtcagagcagttataatcagaaagctaattcaaaaattgaaataagataatccatatgattcaaatttaaaaaatcaaggtttaaattgttattgaactcacagaaaatctttttaattatgtagaatggccatggctctctccatctttattaagaaatatgaatgtaggctgggcgcgatggttcatgcctgtaatcccaacactttgggatgccgaggcaggtggatcacgaggtcaggagatggagaccatcctggctaacatggtgaaaccctgtctctaccaaaaaaataaaaaatattagctggtgtggtggcgggcgcctgtagtcccagttacttgggaggctgaggcaggagaatggcgtgaacctgggaggaggagcttgcagtaagccgagatcgcgccactgcactccagcctgggcgacagagcgagactctgtctcaaaaaaaaaaaaaaaaaaaaaaaaaagaaaggtgaatgtatagacatttgcaaaaggatgtgatagtccttcatatttctgttattcagaattaacaaaggttaacattttaatatatttcatttttaaataattccttactacttaaatattacataatttatattatacacrctgtaaatacatatattgtctttttgctcataaaacattacagataaatagtgatgataattaagaataatgtattgtatacttgatattcgttaaaagaatggatcttaaatcatctgaccacacacacacacacacacacacacacgatgactatgtagagctgatatattacctggattgtggtgatcatctcacaatgtgtgtgtctatcaaaacattaagttgtcctaagtatatataatttttatatgtctatgatatatctccaagaagctgtttataaaaatgtacaaataaattctcccatgaaaaccacttggtactcctctctatctctattggaagctgtcttctggaa

SEQ ID NO: 75822 - DNA, 1166 bp, Homo sapiens
gtaccgtgattgtgcctagttaggtgaatttacaatacttatttttgattaaactagctctaatgaaaataggcaattggattcagaagattactgataaaacaccatggaagaaaataataattgtacaaacgaaagtgggaaacaagaaaaagaaataccacactctgcctaatatgagccctacatgakccaggtaaaaaaaaatggtaaacaaataaactctaaaaaaaattcaaaaaaaaatttataattatcagtgaggctatttaaaatatgggtttatgcccactgtttataaaaataagtttcatcttaaacacatgttgtaatttaaaatactggtcaatgatagtatcagatcattgcaagtaacaagtcattttaaaaactaaaaatctggaacacaaagacaaataccaaaagttgatgggtggatttttaaatatgaacatcataattcactaaccaatagccaatgacacatttcttaaatttgaatctataatagttgtaaaggcaagtattaatgtgatataaatttagaatcttttaattgctgcaacataatctatttaagaaaaatattaaaaaatattaaaaataataaaccacttaaacattaattactagaaatatcataaaaattttaagtgggagcaaaaataaatgtacttctttgataaatataataattagtccttaaaataaatatttatttttaaatgttcactttggtccatattttatatttttatatattagtgtaaaatataggtatagatatatagatacataaacaaatatagctgactaaccagtttttgtatgttttgttttctagactaaaaagacagggaaagaagacatttcaataaaataatattctttgcatagccactaagtacaagatttccaaataaattattttcatgtgattcccttaaatgcttgtaaaatgcacaatctaagtatttgaaaaggatattcttgaaaagtgcatttaaaattaacttcagactttcatgaatatatactaacagagttattacctgatttgtgttttataagaaatttaccaaaaaaataaaaaacggtctaactccttcatacaaacttaaaggcttagatccatcaactgagactctaaaagaaattaataataa

SEQ ID NO: 75823 - DNA, 1166 bp, Homo sapiens
gtaccgtgattgtgcctagttaggtgaatttacaatacttatttttgattaaactagctctaatgaaaataggcaattggattcagaagattactgataaaacaccatggaagaaaataataattgtacaaacgaaagtgggaaacaagaaaaagaaataccacactctgcctaatatgagccctacatgatccaggtaaaaaaaaatggtaaacaaataaactctaaaaaaaattmaaaaaaaaatttataattatcagtgaggctatttaaaatatgggtttatgcccactgtttataaaaataagtttcatcttaaacacatgttgtaatttaaaatactggtcaatgatagtatcagatcattgcaagtaacaagtcattttaaaaactaaaaatctggaacacaaagacaaataccaaaagttgatgggtggatttttaaatatgaacatcataattcactaaccaatagccaatgacacatttcttaaatttgaatctataatagttgtaaaggcaagtattaatgtgatataaatttagaatcttttaattgctgcaacataatctatttaagaaaaatattaaaaaatattaaaaataataaaccacttaaacattaattactagaaatatcataaaaattttaagtgggagcaaaaataaatgtacttctttgataaatataataattagtccttaaaataaatatttatttttaaatgttcactttggtccatattttatatttttatatattagtgtaaaatataggtatagatatatagatacataaacaaatatagctgactaaccagtttttgtatgttttgttttctagactaaaaagacagggaaagaagacatttcaataaaataatattctttgcatagccactaagtacaagatttccaaataaattattttcatgtgattcccttaaatgcttgtaaaatgcacaatctaagtatttgaaaaggatattcttgaaaagtgcatttaaaattaacttcagactttcatgaatatatactaacagagttattacctgatttgtgttttataagaaatttaccaaaaaaataaaaaacggtctaactccttcatacaaacttaaaggcttagatccatcaactgagactctaaaagaaattaataataa

SEQ ID NO: 75824 - DNA, 1166 bp, Homo sapiens
gtaccgtgattgtgcctagttaggtgaatttacaatacttatttttgattaaactagctctaatgaaaataggcaattggattcagaagattactgataaaacaccatggaagaaaataataattgtacaaacgaaagtgggaaacaagaaaaagaaataccacactctgcctaatatgagccctacatgatccaggtaaaaaaaaatggtaaacaaataaactctaaaaaaaattcaaaaaaaaatttataattatcagtgaggctatttaaaatatgggtttatgcccactgtttataaaaataagtttcatcttaaacacatgttgtaatttaaaatactggtcaatgatagtatcagatcattgcaagtaacaagtcattttaaaaactaaaaatctggaacacaaagacaaataccaaaagttgatgggtggatttttaaatatgaacatcataattcactaaccaatagccaatgacacatttcttaaatttgaatctataatagttgtaaaggcaagtattaatgtgatataaatttagaatcttttaattgctgcaacataatctatttaagaaaaatattaaaaaatattaaaaataataaaccacttaaacattaattactagaaatatcataaaaattttaagtgggagcaaaaataaatgtacttctttgataaatataataattagtccttaaaataaatatttatttttaaatgttcactttggtccatattttatatttttatatattagtgtaaaatataggtatagatatatagatacataaacaaatatagctgactaaccagtttttgtatgttttgttttctagactaaaaagacagggaaagaagacatttcaataaaataatattctttgcatagccactaagtacaagatttccaaataaattattttcatgtgattcccttaaatgcttgtaaaatgcacaatctaagtatttgaaaaggatattcttgaaaagtgcatttaaaattaacttcagaytttcatgaatatatactaacagagttattacctgatttgtgttttataagaaatttaccaaaaaaataaaaaacggtctaactccttcatacaaacttaaaggcttagatccatcaactgagactctaaaagaaattaataataa

SEQ ID NO: 75825 - DNA, 953 bp, Homo sapiens
tgctatcgtgattgttcacctgagaaatcaaattaagaatttgattatgctcaagtatctcattctaaaatgaacttcattacctacagtaaaaatgtagaactaccgttcattgagaaaatgaagtaacaataaaattatagagacaactgtaagtcaaattaggtgagatatcccccatttgcattcatgaaataaattattgaatagctttggtgatcttttttctatcacatagataaatcccgctgaaaggtgacatcttttgtggtggcttcttcccttgcttactttaatgaagcaaaaagctcagaaaatatttgagaatttttttcaaactgatggctgtgcctcttttatcatgcttatttgaataacaaaaatattaatgaattctttttcagtacaggcaatttcccccccccttttttttttttggcaggagaattgagccttctcagacaaatttgatttttgctattcatgatacttgtttagtcgttctactagtatgtaggcatcagcagtaatacaatttgtgcagaatggaaaatatgcctagagtgctaggcatgcagaaatgctaagcacaaggccaaacgtcagcatcaasacaggagcttgacgaatcacctttgaaggttctgttatcgatgttttctcctgatgtgcatgatgtgttctctctgttaattaactctatgaccttggaccattcacaatttctctaattcagtttcctcatctgaagggggtatgtgatcaaagggatgagaaatttatgggagaggaggacatcacagacccaaccacatgcagaatgggagatgatgaacccagccagttcctttggaatggcccatgaatacaaagctttattcattcatcaggatccaggcacccattacactatgagggtgtagtaaaagctgtagactaactcagaaataaga

SEQ ID NO: 75826 - DNA, 506 bp, Homo sapiens
taatggatgaatattaaagttctagcaatagtaatttggagtcaaggcttacttgatttcaatgctaattttaatttcactaatagagttaagaaagggaagaaaaccagaaaatagagtcaaggcacaggttagtgagcatttgagcatctcttcccaaatttgtycttacagatgctgaaggtcaggagaggaaggtttctccagcactatttcagatcctgaagtaattgagatatggtcctatttaccaccatgcctatctaactgagcactgttgtctactttccttaaaacatactatataggaaagttattttgctatttttttattttgtgtcttcaaagacattgaaagcaagtaaaacatatatgttggtaaaagtaaatgacttaaaagtatggcccatttgggttggttccaagtctttgctattgtgaaaagtgctgcaataaacatacgtgtgcacgtgtcttcacagtagaatgatttataatcctttggg

SEQ ID NO: 75827 - DNA, 675 bp, Homo sapiens
atacatagagtgtccwgataccacctatagttgagtaggatctagccttttctactttctcagccagaaaataaggtatgtggccacagccttacggcaatttaagtctgacaggcctcagttccttctgcttccgtggttagggttgtctgaccaagctagagatgcatatgcagtttacagttcttatttggttctgaaatactctaccacatcccaccagaatcatgcgttattcccgaccatctactttttctcaatcctatgtatagtgatgtttttaggcagctaatcattccaaggcgtatgaagagaactgtctaaacctctcttgctgccatctacttcctgcacaggtcatcctcagagtactctctgaatgcacgcagggtttgagaactgattggctcagaaggttctggattctggttttgattcatttcaaagacagcaactgtatttaggggaagaaggcttttttctctctggtcttggtgtccctacatatcaaggttgggcactaaaagtatcaataaaccagtgtgttcatcctcatctccacctttatattttgtggccatctgccaaactatgattctgggcatgcaatattaggtatgttgtccaataatgtacttttgcattcatcttcttcaaggaagcacataattgaat

SEQ ID NO: 75828 - DNA, 675 bp, Homo sapiens
atacatagagtgtccagataccacctayagttgagtaggatctagccttttctactttctcagccagaaaataaggtatgtggccacagccttacggcaatttaagtctgacaggcctcagttccttctgcttccgtggttagggttgtctgaccaagctagagatgcatatgcagtttacagttcttatttggttctgaaatactctaccacatcccaccagaatcatgcgttattcccgaccatctactttttctcaatcctatgtatagtgatgtttttaggcagctaatcattccaaggcgtatgaagagaactgtctaaacctctcttgctgccatctacttcctgcacaggtcatcctcagagtactctctgaatgcacgcagggtttgagaactgattggctcagaaggttctggattctggttttgattcatttcaaagacagcaactgtatttaggggaagaaggcttttttctctctggtcttggtgtccctacatatcaaggttgggcactaaaagtatcaataaaccagtgtgttcatcctcatctccacctttatattttgtggccatctgccaaactatgattctgggcatgcaatattaggtatgttgtccaataatgtacttttgcattcatcttcttcaaggaagcacataattgaat

SEQ ID NO: 75829 - DNA, 519 bp, Homo sapiens
caagcccaatggagcaggcrtggcctctaccataagctctcaacttggctcagacttatagacctaacttcaccctgacatcttcatcttccttctccaccctcttcttaactccaaacacaatgatagccttctcctctccaacacttaatggtttttctcattttagtgctaaaggtctttggacagtttctgtcaagtactagccctgcttgtctgcagatccagagagccttaattgacagattcaactgtgcctattcctgaaccaattctgatcaagaaagtggtcccaccagtcagtgctgacaggaattagtcttttgctgtcaactaatggtttccaattagggcaactttttccacccagagatatttgtcaatgtctggagacatctatggttgtcacagctgagggaatattaattaatagcacctagtgggtaaaggtgaggaatgtcattaaataccctacaatgcagagggtaaccccccaccaacagagtactgtccagcccc

SEQ ID NO: 75830 - DNA, 786 bp, Homo sapiens
attatgttaactgcttataaattttgaaagggggcaggttacagtgtgatatttgctattggatttacttataacaaatattagaataattctgggaaacatttataacaaatattattagaataattctagaaacaatttaccttttaagctagatgttctctacacagyctattaaattttaagaaaataatatttttgttttatttaaaagaagtaaaataatttaatcagtaaataaacattgagcaaagcattataattgagactgagttactgtaagtcatccccacctttatcagaaacatgatcgaattctgaagaaatgtgatctacaattaataagacaaactgaaattttccaaattctacaatatgctatagttattctggtaaaattagaaaccaggtttgtcttatttttccttcagcttcaaaaatttagcctatttttgatataaatgggaatattcagtaaaaatgaaacaaaagacaccatgttttttaaaaagttaaacctttgtaacttttattttggttgatgtatacatggagtaaatattaataaatttgaaagtcactcaaaatatgtagttcattatgataagtactaaatttaatgttgtatgatgtatgctttttttaattgcaaccacaggatttaggcataaaagcaattgcaacttatgactgccaaaacatctcctttgtcatttctgctctattatctaaataattctgtcatgaatgaaaggaatgtgatttatatctattgctcaagcagaa

SEQ ID NO: 75831 - DNA, 637 bp, Homo sapiens
ccaagactccagaccctaaacttctacgaaaaatcctggaaaggtsccttccaatggagttcaaggcagtctctctgatgtcatttctaagagacccaatctctgggttctagtttgtgaaaggtttcgttatcatcagttggtaggtcacaatgggtttctttaacctggtgaaaatatgatttggcataatgcatgaaagccttgcactgttgggtcatgccagagtttatgagtgagagatacatgaggttctattgttatggggataggacatccagtaactatttcacagatgtcagtctatgttttccagtgggcgtaaatctgattgccaccaaatagtaatacctttgaacaagtcaatccaattgattcagttagctttgcctaatgccattgggcttgtaatgtcttatttaactttttacaattgtccagtgtaagtacttatatcactggagatatctccagaaatgtcctgtgagggaaacacattttctaataaccttttagctactgataaaccatcaaattcctgcataggaaatcttcctgtgaataggaaaacatcctgcattggaaacgtgcattgatgatggcaattgaatggtacccatctgaaagtgttcaagtg

SEQ ID NO: 75832 - DNA, 664 bp, Homo sapiens
gtttgatcaattttgacaaatgtgtacacttgcgtaactcacactttgtaacccttgtaaaggtgaacatagtagaccagagtgagcaaggtgtaagtattagatgatgagtgaaagagattgggaggcctttggttataataaaaatatcataggaagccatcggatttttagaaatacacgttgtattttagaaaagttttaaatttacagaaagttgtgaaaatagtagagagacttcccaaataacttacatccagtttttgctrttgttaacgtgttatattagtattgtcatttgtcgcaacttgtgatacattattattgactaaattctatacttgattgatttctttagtttttacttaaggtctgtattagttagctgccgtaacaaaataccatagactgtgtggattaaacaacagaaatttattttttcacagatctggaggctggaactctgagatctgggtgccagcatgattgggttccagtgaggactctcttcctggcttgcagaggggcacagtcccctttcctaggtgtgttcttgctgaaagagagaaagaacaaggtctctgtgtctctttataagggcactaatcccttcaggccaaggccctgccctcaggactttattgaatcctgattacctcccaaa

SEQ ID NO: 75833 - DNA, 664 bp, Homo sapiens
gtttgatcaattttgacaaatgtgtacacttgcgtaactcacactttgtaacccttgtaaaggtgaacatagtagaccagagtgagcaaggtgtaagtattagatgatgagtgaaagagattgggaggcctttggttataataaaaatatcataggaagccatcggatttttagaaatacacgttgtattttagaaaagttttaaatttacagaaagttgtgaaaatagtagagagacttcccaaataacttacatccagtttttgctgttgttaacgtgttayattagtattgtcatttgtcgcaacttgtgatacattattattgactaaattctatacttgattgatttctttagtttttacttaaggtctgtattagttagctgccgtaacaaaataccatagactgtgtggattaaacaacagaaatttattttttcacagatctggaggctggaactctgagatctgggtgccagcatgattgggttccagtgaggactctcttcctggcttgcagaggggcacagtcccctttcctaggtgtgttcttgctgaaagagagaaagaacaaggtctctgtgtctctttataagggcactaatcccttcaggccaaggccctgccctcaggactttattgaatcctgattacctcccaaa

SEQ ID NO: 75834 - DNA, 744 bp, Homo sapiens
ctgtgcctaacattttgaggagctgttttcaaagtgactgtaccattttacattctcaccatcaatgtgtgatggttccagtttctttacattaaataatggcctgtttacttgtcttcttgccttgtattggagttctcccagtgggttctgaatctgctccacctcatccagttgtccaggtaagcagaccatgttgatcaaaggatcagaagtgtatgtttgtttgtttttctttttctttataaatttcattatttacaaaccttgacagggattattcttattttcatattaagaaagaagttgtaaataccagaggttacttggtygaggtaggaacagggatttgtatttaggatttattaggtgttagagagctgcttgcttcagatctgcagtgtcagcctactttgatatgataggtggcattcatatgacacacattctcacttgtgttcactgtgttatatgtagttcccagcaaactagttgtatctctactgtttttttcctagaaatgtgagggcaagagtaatgttttaggaataatctttattaaattgttcataaacttgacttttaattttcattagtattaattacttgcagcacaccaaaactgagctgcttttctgtgattcacaattgttgcttctgactactttattatgccgacttttgttatcagccctgtagggctatttaacattcaccttgaagtcagtataaaatttgatactc

SEQ ID NO: 75835 - DNA, 1585 bp, Homo sapiens
tgttgttgttgttataagtttctttatccccactcccacaatccccacaagtatttaatctaaaattaaaggcatgtaggcttagagaaatactgatcttctgtgaaatccacagagatccttatatttcgataacgatgatttactcacagcagagaaacaggaaaggattgtggaaaaataccattgttctttaatagcagctcaacatcataggctatgttcctccaactttagatcttaagcttagtgatctctggcaattataatttcaataataatgtcttccttaaaacaattataagtaaaagtatctcacacatatatctctcctctattcaaactattactttcagctatagaatgcatgcatatataaattgagtgaatttagggtatgttaatattagaccttgtgtgatatactatgaaatttaaaggtggaatactaacaattcagtatagtaaattagattttctatttatataatgtagaagaattcaaagtatttaaaccatttgccttactctgactcaacatttaaaagaacaatataattgtgatgttggtctattatatgttctgaatatcactggttgtggcctaatttcctaatttatctacctgtagccacattttgtatctgctgggatgctttggtttcaagtaaaagaacactgagttaaaagtggttaaaggtcaataaaactaaagtaacacaattccagggcagaggtgtcagcaggttcacagtgcagatctctggatccaccgagtctgcacagtctctgcttctactcacccttgtgaggtggctgtcacagccgcaccccacaccccacatcacagaattcaaaggccacgagacaggagcaggcacttctcctagagcatctccctctgatcartgaagaaaataattccaaaaagagtcccacccctgagaatggatttcttttccggtctccttggccaaaacagataataagcgaagacttagttgaaagaaagactagtaggaaagcaagtgtctggaatttcagcaccagtagtgggaggcaggcttaggtctaaaaacaaagaaaggctgggccagagaaaggctgttcgccaggcagccacagcactttatgtataaagcgagaaacaatcatctcacttgtgagtcttattatcctgggactttgacagtggttgtagtgatagagaacaaagcatttcctttgccaatttgctttcccactttctcagacaactatttcacaatgttctcttttcctcaaacttctaaaagcttccttctcttcgtcactctcagtttatggcctagccccttacctcagttaaaaatctagaagcattcctgagaaaatttccaggtttctctgccattaaccctactatcctactgggacccgaagccctagactgcgttcctcatgcagctgatggactgccaatctcaggccatatacagggacccttgcctactcaaggtctcaagtctccaaattaccttagtctctctcctgtaacatcattcttccctctgttggagtaatcccgtccacctgcccatatgct

SEQ ID NO: 75836 - DNA, 1048 bp, Homo sapiens
actcaattccaccctcagyatatcctgagcagtggccacatttatttgtagaaatcatgctcaagtacaatgaagacaaaaagtcctcgaaatatcacagcctttatactcgggagataaacattcacaagccggccccaactgcaccataccaagataagtatggacctgcaggatagcctaggctgtgctgcagtgacagaccaacagaaatatcagtgtttcaatacataaagttttgcttattcaaagtctactaggagcccattagctctgtacagcagcttcttttcaagcaatgacacagggatccagactgacttcactgaggctgtctcttctcaatggtggccaaaccaatcaacatgggagggtaagtgggagctgcaggttgcctagaagctttatggcaccttaatggccaagttgaggcatagctcactcctgccacatcccatgggccaggaccagtcacatggtgccagctaactgtaaaggagactaggaagtggagggcagcaccttttgtgtgatgagcattaaatgtctctgctacaaccttttgctcagtcagggaaaatgagaagagagactctcctttaggaacatcagatttagtaatattagacatggaggcacaatactcattctgtgcaataccagattattcaggaatacaagacagaaaaaaagatggagctgttcccatatctatagctataattatggccttttgacacaagctttctaagctcagttacattaatttagctctctcattataaatgatgaattttattggttttcctaatgtcctttattctttgtagaggagtttaacagtcatcaaagctgattataatgtacttgttaatgttttcaatttaattcaagcatgaagtggggtttatgacatttctacaataaatctcattgttaattcattgtttcttccatccaacatccttgttttccttgttagatttaattaaaaatccatttgaagcacatctatagccttactaatataatattcaaaagctctaca

SEQ ID NO: 75837 - DNA, 1048 bp, Homo sapiens
actcaattccaccctcagcatatcctgagcagtggccacatttatttgtagaaatcatgctcaagtacaatgaagacaaaaagtcctcgaaatatcacagcctttatactcgggagataaacattcacaagccggcmccaactgcaccataccaagataagtatggacctgcaggatagcctaggctgtgctgcagtgacagaccaacagaaatatcagtgtttcaatacataaagttttgcttattcaaagtctactaggagcccattagctctgtacagcagcttcttttcaagcaatgacacagggatccagactgacttcactgaggctgtctcttctcaatggtggccaaaccaatcaacatgggagggtaagtgggagctgcaggttgcctagaagctttatggcaccttaatggccaagttgaggcatagctcactcctgccacatcccatgggccaggaccagtcacatggtgccagctaactgtaaaggagactaggaagtggagggcagcaccttttgtgtgatgagcattaaatgtctctgctacaaccttttgctcagtcagggaaaatgagaagagagactctcctttaggaacatcagatttagtaatattagacatggaggcacaatactcattctgtgcaataccagattattcaggaatacaagacagaaaaaaagatggagctgttcccatatctatagctataattatggccttttgacacaagctttctaagctcagttacattaatttagctctctcattataaatgatgaattttattggttttcctaatgtcctttattctttgtagaggagtttaacagtcatcaaagctgattataatgtacttgttaatgttttcaatttaattcaagcatgaagtggggtttatgacatttctacaataaatctcattgttaattcattgtttcttccatccaacatccttgttttccttgttagatttaattaaaaatccatttgaagcacatctatagccttactaatataatattcaaaagctctaca

SEQ ID NO: 75838 - DNA, 700 bp, Homo sapiens
accacagcacaggaacccagactggcctccagccaatgactgggagcagcaaggaaactacagcccagacatgtctgcctaatgcatgactcctcaacaagtaacctttgttggaagccaagactttcttgtaactgcactgtaatctgtggctattcctacccaattctccttccttctgcctccctttgaagtgatatcacaactacattgtggtttttccttgcctggtttttctcctgttctctttctacctttcatagctattgcctgcaataaatctcttgtggatggttgtaattctaacaccatcttggaatcagcttcctgaatgactgaactgatgcctctacctccagcaagcatggatcttgttgttacyatggatgacatttgtcttttctggaattatagtatgtactgatttgtgcctggcatcacacagcatgatagttttgagattcatccatgttgttgaggttatcagtagtccattccatttttgttgctaagtagtattctgctgtatgaatacagcacaattgttgattgattattgtgttgttaccagttagagctattaagagtaatgctatcgtgaataattctgtacaagtcattgtatgaacatatgcttccattaatcttaagtaaatacctaggggtagaacttacagatgaagaaacagaagtacagcat

SEQ ID NO: 75839 - DNA, 556 bp, Homo sapiens
taaattaggaggaaagtgttaatggtaggctggcctgaccacacatcgtattagcctagagcagtcctcttttctatctcttttctcaatctacgaatagctctctatcatttgcaaacataccctaagttgggcaataaattttgcagccacctgggtgtaggcgatgtgagagaagtttctctaagatacagtaggagtgcccatggagggaacagatgatctagctgttggagggtgggagaaggagagccctcaatcctgggattaatcctgaaaaatgagagtggtgtttaagatgcagagagaaaaggaaaggagctttgtgaaagaagggaactctgtgcataaggaaaaagaggcagggctcagtcgtaggtgcaggacaattgtaaatatgcagayctggctagggcagtggggtctgaggggcttgggaggcaataaggccgtggggggttgcagccaccacatcccagaggcctcactctgttgtgctaaagagcttgaatacatcccgatggcggttatatgacacagtggcagtcatggcaga

SEQ ID NO: 75840 - DNA, 1040 bp, Homo sapiens
caaactccagtaatcctagctcaagatggcatgagttagagttggagtaaggaccaaggctagcttccctagtgtccacagtttcaaaacacactcattaatgttatttgacatcatttttctacatgtgctttctttggaaagtggaaaaatacaccactgagagggtttgtcagatgaaaccatattgcaaaacatttgcaaaactgaattattgacaaaatgtatttcatcccaaaagggcctgcttgattgaaagcagttgtagtgtttcaacatgaacaagttgcttatcctctctgttgcctatgtgtttgtggattctgcagaccatacctctgaactttgactgtccccagatagcagtttctacacagctaactcagagcagataagaactagaattttagaacgctctatttctaggccttttgttctttgagtgaacattcaagaaaagcacatcctcatgttcttccatggttacctgtaattcataagaggctgatttccccctgcatgcccatagtgtccaacatcacctaccaagttaaataatcatgcttggccaatcccagaatggactgagatttccatgatgcagctgtgccttgttcagggtcccttgaagagatgctcattttgagtcacgtgactgtagggaggacttgccacttattcctaaatgtcccagtttagccaacacttagctcagctcagaaaataacaccaaaatcagctctgccactaacaagaaaaagaccatttttwaaatttatttatttatttatttatttatttatttatttagacagagtctcactctatagcccaagctggagtgcaatggtgtaatctcggcttactgcaactctgcctctggggctcaagcgattctcatgcctcagcctcccaagtagctgggaccacaggtgcgtgccaccacacccagctaattttttcattttagtagagatggggtttcaccatgttgcccaggatgatctcgaactcctgaactcagtgatctgcccacctcg

SEQ ID NO: 75841 - DNA, 2867 bp, Homo sapiens
gtataatgatcaactcagtatatgtagagtttttttccaattttgaatctaatcaaggaacacatgtgacaattgtcatgtcgtccatcttttttaatccagagcccagccctgtttccccttttctcatgctattgacttttttaaaaggccaggccttaaaaaaaagcaaaacaaacaaacaaaaaaaaccagtcctggtcttcatcacttttttgtactgtactaagcctgtcttatagaaggccccagttctagactttttgattctttctttaaagtggcttaacttgttcctccatcctctgtatagcctacacacctaaagtcttgacttgattcaggttacacattttgaagaatactcatagatgaggctatctccttcatactgcatggcagcagccaggcatggtggctcacacctgtagtctcagctactcaagaaactgagatgagaggatcatgcttgagcccaggagttggaggctgtagtgagctgtgatcatgccactgccctccaacctgggtgacagaccgagaggctctctcacaaaaaaaatttttaataaaaattttaaaaacatagtgcatggcatcaggatcacattgagcctggttttctcactattagtgatgccaagtttgattcccaaattaaggtaatggcaaccacaattctctttactattaagatatattttccctttgtcaattcgctagtcatcctggggtgataatttggtgccatgcaaatactgagttccctaaagttagctttctttcaaaaataacaggtcggctgggcatggtggctcacgcctgtaatcccagcaatttcgaagacggaggcgagtggatcactgaggtcaggagtttgagaccagcctgagtaacatggtgaaaccccgtctctactaaaaatacaaaaattagccaggcatggtgacacaagcctgttatcccagctatttcgaaggatgaggcaggagaatcgcttgaacccaggaggcagagggctgcagtgatcctagatcatgccactgcactccagcctaggcaacagagcaagactctgtctcaaaaaaaaaaaaaaamaaaaaaacaaacaaacaaaaaaaacaggttgtgcttttaattttaataaggaattatactcagtttttcaaagctttcatcagctgggtatattcaacctaaaattatgaaaatgaaccagtgtctacaataaacctttacgtaactattcattttcttctcatatatctattggttttagtaccattctggtttacagtagtcatgcatgcttggactcgtaaattgggcattggtttccagagttctgtgcaggagtccccttctttactcatgttattttatggctattacatgccaagttcagaattggagcggtgtagaatgtggtggaaatgaatgtcatgctgtcatccataataaaattagatcagagatgcacccagtgtacgaacaagccaggccttactgtgggaatgacggctagtagactcttagtatagagtaattgtgccacacactgaaattgaaatgtggatcccttgaagtgacctctttccttttttaagcaggtcaaaagacatgaatgaaaacacaccagtaaccaaacatggtaatatcaagcctaattaggaatcaaacatcattcctaaagtctgtgtccgttcgttttctttatttcatttgtttttgtttcttcctcatctgtgattcattttcctttcgtcatcttccacagtggcttctgcaagaatattggtcttgaaatgtacaacatggctcgcacccacttcaaacactgtttaaaatctcatttattattttgtactgtggtctcacttaaaagctggtgttactgagactgcagagtacatgcctttaattcccagggtgaaggggtgtggggtgtgagggaagagagagagcaggagcaagcaagaggaaaagctaacactgagacagtccacacagaaatgcgaggaaaataagaatattcagaagtcttataggcagatgaattctctctggacactagaaaactggaaactacccaaacccaagcttagtaaagtacagaaaagtgatgaagaccaggactggttttttttgttttttgttttttgtttttttcttccatcaagaggttagttgcctaaggaccacattcccaggattacaaggatttgccttaatagcccagagaacatttatctgcagtagaattattaagatgaagagatgagattctatgtgagtcacctcttacatgagactatatttcaaacttaaaattaacactgggagtaatcatagtacattgagatcagcaggttaaagctatattaagtcggaattatgtttttccaattaactttaattttcagatactaaaatccaggtgttctggggagccaagcccagtttttttcctcagggatttatctccaaaatccagttggatcccagctctttgagaggccaaggtgggaggattgcttgaggcgaggagttcaaggctagcctgggcagcataatgagatcctgtttctaccaaaaaattaaaaaattacctgggtatggtggtgcatgcctgtggtcccagctactcaggaggctgtggggggactatcacttgagactgagaggtcaaagctgaagtgggctatgattatgccactgctcttcatcctgggctacagaatgagatcctgttctcgaagaaggaaggaaagaaggaaggaaggaaggaagggaagaaagaaggaaggaaagaaggaaggaaggaaggaaggaagggaaaaaaaagaaaaccaactgggtttagcatt

SEQ ID NO: 75842 - DNA, 2867 bp, Homo sapiens
gtataatgatcaactcagtatatgtagagtttttttccaattttgaatctaatcaaggaacacatgtgacaattgtcatgtcgtccatcttttttaatccagagcccagccctgtttccccttttctcatgctattgacttttttaaaaggccaggccttaaaaaaaagcaaaacaaacaaacaaaaaaaaccagtcctggtcttcatcacttttttgtactgtactaagcctgtcttatagaaggccccagttctagactttttgattctttctttaaagtggcttaacttgttcctccatcctctgtatagcctacacacctaaagtcttgacttgattcaggttacacattttgaagaatactcatagatgaggctatctccttcatactgcatggcagcagccaggcatggtggctcacacctgtagtctcagctactcaagaaactgagatgagaggatcatgcttgagcccaggagttggaggctgtagtgagctgtgatcatgccactgccctccaacctgggtgacagaccgagaggctctctcacaaaaaaaatttttaataaaaattttaaaaacatagtgcatggcatcaggatcacattgagcctggttttctcactattagtgatgccaagtttgattcccaaattaaggtaatggcaaccacaattctctttactattaagatatattttccctttgtcaattcgctagtcatcctggggtgataatttggtgccatgcaaatactgagttccctaaagttagctttctttcaaaaataacaggtcggctgggcatggtggctcacgcctgtaatcccagcaatttcgaagacggaggcgagtggatcactgaggtcaggagtttgagaccagcctgagtaacatggtgaaaccccgtctctactaaaaatacaaaaattagccaggcatggtgacacaagcctgttatcccagctatttcgaaggatgaggcaggagaatcgcttgaacccaggaggcagagggctgcagtgatcctagatcatgccactgcactccagcctaggcaacagagcaagactctgtctcaaaaaaaaaaaaaaacaaaaaaacaaacaaacaaaaaaaacaggttgtgcttttaattttaataaggaattatactcagtttttcaaagctttcatcagctgggtatattcaacctaaaattatgaaaatgaaccagtgtctacaataaacctttacgtaactattcattttcttctcatatatctattggttttagtaccattctggtttacagtagtcatgcatgcttggactcgtaaattgggcattggtttccagagttctgtgcaggagtccccttctttactcatgttattttatggctattacatgccaagttcagaattggagcggtgtagaatgtggtggaaatgaatgtcatgctgtcatccataataaaattagatcagagatgcacccagtgtacgaacaagccaggccttactgtgggaatgacggctagtagactcttagtatagagtaattgtgccacacactgaaattgaaatgtggatcccttgaagtgacctctttccttttttaagcaggtcaaaagacatgaatgaaaacacaccagtaaccaaacatggtaatatcaagcctaattaggaatcaaacatcattcctaaagtctgtgtccgttcgttttctttatttcatttgtttttgtttcttcctcatctgtgattcattttcctttcgtcatcttccacagtggcttctgcaagaatattggtcttgaaatgtacaacatggctcgcacccacttcaaacactgtttaaaatctcatttattattttgtactgtggtctcacttaaaagctggtgttactgagactgcagagtacatgcctttaattcccagggtgaaggggtgtggggtgtgagggaagagagagagcaggagcaagcaagaggaaaagctaacactgagacagtccacacagaaatgcgaggaaaataagaatattcagaagtcttataggcagatgaattctctctggacactagaaaactggaaactacccaaacccaagcttagtaaagtacagaaaagtgatgaagaccaggactggttttttttgttttttgttttttgtttttttcttccatcaagaggttagttgcctaaggaccacattcccaggattacaaggatttgccttaatagcccagagaacatttatctgcagtagaattattaagatgaagagatgagattctatgtgagtcacctcttacatgagactatatttcaaacttaaaattaacactgggagtaatcatagtacattgagatcagcaggttaaagctatattaagtcggaattatgtttttccaattaactttaattttcagatactaaaatccaggtgttctggggagccaagcccagtttttttcctcagggatttatctccaaaatccagttggatcccagctctttgagaggccaaggtgggaggattgcttgaggcgaggagttcaaggctagcctgggcagcataatgagatcctgtttctaccaaaaaattaaaaaattacctgggtatggtggtgcaygcctgtggtcccagctactcaggaggctgtggggggactatcacttgagactgagaggtcaaagctgaagtgggctatgattatgccactgctcttcatcctgggctacagaatgagatcctgttctcgaagaaggaaggaaagaaggaaggaaggaaggaagggaagaaagaaggaaggaaagaaggaaggaaggaaggaaggaagggaaaaaaaagaaaaccaactgggtttagcatt

SEQ ID NO: 75843 - DNA, 1197 bp, Homo sapiens
ccgggcatggtggctcacttttagtttccaattttagtataagtgctgctgaagtaagcacagtgtacatgtttttaatattctgtgacacaaaatgagaagcacatataaagtacttctgctgtgtaccaaagcatgacagttgtcaggaggataagaacttttgtagttatttgtgttaatctctgtaatcctagcactttgggaggccgaggcaggcgaatcacctgaggtcaggagttagagaccagcctggacaatatggtaaaactctgtctctactaaaaatacaaaattagctgggcatggtggcatgcatctgtaatcccatctacttgggagactgaggcaggagaatcacttgaaccagggaggcagaggttcctgtgagccaagatcgtgccactgcactccagcctgggcaacaagagggaaactctgtctcaaaaaccaaccaaccaaacaaaccaaaaaaacccatcaggatggggggtcaccttatcctacagtgacccaacttataataatgcaacttcttttcattttattttgctctggcttctgtagccaagtctataaactcaaggccaactggagttggaatgaggcatctgctggcctggccatctgccatgctcttgagcatctttgtgctacagacaaacaaaccagaacaaagggattcactgcagagagacagtgctccaaccctatgacatggctatcattgccccacgaaagccttaggatcctggcttacccatccgctcttgttgaagaaggattgcttttcagtttaagtcattacttctgttttgctctagtacttacagaaagagaaccgacaagcctgaaatgacccttctgtgaacaaggttttacactgggatttgaaataccggaaaagttgtgtccctagaaaagtaactctagccttaacatcagcaaaatgaggatttatttttatttttatttatttttgcattcagagaggaatgatgatgtcatccatgtccttacacacatcttaatttgtggattttttcttacttaactctcttaattggatgaaagtatgcagctgatgatttatggatygctagttgtgccaggcatctttttaaatatgcacagctgctctgcagtagtttaacttggcagatagtattaaaccattgagttgtgtcatttatttgt

SEQ ID NO: 75844 - DNA, 604 bp, Homo sapiens
gaaactgacccgtgctaaccaaactctcaaacaaaacccacatttatttatttgtaacaggtacacaataagcctttccaaggatctccaaacttgttccctcaatcttggacacattctgcccattatcaaggtacctgggagaccaaattcataatcaggttgttgcttgtgaacaaggattcagagcaaaagcattgcataaccttaaggggtgcagcatccagatattggagaagacttctgaatgaaatgtactttctagataatctgaacatgagtagctaccaagaaacatgtctctctcctctggaaagttagataatcacaacaaattctcactgcctggcctcctcttacctcaatatgtgcagattttctagctgccacacrtccactcacatgattcccctttttcttcagatggatcacagttcctgctgcctgtaatctattcagtcattttcctgaacctttacctggctcatcttaactatccccaatatttgttgctgttcattaccagctctcagagagggttactgatggttgctgttgtcaatgactcgttggttcttattagctcctctgatggaatggtttt

SEQ ID NO: 75845 - DNA, 760 bp, Homo sapiens
aaagaacttccctgcaaatactttacatggtaaaaagggcattaaagagataaatatgggtggcagatttttagctcaaagaataccttgggctaatataaaagcataattatgctgctgatgtcacttctggtcataatgacttgaagtatagccaagagaatgttattaaaatgattggaaaagtttttatttacttatttaagcttattgacttaaagaccccgggcaaatgtacaaaatactcatttgaattgcagattgaatccatcagctaaagttacatattttttaagtcaaatttgaactcccaagccattaattcatagtcttctgcagagtatatgaattagcctatcacaaagataataatataacattattgaacaacataaaataacttccttttattttcccataatgtctgagttccaggtttcctggctctctcataatgcctgatggtgccagagggcaaatacgtgtgaattgcagttgcaatatgaaaagtgactctggaaaaggcgtgttgggactttcaagctgattcctgtcgatagcctctatatcaaactgcctcagagtttagatcaagcaatgcttttcgtagatgccggcattgtcaggtcaacacaagatctaaacactgagatgcatctactctgtctcttaaatcagccccaataacaataatcctccaaggcagggtggtggtgaggkgggaactgatctgattttgcttcatcataagtgtgtagga

SEQ ID NO: 75846 - DNA, 857 bp, Homo sapiens
caactggctttcttctctattagcccaaaagtttatatatatattcaatttactccccagattggtatcttttcattggaaaaatgaatgatcatcttttttttttgagagcagggtatttatcacttttctttaactgttatatttccactgtgtaatggactgcctgaaagataataattgcttcaaaaatatttaattaatatacaaaataattagacaccattagtatataaaaaagcaggggtactagacatatccccaaatccacaaacatcytaagttaaaacatccttgttaacaaatccactttgagattcctgaaactaataaaatacacagactattttgaaccaatattagaggtcatctaatccaatctctatttttcagatgaggaaatcacagttagaacaattaaatgcccttctgcaagacagctgggattagaaccttgagctttccattagatagtattattgagttgctttctttgtatggttcatcgcagcctctgatttacacttcatgttgaaagcaagcagtgtctcttgcctgagaacagtttctgttaagcaaggtaaacacacattaattgaccctgaatagctgatggactgagagagaaatgtagagtttgtgatacaaaatccaagcagatgccctttctgagttttcattatttgctaaagaagttggccacctaatcccatagaaatgtatgtaccgttttggttttgataagctctcaatcattatgggtcttggttcagctgacagccctagttactgtgaggcagaaaaacactccagaggtgcagcaacactgtttagacattcacacagcaaaccatgca

SEQ ID NO: 75847 - DNA, 743 bp, Homo sapiens
tcccttgagctcaggagttcgagaccagcctgggcaacatggcgaaactccatcgctaccaaaaatagaaaaattagccaggcgtgatggtgcatgcctgtggtcctagctacttgggagactgaggtgagaggatcacttgagtctgggaggtagaggttgcagtgagcctagatcacaccactgcactccagcctgggtgacagagtgagacaccatctcaaaaaaaaaagacttcacacattgagaagtccctccaagttggacagctgtacaactaaaaaatcctgaaaattttctaccattaggaagtaggtgaatgggaggagtagatgtgtccaatggacaatgagaattggtttgttctgataatggaagattaaaagtcaaagaaaaaaaatggcttatagtcttcagttttcttatcaggattattaaattcactaatcttaattcttagtagacatgtgtctctttgaaaatgraagactttttcagaagtaatcaagaaatgtcagagtataattggaggctgtaaatcacacagttcaagctgttaagacattccataagcatagataacgaagtctaagatttgaccaataattgcagtcagttgtttatataaagctaaaccattagaagatttcagtgtgacataatctgttttttaagacaaaacacataacattaagtttatcatcttaaccatttttaagttcagtagtgttaagtatattcac

SEQ ID NO: 75848 - DNA, 771 bp, Homo sapiens
ccaaagtgctgggattacaggcgtgagccacagcgccaggcctacacttttaatagaagattttaatacagcactcttaatacaaggtaagccaagtgcacaaaaggtataaaagaatataaaaggtctagcagtctaattaacaagctaactctttagggtatatgtcttaaacaacacatcctgataatggagaatacaccttctaaagagcacatggaacatttataaaaattagacaataattctgttccatttgttatttgtctattcctgaaacaaaaccacactgtgttgtcaataaaccttgacacctggtaaggcaaatctttccatcttcttgtttctcaaaattgtctagattcacagatccaaagtagtcaatgaagcctgagcacaagaaatgaagaaagtaacaccaaggcaaactaatcaaatcgtataaaaccagtgayaaagagaacagccttaaaaatggctggagaaaaaagacagcacacacacagagcaatgatacgaataacagcagatttctagtttgaaacaatgtaagccaggtgacaacaaagcaacatcctaaaagtatcaaaagcaaaaatacctgtcgacctggaattacacacctagaaaaaaatacctttcaaaaccaaggcaaaaaaagactttttcagacattcagaagctgaaaaagtcatcaccagcagagctgcactatcagaaatgttaaaggaagtccctcgggaagaaggaaacgacagtagatggaaatct

SEQ ID NO: 75849 - DNA, 820 bp, Homo sapiens
gcatgaattgaaatgatcatatggtttttatccttcattctgttgatatcatgtatcacactgatatatttgcatatattgaaccatccttgcatcccagggataaattccacttcgtcatgattgatgatctttctaaagcattgttgaatcagatatgctagtattctgttgaagatttttgcatcaatattcatcagagatattttttttaattttcttgtattcatttgtctttgtctggttttggtatcaggataatattgaccttgtagaaggagattggaagtattttttcctcctctatttttcagaatagtttgagtaggttttttgttagttcttctttaaatgtttggtagaattcagcagtgaagtcctcacatcctggccttttctttactgggagactttttattacagcttctatcttgttacttgttattggtcttttcaggtcttagatttcttattcgtttgatattggtacattttatgtatctaggaatttgcccatttattctagatttttcaatttattggcatatagttgctcatagtagcttttggaaagtgatctatctgtaagtgttcacatttcactttatcatgaaacatgttatataagcaaaggaatatttgcaatcaatcacatgaaggaaattagaatgaatgctgcatgcaacattcyataaaatgtttttatccttcctatagggaataggttaacaaaattgacttgaatagatacatacatggaaaacatcgtaatcaatattcaattgtattggaagaaagataggaggaagaaaatcctgca

SEQ ID NO: 75850 - DNA, 1057 bp, Homo sapiens
atgtgtctgtctcgtcagtcagctctttaaggacgagaagcatgcctgattcatctttatgtccctgtcaacataaccatccccgccttcagacctatgtacttaataaataagttatcaatcaattaggccaatgtggttgtctgaataatggccccaaagatgttcatgtcctaacccccagaacctgtgaatatgttaccttctgtggcaaaaagggctttgtagatgtgattaagttaaggatcttgagacgaaggaattatcctggattgtccggttggtgaccaaggtaatcacaagagtccttaaaagatggaagagggaggcaggagagcagagaaagagatgtaaggtcccatgcagagattggagcaatgtcactgttgggagggggacacgagccaaggaatgtgggcggcctcagaagctgaaaaaggcaaggagtggattctccctctaargtctctacaagaaacacagccctgttgtcttgatttcagtcccaaaaaaccattttcagattctaatcctcaggactagaaaataataaatttgggtggttttaagccactaagattgtgatagtttattatagcagcaataggaagctaatagcaccaatattaatgaaaaatcagaaacagagtgtggtgggctgagtcctgcgtggatagggcaactgacatggaagtggcaaatcagggtgaatgttcccagcgtatcaagagatagatatcatctcccaatgttgcttcatccctctcaccctggggttcttacacaatagcagacattggcaatatgtgctacaaaacattatgctgtgctaattacctgttcggccttcagtctgggcttccttgctaaagaggcctccactgacagttaggatctgtatcttgtatttcttgcctggtgttagatcttcaaatttgtgttgcttagtggtggctggctctgatgtgttgcgcagaaggattccattttcagttagaagcaggatatcatatctttctgccacaccagcagctttttgccaacttactattaagga

SEQ ID NO: 75851 - DNA, 1036 bp, Homo sapiens
aaattggaagcaactattaacattgtggttttttcctgacataaatgttacatgatcagcattggtagaacataattataaaatgagttatgatctcaatcataagataaaacaagaagtctagaatctaaatgccatgatgcaggaagatagggaagaaaaatgggacatttagccttcttgctccctcactatgtttgcttttatctaccaataaatattctgtaattataggccatggcttggctgaatgatgttagcrccaagtgagacttactgggaatgtaatgtactaatgaataagcagaaaaaattcaaggttcagataaattactagagactttcaagtccaaccaactgtcagattttgcaatcgttccacttacttgttctcccattcccttgttcattggcttcatattgtccactttttgtagtaacagtgacactgtacaaccgtccagggactagctgaacaaatacacattcgttttctgacttgggaatgcttttagtttgaatgaagttgtttttgtttttaatggtgacttcatagtgatcaaagtctccagtggcatgcacccaggatacccttaaatagtcactcctggctgagttgctaacactgactccctggactttgtcaggcactgaaaaggaaacagagagtaactaaatatttatgaattctgagtgagtaattgatcacagatgacaagctgggacaataaaaagagagagtagattattattgtgtgcatttaaaagaaaaatcttagaccttaggttacaaatttctggaggggaaagattgttacactatgtggagtgattaaacggatcttttaacagaagctgatgaactcattctaagcctgctgtttgcctgcacaaagtgtcatgtataagatggaacattaaacatgatggctgatgattaatatgagtgatggtaaacgatatagataattccaacataccttgctgactcaaaagttactaagaagaatataagcaatcccccaacccgcccccc

SEQ ID NO: 75852 - DNA, 1036 bp, Homo sapiens
aaattggaagcaactattaacattgtggttttttcctgacataaatgttacatgatcagcattggtagaacataattataaaatgagttatgatctcaatcataagataaaacaagaagtctagaatctaaatgccatgatgcaggaagatagggaagaaaaatgggacatttagccttcttgctccctcactatgtttgcttttatctaccaataaatattctgtaattataggccatggcttggctgaatgatgttagcaccaagtgagacttactgggaatgtaatgtactaatgaataagcagaaaaaattcaaggttcagataaattactagagactttcaagtccaaccaactgtcagattttgcaatcgttccacttacttgttctcccattcccttgttcattggcttcatattgtccactttttgtagtaacagtgacactgtacaaccgtccagggactagctgaacaaatacacattcgttttctgacttgggaatgcttttagtttgaatgaagttgtttttgtttttaatggtracttcatagtgatcaaagtctccagtggcatgcacccaggatacccttaaatagtcactcctggctgagttgctaacactgactccctggactttgtcaggcactgaaaaggaaacagagagtaactaaatatttatgaattctgagtgagtaattgatcacagatgacaagctgggacaataaaaagagagagtagattattattgtgtgcatttaaaagaaaaatcttagaccttaggttacaaatttctggaggggaaagattgttacactatgtggagtgattaaacggatcttttaacagaagctgatgaactcattctaagcctgctgtttgcctgcacaaagtgtcatgtataagatggaacattaaacatgatggctgatgattaatatgagtgatggtaaacgatatagataattccaacataccttgctgactcaaaagttactaagaagaatataagcaatcccccaacccgcccccc

SEQ ID NO: 75853 - DNA, 748 bp, Homo sapiens
ccccaaaagccttatagccatctaacttcaaaaagaccaaagtcaaactcattctctttctttcaaaacacaaaacaacaacaaaaaccttcctcctgcttttgcaccttccagtttcatttaatagtattgccatccatgtgtttgcccaagccagggagctgacttcttatattttttaagggatgcagtctcaytatgttgcccagactggactcaaactctgtgctcaagcaatcttctacagatgtgcaccaccacacctggcatgcttacatgcatggatatgtgcatttatttattatttctattttttgtttgtttatttacgtggggagataagatctcactatgttgaccaggctagactcaaactcctgggctcaatggagtggatttcttttcctccagttcccacatccaagcagtcacgaagtcctttccttcccttggagctagcccctcatcccactgccactgcccttgcacagccctttatcaactctcattagccctgctaatgagtagcctcctaatgggtctcctgcctccagctctgccctaatgatccttcgccaccactgccaccatcaaagttcccttgctgactctgccagctccctgcaaaaaaatcgtgaaaagctcaccactgcttgtaaaatgaagttcaaacctcatcctgggtacaagcttctttataacctggcccctacttactcctccagcttcatgtcatcgtactagccac

SEQ ID NO: 75854 - DNA, 588 bp, Homo sapiens
ttcctcccctcaaagtgagcctaatggctttctctcctgtatgaaaccttatacacaattgtatctgatgtttagcatcttataggtatttgttcactaaatactaagccatgcactcagggatcacaaagagactgtaatacyataaataatatctaatactccaaatattgatgaaattgaatggaactgaatgtgtgaacactaagccaagccttcaccagttaacaaaaaattatcttttgtgatctgagattcatatattttgtctacttttcattaagaataaagtgagaagcacattaacaatctcaccgttttagtagtaatcattttcaaagggacgttctattgggaaaggaagaatttgtatttaaggcaaggcaaattaatagatattaacttgtttcaaagcccatggtgaatcattgttaaagaatttattaataggccatagcacagatgcactagagttcattcacagcttacctctaaagtcccaaagtaatgtaatatcccagtagaactgaaaagatgaattatgctttgggtgggaggaaacagggaggtgtcagcctataatttggt

SEQ ID NO: 75855 - DNA, 1454 bp, Homo sapiens
ttatattaatcggagctttcaaataacactctaacctctgagcaataaagagtataaatggaaggcaataagccactctaaaagcagttttcactccatagattttaaaactaagtgtcttaagctgatacagcagcatctttagagggtactctaaagtcagagtggacaggaccttgggaatgtattattccaagttcacccctagattctccgcatctcaggaatgatcctcagttcattaggtacaatggttccatataagttaaatgttgatgttaattgtggtactggaggcatggcttacataaaccttttagtaatctcactgattatggcagttagtccttccagcgttattctcccaactcgattatgttatacatgacaaaattgaaggttggtatggggttaagcaactgatccaagatcatccagctacgactggataatagcttgctaaccaaccaatcaactgataaaattgttagtaactcccgacatttgcctagagctttgaaaacattcaaaaagtagaaaatataaatagtagtaaagcttgcatattgtttcttttaaaaaactgtaacataaaatggtatgtattttaattattggataatatgcttaacagttctacagggtgcccataaagtctggaaacatttatcattttatcatggattataatgcaatgtcaataaaccatttatcatgcatttatctatgtttcagaactcgggaggctacattctgtaacagatctgtaaagcaggtgaatgctaatatatgctaaaacaagaaattaaaaagcaaacttcacctaaaaagacctttagaacaaatggatcccttggtcactaaagtattgaattttacagatagggtttaacttttatctctattctgtactttgagccaaaacaagagagaataaatgtttttctgacttcayccatataatttcatcctgaattaaatattaatcagagctctattcatgagttaaagatactttcattgttcccagaaacatatgattctaaatgatcatatgattctacaatggaatttgctttatctccagattggcttaacccaaaatagatgttcagcataattttttaaaattaaatacaatatttgaataacctgacattagtgctgaaatgaatcattcggggaactattattttgtaacttaaaaataaattttaagtaagcattgtgcaagtctcgtaaaactggcatctgcatcctataatttaccatattttatttatgacttatggcctacttatggtggtataaaaagcccaccattctgattatttatcattattatttatattccactggcttgggaagtagcaatataactccgtagagaccgattttctttagtacctagtatattcccatgagtgtcactgctttagaatatgtggtaatgg

SEQ ID NO: 75856 - DNA, 572 bp, Homo sapiens
ggtctagagtgcgacacacccaagttcaacccctgcttctccaccgaccatctcttcccctatcattcacaagtcacagaggcagttcttgaaaatgcyctgcctggaaagcaggaatgccataaactgagaattcaagtaaaggactctctcctctaaaacagatgtgtacccattcattcattcattcattcacttgacaaatatttattacatacacactagttgtttgaccttgggcaaggtacttagttgcggtctgccttagtttcctgagctataaagtgggtgtctacattacagagttgttgcaaggattaaaggagttaatgcacataaggtgttggtgatgggtcccaacacattggaaaggcacagtgtagagtatcattattctactgctactactgtatgctacgttaggaaaaatgggctctggggatagaatttgggagctctatgtaatattttcctctcgatcactaaagcatctcatttgcatagaactaatctccgctccagtgctcaatcctggtagtgaagccatttgggaacttgttcaccaggactcc

SEQ ID NO: 75857 - DNA, 572 bp, Homo sapiens
ggtctagagtgcgacacacccaagttcaacccctgcttctccaccgaccatctcttcccctatcattcacaagtcacagaggcagttcttgaaaatgccctgcctggaaagcaggaatgccataaactgagaattcaartaaaggactctctcctctaaaacagatgtgtacccattcattcattcattcattcacttgacaaatatttattacatacacactagttgtttgaccttgggcaaggtacttagttgcggtctgccttagtttcctgagctataaagtgggtgtctacattacagagttgttgcaaggattaaaggagttaatgcacataaggtgttggtgatgggtcccaacacattggaaaggcacagtgtagagtatcattattctactgctactactgtatgctacgttaggaaaaatgggctctggggatagaatttgggagctctatgtaatattttcctctcgatcactaaagcatctcatttgcatagaactaatctccgctccagtgctcaatcctggtagtgaagccatttgggaacttgttcaccaggactcc

SEQ ID NO: 75858 - DNA, 1002 bp, Homo sapiens
agctaatacaatttccttcacagactaagaaatgagcaaagtcttagcataattcttgtaatgtctaaacacaaaatagaagttagcaatgattcatattactattattaatgttaaaattagtatgacatgataaaagcaaacattatctcaagataaacctggcattcttatttcaaagacaattttcccatgagacaggtaaaaaaacatcttgtcacatacaaataaaagtcaaggtagtggtgtgagactcaggttgcctcctagtgattgccttagttgatgaacctggtttaccgtgctgtgtaccagcagtattctgtacaattatgtgaaaagacccaggatgttgactatgcaaaatcttaactttataatgatgagctatgtttggcagtactttttcaattgtgcaggtacacattctctttacctagaataatgttcatgagccttctctacactcttctgatcttctggggggaatcaactgtttatatcaaggagacatcaaataacagatttcaatttcagaagatgtgtcaaaatggctaagattactttgctcttcagagacttgaaaaataagacmtgagagttactttgatgagcataaacaactcaacagtatatgttcaaataaatataacatcagtactctgtggatcaccattgaagacgagctccatctgattgcacttctcatacggccatctggggggctgcaggagtagagcccatgacagcatataatggaccaaaagagaaaaataaaaagaaagaaataaaacaaaaagggaaaaagcctgtgggctaatatgatgaaacattcattactttgtgggaaagcagccaaagtgatttatacttcaacactccatgctgaaatcaaagagaatgggatagaaatgtcgatgaaactctgcatggggagctctttgaaatagggctgtgcaaaagaatattttgattgagacacttaatggcaattcaaacaga

SEQ ID NO: 75859 - DNA, 904 bp, Homo sapiens
gtctagtgtatagatagatacatgtgtctagtgtatagagagatatactatatatataatacatacttttttataatatgtatctgccctacttagatgaaacttttatataatcctaacgttaattcaatcttatcttcttgtttttattccttaaacttttttctgcatactatttggacagtcaccactctttatgctttttttttttttgcattaaactatagccagcaagtctgtcttatggcaccttaaatcccatagtggtaggcacagcatctctagaatgtagattccactggtagtaggatccttgtccagttcatttctgacagcatctataagagtgcctgacatacaaaaagcattcaatattcaattaacatgatttgaacaaactcataaccattattgtctccaaatactctccccaccctgccaccactccagtgcctggacttactcattgcagagagaaaaagcatcaatctcttgaaaatcagtagagaaagtttcagtgagagtgattctggctaagcccctcagatttttcaggattcttatctgtaagtcagggttacaaccaacctcacaatgcttattgaatcatttgtcattatgtaatraatctgaaaatattctgtaaactgaatcatatcaatactttcatattattttataatcataccttctgtggctaattttagatatttcctgccaaagaatatcattggcattgttaatacccaacacaaacccttaaaatatttttattctaataaagaaaaaggcataagcaaagcatatgaaaatacaagcagtaaaagagttgcatgatgaaaagtgaccccaaagggaagaggccacaggcagggtctgctgaagagcgggacccagcccctgc

SEQ ID NO: 75860 - DNA, 572 bp, Homo sapiens
tgcagccctttgccccatctcatttccatgcctaatgcaattttagagcatgatgtgtagtaagcatggctaaaaattctggaagatttattacattcccttgttctatagatcaaggacaatttttaataaatccttgcttttgctgaaygatttaatatgccattgtctaggcaacagaattgtcttcaattagattttaaaactaatataggaagaaactttcccctttccttgccaacattattagataaggccataagtcctgatcaagaacaaaatttgctggtgcctcatggggaccttgaaaccggattctcttttgcagcagtatggctccctaccttttattccagggcaggcaccctgttgaggtggttgaggctaccagtgggaagtgcccacagccacatagggccaggtgctgctcatatagagagatccgcccccgccagaggaaactgactttggagaatgagtcactcgttggggtctggccctcagccatgtaagctcagaaattcaatcttttaagttccagaagttattggatgcttgaataaacaaccact

SEQ ID NO: 75861 - DNA, 572 bp, Homo sapiens
tgcagccctttgccccatctcatttccatgcctaatgcaattttagagcatgatgtgtagtaagcatggctaaaaattctggaagatttattacattcccttgttctatagatcaaggacaatttttaataaatccttgcttttgctgaatgrtttaatatgccattgtctaggcaacagaattgtcttcaattagattttaaaactaatataggaagaaactttcccctttccttgccaacattattagataaggccataagtcctgatcaagaacaaaatttgctggtgcctcatggggaccttgaaaccggattctcttttgcagcagtatggctccctaccttttattccagggcaggcaccctgttgaggtggttgaggctaccagtgggaagtgcccacagccacatagggccaggtgctgctcatatagagagatccgcccccgccagaggaaactgactttggagaatgagtcactcgttggggtctggccctcagccatgtaagctcagaaattcaatcttttaagttccagaagttattggatgcttgaataaacaaccact

SEQ ID NO: 75862 - DNA, 572 bp, Homo sapiens
tgcagccctttgccccatctcatttccatgcctaatgcaattttagagcatgatgtgtagtaagcatggctaaaaattctggaagatttattacattcccttgttctatagatcaaggacaatttttaataaatccttgcttttgctgaatgatttaatatgccattgtctaggcaacagaattgtcttcaattagattttaaaactaatataggaagaaactttcccctttccttgccaacattattagataaggccataagtcctgatcaagaacaaaatttgctggtgcctcatggggaccttgaaacyggattctcttttgcagcagtatggctccctaccttttattccagggcaggcaccctgttgaggtggttgaggctaccagtgggaagtgcccacagccacatagggccaggtgctgctcatatagagagatccgcccccgccagaggaaactgactttggagaatgagtcactcgttggggtctggccctcagccatgtaagctcagaaattcaatcttttaagttccagaagttattggatgcttgaataaacaaccact

SEQ ID NO: 75863 - DNA, 1261 bp, Homo sapiens
acacaatttagaggagatgcttaacctacttaagagatagactacttccaagtgtttttgagttgtgcatttgtatccagttgataacattcatgacaaatcctactcatgtattcatcaaaactggctgcaaagtaaatatatgtgacaacagtaattctaattactctgagttttaaaaatactcagtgatctcttttacaatttagatggtttttcctgattaagactggtctccaaaatagtcagatcatttaaaatatatagcttgggatgggggagctgttggtataagagtacaaagtttcagtttgaaggagtaagttctgaagatcggttgcataacatggtgactatagttattaatagtaataatgtactgtatacttgaaaattgctaagacagagtttgaatgttctcaccataaaaaaagtatgtgaggtggactgggtatggtggcctgtaattccaacactttgggagcccgaggtgggtggatcacgaggtcaagagatcgagaccatcctggccaacatagtgaaaccccgtctctactaaaaatacaaaaattagttgggcatggtggtgcgcgcctatagtcccagctactcgggaggctgaggcaggagaatcgcttgaacctgggaggtggaggttgcagtgtgtcaagattgtgccactgcactccatcctggtgacagagcgagactccatctcaaaaaaaaaaaaaaaaaaagtatgtgasgtgatggatatgtaaattaacttgatgtaatcattccacaatgtatatacatatcaaaacatcatgttttaccccataagtatgtacaatttttgtcaattaaaataatttttttctcaaaataaataaaatatagttcatatttagccagagtcaataaaacagcaggtaagtctcttccagaaaaaggagtgttgtctgttttcagcaactactgggtatgcctaaattgattagaggcttagttttatcccctttcaccactgattttagaggtgtgcctctgggtttattaaaaggtgtttcagacaccgggaagaataaagtcacttctcaaaagtgtaccttttcccctaggttttctgtatttactcggaggcagaatctgattatcttgaattaccagtggagtgcactgccctgttagctaatccacatggaactgcacaaacttctacattttcaattacaactgatttcaaactgtatttgaaaatgtgaaatttcatgaaaca

SEQ ID NO: 75864 - DNA, 1045 bp, Homo sapiens
tgtgtgtgtgtgtgggggtgtgttatcacaacattacattcaattatacaagtgaattttttttaactttggtcccttgcttatcaatttcagtgccttccaccagcattatttgcttcactcccagttactgtttaaaaatgctgagaagaatttggaaatatgccgctgtggttgataacagatggggatatttttgaaaattatttcaccatgaggatataaagccactttctaattatcaaacaagttggtaagcatgaaaggcaatggatgagtctcttataaaaatagacccaaatattagttttctcttcactttaatgtggcacaatggacatttctgaagggatatgccaccaaaatcaatcttatatgaattttatttttgtgatggtctaagtctcttgcaggaatagatccttcagcctcactgaagggaatattctagagtcctggtgacacaatctggatgcaggccctgagttgaggacagatctgtcttcagtgtccatgtcagcatgtgtagtatatgcaagacctaactcagttataatatttagatctaatacttcccctgatttaaaccaaaatggcattgccattttggcttgcattgtggttagtccattttggcctaatgcctgggcaagatcacacctgactgcaaatcagtaaagccacctccaaatgactcatgggatggctttagtgtaagttaagagcatatgttctggagtcagtcctgttctgcctccctctttgttactgtgccactttgagcaactcaytcaatgtctctgagctgggtttctacttctgtacactataatgatgatgaaacccatgggattgcttgtaaggagaaaaagtgcatgggaagtgcctggcacatagtaggcactcaataagtatgagttagttgggttgctggcattgtcggtgctagtcttatcttcactagaccatgaattccttgagacaatgatgtgcagtgtttcaccctgagttaccagtgttttagcccagaaccttacatgtagta

SEQ ID NO: 75865 - DNA, 687 bp, Homo sapiens
acaaaaattagccgggcatggtggcgtgcacctgtaatcctagcactttgggaggccaagagagatgggttgcctgaagtcaggagttcgagaccagcttggccaacatggtgaaaccctgtctctactaaaaatacaaaaattagccaagtgtggtggcatgcacctgtaatcccagctactcgggaggctgagggaggaggatcgyttaagcctgggaggtgtaggctgtagtgagctgaggttgaaccactgtactccagcctgggtgatgggagagaaaccctgtctcaaaataaaataaaataaaataaaataacttaacataacataaaataaaataagataagataaaataaaatgaaatgtgcccctctgaccttcacccctcccatctggtgaacttgtactcatccctcaagacctagtcagatttcaccccactctgccagctctaatcatactgcaccacaattcatgcttgaaggcttgttcctcctcaccagcctgtgagctctgagggcacgggctctgcctgatgttctggggctcccacatctgcaggccgagtgcctgacctgggacccatgctcagcttgtgcttgttatatgcacgtgacaatgaccacgcatccgggaggtgaaaggttgcagccccggcatgggggagcagactgtcttcttctt

SEQ ID NO: 75866 - DNA, 859 bp, Homo sapiens
ttgcccacctgaaacagctgcccacacgtgacgccattaaggaaggccaccctggtcttgcggtgtttcaactgcaaggttacaaagtaaagataatgggaaataatgctgcttcatcatttttaacctttctgaataatgcctctgtgcataacccagagatttttattttaaaatcaattgtgcttattgtgttctttggaaacataaacgagaagctgggaagaaagaagtgggatccagggtttattaagacaaagagtttggagtggggtgtgggaatgtggtcctgcctagcctagactgctgttgtcctggaggacagggttagcagctgaaaaccccaagtggttgctatgggagaagagagcttctcacgctgcaaaaatgtaccagacatatgtgggcaaagcatctgtcttctattaccctcaggcgcccagagaacctccattcttatcccaaggaaaatggggctctggccctaaggaagagcttttaagagaaaaatatcagacatcaaattcagcttcagccactcrttagctgtgtggccttgggagggttacatgatgcctcttctgcagaatgcaggcgacaacacctatttcttggaggtcagagggcccctgaaacagcatacaccctggaccagagtaaccaatggcttgtttagaagcccaaggctcagccccaaagtagcatgtggaagtgtgggttgcaggagtggaggggctggtaacttgagagaacaaagtcaagctcagtgggtataagaggggctgtcatctcagcccagtcgattctgcagctgccttgggcattctggtgacagcacttggagcagtggaaaccccat

SEQ ID NO: 75867 - DNA, 518 bp, Homo sapiens
gcatggctcggtcctctgaaccattttgctgtgctttggggcagtggtagtgccttttgctgggtagaatcaaaccatgttccctgctctgtgtgcacaaaggccaggcacaggcccctctctaagggtcttttgattttgagtctcctgacccaccgtgtcttctggtcacacaccactgaggcaacggggtgcagtttagaaaacatgggtcttagagtcccataggcccyagtcagaatccctgctccatctccgagtggctctcccaccttgattcaatcgcatggcctttttgggccttagtttccttagctctagaagtctaaagggaacactgggtccactgtgggctaaggccaggaagggctatctggcctaagcctgaagttctcaggaaacctcagatttggacttttgacctgcttcaggatgtggtttagtcattgtggggttgttgttggtggtggatgtgggtgtttaagcgatgcctggtgggtaagccctcttgggggcag

SEQ ID NO: 75868 - DNA, 516 bp, Homo sapiens
taaaatgtatagaaaccatcaactcccaatatcttaatstcagtaaaaaaaaaaaaattctcttgctgaagccttatcagtggtacagattttatttagccttaggggatgtataagaagtgatgcggcatgccccacttggggaaggaaaacaagtgtggcctttccatctctatttccttaaatgtgccccagttatcgtatcaggatccctgaatatttttctaatggcttaattctcccagaatgcactatttgcatttttccaaactgtattttcttcttcctattttcttaccatgttgtaaaccctctaggttcactctgttaaccaaatcagcatccttgtcaaatttaattaatacactgtgtgcttccccttccacatcattacgaaagatgctgaataagacagggtccatgtcaacatattcccaaaagcctgtcatttctagtacgttccctctgcatgcagccagccagttctccactgctgcaaatgttcacttctaagac

SEQ ID NO: 75869 - DNA, 1155 bp, Homo sapiens
gtaatcccagctgcttgtgtggctgagtcaggagaatcgcttgagcctgggaggcagaggttgcggtgagccgagatcgtgccactgcactacagcctggacgacagagtgagactcccatctcaaacaaacaaacaaacaacaccttaatgtcactgattaacctgctgctgggggttyttctgcttacagcttctgtctcttacttaaccttgatctttataagtcaaacactcgaggtaagcttgccttactatgactcttgtgaatgccatgttaccttattgattccaacaggaaatttgaaaaaagtaaacactttagggcagaaagataataaaaggaaaaaaagatggttagaactaccacaaatgaatttattttaagtgtttcttttttttttttttcagtaagtctttagaggacataccaggacaactaatattaatttcccttacttagttttattttgtaattgagctgaccattcattggattgcatttgactgttgatttggtgtgttatgactccgtggccataactagaaagcttatcatcctcggttagtgtataaagagctggcagcaggagcaccactggctgtctcatttctcaggtatgatgtatctttgccagtcttatgactttcacagctttgggtgaataatacatctgtgttcatatatcctgtgatcacatttcctaaccctaaggaaatattggtagaggacctccatctcctttatacttgtagctagagtttactaaagaaagagcatgaaccaaaataataatttatgaataatatagtgagtaatgtagcagagataagagaaaagcaatgtgtatagagggggctgattcatattcagatctgtgtgtgttcttttgtggatctacaagggcaatctgggacaaggatatcatttcaactagttttttaccccaaggggaaagggtacgtgtttccttagctctggggttgagttaaacaatgttgtatgttcattttagccacttcagtgcctacaaattatgattgagtgtctgtcttcaagctggcctgggtccatattaataatgggaaaattcttctcaaccttctccaaaccacaggtctcaaaattaggctgcaggtctttttaggaacaaat

SEQ ID NO: 75870 - DNA, 915 bp, Homo sapiens
aaacatccctaccagccaaatggatggagttggagcgcaaatattttagctcattatatctaagtttgacttccgtcttgttactctgaataccagaacaaagagatattcacattagttgtcatgaaatcatcaaattgaaaaacctactgagacctactgtgtgctcagtactgggttggcatcacgaaaaacacaaaattataaacttcaattattgttcgtaagtaacttagaaactaattaatagcataagatatttatgagtagtgatccagaacaaaaagtaaagctgataaaaataatttatttagcacaccatcaacaatgtcctataggctatgtgtgcagattgtcaaatatgagggacagacacagagctgatgtgaaaggacagagtgatccctgtgcgctggagtggtcctggaagctctcttgatggaagaatggcttgatcttaatgcaaaataaccgagggagcattccagagggggatacaaatctacaacaaaatgcagttcttcctcctgtctcaggggaaagttaaccattttctttgagaaacagacatgtgaatagaaataactaaaataagctctttggaatcagtaaagagagcctatacaacaactacaaagaattttccagccatagactcatatcatgaaaagtacwaaaatgaatattatccagtctaggcattctgccctactggaagcccctttatgggcagagatgagaattcaccatagtctttgattttctgatttgtaaagtctacaaagaatatgtagaatgaatgactaacattttaacaaaccataccttttgtactgagatatattttttttactaaaccttgtcctggataaacaacttttggcccataagccagggtagacaaagatcaaagtt

SEQ ID NO: 75871 - DNA, 565 bp, Homo sapiens
tcacccctgaccccgaacccagcagcaggttagcagaactggggatggtctctctgcatcctcaccccagacccagcacccagcagcaggttagcagtgctgagcacgcccccactgcagcctctgcatcctcaccccggacccagcaakacgccttcctggagtgttccttgaatcccagagagaggagcaggcgccctgtttcctttccgctgctccctaccttgcgaacgtccctgattttccggcgcagctcaagctgcttgtggtggaagtcggtgcgggtgagcgccttcctgtccatcttgcgctgcccctcggcctgggtggtgacggtctctctgcgggcaaccgccaactccatggcacggatcatcttctcctgctgcttcagcagctgcccgagcctgacctgggagacaggacagaggggctggggctggggcaggcctgagctgcagctgcagagagagtggccggggcgctggcctcgctcatcctccggtgacacgcatggggatcggcggggaaacagtgaggcctgtgccgccaggaggaacaaggg

SEQ ID NO: 75872 - DNA, 1243 bp, Homo sapiens
acgtgggcacctcccaggggaggggcactcagtggggcacgtcgctggatttgcacgcagccttaaaagcaaataacaaacgcgcatgctccctgtattttgtaaatgtgaaccactgcctgcccagctgcccagttcgcagtcacagcgggagggttgagaaatgtcacgaaatggctccaagctcacggacttcagagctctccttgagagaggagcatggaaggttatcatccccgccaagccagggcactcaggtggaaacactggcacgggaaaagccagggtcctgccaggcaggctcctggtgctgtccccacatcacctccagttgggcttagaaaaccattccaccggggctccccaacccttctgaggcccaaggggctgccaaagcaccagggtgcctggaatgatggaggcgggcatccttcctggaccactctccacccacatgtccacctgccgagacatcccgggtcctgcccggtcttgggtcggggatccatgctggtcaggcctgcagcagagcccccatgggaaatgctgcccagacacatcawgtgcccttctcggaggtcctgctgcctctcgccctgcccttcttgggttgcccaaacccgtctgttggtgagtagcaagtcccaaaagaccctatggagctgtcagctgagtatcggtgtcccaaggcaagagctgccgaaataccatgctgtgagatggggaggatcacccatggagagggcagagagaggggctcacatgcccatgtcctggggtagtcagggcacaccatggggacagcaggaggagctggagaagccctgtgaggagtggccagcggatgaaccagctgtggcctcttgtgccctccacccatcttaacatcaagaagagctgttgttttctgcccctacccctgagcttggctggggcagggcaggggtctaagggcctccctctcctggagactcacagtgtctgagcatcaaccaggtcccggtgctccacagatttgcaagtgtctgggggagggagcctggccctcccacacgccctgcccacacctgctggctgtccccacaggcaggtcctctcagttccgttggaggaccaggctttgggagcttagcagccaaaaagagaccccctgtcctctcctctcctctgtcctggcagggacgagattcaggcaggagcgccaggaacgacaagagggaggggatgaagggagctacaggga

SEQ ID NO: 75873 - DNA, 1243 bp, Homo sapiens
acgtgggcacctcccaggggaggggcactcagtggggcacgtcgctggatttgcacgcagccttaaaagcaaataacaaacgcgcatgctccctgtattttgtaaatgtgaaccactgcctgcccagctgcccagttcgcagtcacagcgggagggttgagaaatgtcacgaaatggctccaagctcacggacttcagagctctccttgagagaggagcatggaaggttatcatccccgccaagccagggcactcaggtggaaacactggcacgggaaaagccagggtcctgccaggcaggctcctggtgctgtccccacatcacctccagttgggcttagaaaaccattccaccggggctccccaacccttctgaggcccaaggggctgccaaagcaccagggtgcctggaatgatggaggcgggcatccttcctggaccactctccacccacatgtccacctgccgagacatcccgggtcctgcccggtcttgggtcggggatccatgctggtcaggcctgcagcagagcccccatgggaaatgctgcccagacacatcatgtgcccttctcggaggtcctgctgcctctcgccctgcccttcttgggttgcccaaacccgtctgttggtgagtagcaagtcccaaaagaccctatggagctgtcagctgagtatcggtgtcccaaggcaagagctgccgaaataccatgctgtgagatggggaggatcacccatggagagggcagagagaggggctcacatgcccatgtcctggggtagtcagggcacaccatggggacagcaggaggagctggagaagccctgtgaggagtggccagcggatgaaccagctgtggcctcttgtgccctccacccatcttaacatcaagaagagctgttgttttctgcccctacccctgagcttggctggggcagggcaggggtctaagggcctccctytcctggagactcacagtgtctgagcatcaaccaggtcccggtgctccacagatttgcaagtgtctgggggagggagcctggccctcccacacgccctgcccacacctgctggctgtccccacaggcaggtcctctcagttccgttggaggaccaggctttgggagcttagcagccaaaaagagaccccctgtcctctcctctcctctgtcctggcagggacgagattcaggcaggagcgccaggaacgacaagagggaggggatgaagggagctacaggga

SEQ ID NO: 75874 - DNA, 1109 bp, Homo sapiens
tgcatcgtgccttgtcagtgacgacgcaaatggaaacgcttctgcggtcaatcttcagtgaatgcgatgattttattaactgattcttgagtatccgggccctccttaaacattctggtgaaaggacatttgtaagatacacaaagaattcacacaccctacatcttgagaaaatcagacgcttcatatcctttgtggaaatgagatcgagaacaaaataaaatataaaaatcttttaaaatccatgaaacaataaggagacgagaaggggatgaggggacaaacaaaaagaaaaggggccacttgcctggcgctttggaggcctagaaagttaaacgtgtcctaaagtcatggcactggccgccctccaaaatctgagaggcacctcaaggcatttggaagaaagcaccacttggctgggaaaagtggtaccaagggaggctttcaggccaggaattacagggaaagtaacaatcatgttaatcaagtgcctagaattggcttcacaccgactttctctgaaactattggccaagaatatctttcagtttatttgcacaattgaccaaaattccttctaccttagaacgtattaacctgatctacttgttcttaaggttcaggagatcacagattcttttgagaatccaacaaagctatgtaccctttccaccaaaaaaattattgttggcacacacttctcaacgaattaacaaggacccgaagccaactcatagaccctggtttgaaacccctgtgctaaagtggrctccatttgggacccagggaccaaggatgggcgcagtttcatttcccgagtttcaatatcaggggctgatcatctacgcgaggtgacgagatcactataatcataagagaaaggcaccttagcgcctcccaagtttgccctgggaatttagcatcctcactggttattgtggaggcatccatccagcctggccagggccctttctcccaggggccttcaggcatttacaaaacaccagatggcacgactcttctaggcaggtatgagacaggacaacctgttagtactcaaatcagggactgtctccattaggggtgtgtgtgtgtgtgtgtgtccatgc

SEQ ID NO: 75875 - DNA, 1109 bp, Homo sapiens
tgcatcgtgccttgtcagtgacgacgcaaatggaaacgcttctgcggtcaatcttcagtgaatgcgatgattttattaactgattcttgagtatccgggccctccttaaacattctggtgaaaggacatttgtaagatacacaaagaattcacacaccctacatcttgagaaaatcagacgcttcatatcctttgtggaaatgagatcgagaacaaaataaaatataaaaatcttttaaaatccatgaaacaataaggagacgagaaggggatgaggggacaaacaaaaagaaaaggggccacttgcctggcgctttggaggcctagaaagttaaacgtgtcctaaagtcatggcactggccgccctccaaaatctgagaggcacctcaaggcatttggaagaaagcaccacttggctgggaaaagtggtaccaagggaggctttcaggccaggaattacagggaaagtaacaatcatgttaatcaagtgcctagaattggcttcacaccgactttctctgaaactattggccaagaatatctttcagtttatttgcacaattgaccaaaattccttctaccttagaacgtattaacctgatctacttgttcttaaggttcaggagatcacagattcttttgagaatccaacaaagctatgtaccctttccaccaaaaaaattattgttggcacacacttctcaacgaattaacaaggacccgaagccaactcatagaccctggtttgaaacccctgtgctaaagtggactccatttgggacccagggaccaaggatgggcgcagtttcatttcccgagtttcaatatcaggggctgatcatctacgcgaggtgacgagatcactataatcataagagaaaggcaccttagcgcctcccaagtttgccctgggaatttagcatcctcactggttattgtggaggcrtccatccagcctggccagggccctttctcccaggggccttcaggcatttacaaaacaccagatggcacgactcttctaggcaggtatgagacaggacaacctgttagtactcaaatcagggactgtctccattaggggtgtgtgtgtgtgtgtgtgtccatgc

SEQ ID NO: 75876 - DNA, 667 bp, Homo sapiens
gtcccagatacttggaaggctgaggtgggaggatcatttgagcctgggaggcagaggttgaagcctgggtgatagagtgagaactcgtctcaaaaaagaaagaaggaaggaaggaaggaaggaaggaaggaaggaaggaaggaacgaacgaaaggaaaaaaaggaagaattaaaacaaaagaacttaaaaattttttaatcaaaagactaaaccaaaaaaacatgtatattcaaaatctttcaggttcctaattccaaaagtcaatgaacatctttctctcctcatgcyccctgtgctctttatggcttccaaccccgctaactactcctgccctggctttccctaccctactgttagttttttatctatgtttctggccaattcccccttctcaataacttccactagatcttccttctataccagttccaaaaaatggcactgagtttcattctcgaccatcttcttacttattcaacacaaccttccaggataaatcaataaaatccagttatctatggagcacctgctctatgcaaggcactgtgtgaaatgctcatccatactcacggcttcaaccatctcttacatcctaataactcccaaacatttctcgaccttgaatgaccaggtcatataccaagaatttatttggtatctccacca

SEQ ID NO: 75877 - DNA, 667 bp, Homo sapiens
gtcccagatacttggaaggctgaggtgggaggatcatttgagcctgggaggcagaggttgaagcctgggtgatagagtgagaactcgtctcaaaaaagaaagaaggaaggaaggaaggaaggaaggaaggaaggaaggaaggaacgaacgaaaggaaaaaaaggaagaattaaaacaaaagaacttaaaaattttttaatcaaaagactaaaccaaaaaaacatgtatattcaaaatctttcaggttcctaattccaaaagtcaatgaacatctttctctcctcatgccccctgtgctctttatggcttccaaccccgctaactactcctgccctggctttccctaccctactgttagttttttatctatgtttctggccaattcccccttctcaataacttccactagatcttccttctataccagttccaaaaaatggcactgagtttcattctcgaccatcttcttacttattcaacacaaccttccaggataaatcaataaaatccagttatctatggagcacctgctctatgcaaggcactgtgtgaaatgctcatccatactcayggcttcaaccatctcttacatcctaataactcccaaacatttctcgaccttgaatgaccaggtcatataccaagaatttatttggtatctccacca

SEQ ID NO: 75878 - DNA, 1032 bp, Homo sapiens
ccagagacagaaaaccctgaccaaaatctgaaaaaaaatctactctttttaaaagactttcaaaacttgaacagagaggcaaagagtttgaaagttactggagttcagcgatggcgtacaggaaacagtttggtatattcctgcttcttatgcccctggaatttatctttcctaacatttaactccataattcttcttttgattctaaagtttgtttaatatttcccaataagcttctctgtactcttgctttgaaaagttaatcagaatgtgtttctcacaatagatgagccttagctactctaacctaggatacatttcatccagggagtgtcactgaaattgatcaccaccaacaagctagcatcgttgtttttcatggctaagagtaggctgctgtccagatccaggcagataattcacacctgaaatgactgtgtaaattgaatacatgcttcactaaacagtggcttgaaataagcaaggraaactatactgcaataggatattactcacgaaaaattttgttgagatgggaagtctttttaccctatgatggacaaacactaaaaattcagaaatgacataagaatactcagcttttaaaagttatgttttaaagattcctttttcttttaaagaattgtgagaatcaggaaaaatgagcaaaaggatttctgaaaatatgtaattagcggagaaagactcagaagagaaaggaggtcaaaagaaagacactaaattatgctaagtgtaatggttttattgaatagactgactgccacagggcccaaacagaaagtaactttgtgtttcctccaagaccggcttcagagatagcagttctgagggtctccttcctgctctttgatggaatcttctacatcagtggtccccaaactttttggcaccagggtccagtttcatggaagacaatttttccatggacaggagatgtggagagatggttcaggatgaactgttccacctcagatcatcaggcatgagattctcataaggagtgtgcaacct

SEQ ID NO: 75879 - DNA, 561 bp, Homo sapiens
ttgctgaaattttatgggtctcagttttttaaacatttctcatatatgagggtcttggactagatgtcctctaagattctttccagcacaaagcttccacataaaagaaaataggtaamctttgacttttctcacttttgatcatgcggagactccaagtggtttaactgtggatacttagactgaatctgctccaaaccaggcaggagggttaccatggtaactgttgcctggcaacgggagaagggccaggatgtccagaggcatttaactcaggcagctcccagcaccccccaggtggcttgaattaagctccaaggctgcgaggttgtcaggacaattgtttaaaattgtgatgaatgttgggcagggatgtttggtctggtgcctagggaggcaagaactccaagacgccaggatgagaattgcgacatctgcttgttgaactaatggaccttttcttacttaaaaaatcattttcttaaaaatcagcatggaaggcagtctgtctgccaaagaaaagacatttatcacagttcttcataggcagaaacttctaat

SEQ ID NO: 75880 - DNA, 704 bp, Homo sapiens
cccaagcaactttctgatttttgatgtatttattcaacaaatattaattaattacctcctatatacaaagtactagaaaaagggtaaagaaaacatcattgctttcctggagtttttaatcttgtagaacaaggggactggcaaactactggactgccaatggctgcattcatctacaacaacagacttacgtaatcataagaaacagctcatacagctctcaaagcctaagtatttactacctgacgctttccaaatagtttgtcacccctgtcctagaggggaaagacacatttaaggaacaaaatttggtctagagttgggaaaactggggttcgataagaaccaaaagaaaacagttgtggttagaggtatggtaagtgaggatgagatcaagttggagagagaggaagggccagatcatgcgtggagtattgcagagctatgactagtttcctaggccactaaagatgaaataatataaaacaggtgagtgatatacacagttctgcaattcaaaaaaatcactttggcgtaaaatgaggaaaatgagctggagcagtgcaagagtgaaagaggacttttcattgaggcagctactacgtggttagaatgagagaccatgatgactcggacttgaatgggcagaacgaagatatacagttgtcccttggtttaygcaggagattggttccaggatcccc

SEQ ID NO: 75881 - DNA, 1136 bp, Homo sapiens
ctgaaaacttttaagaaatgcaaactcttkggctcaatcctactaaatcagaaaatctctcagcaaacaggactaaataagtatttttattatcctcatgcctctaaaactttccttcaaaactgtttgctacttcaaaacttgctaaaatattgtctgaagaataatggtaattagagcaaaggagagtctcacttccatatatcatgataaatgaagagctctgagggaacagtgcaccataacaatattctgaagaagaggcaccactggtctttcaaaatgtaggcaaagtctccggggacatcatcccccattatcagaaataaacagaatgaaggtgaggctggaaccactattaaactcaatggaaagattaaagagcaggtgtgacatagctggagagaattagagaacagaaagatgcaaagaacgtaaccacaggaaacaaagaaagaaaagaaaactgaaaatatcaaagtggcgttaaaagacataaatgaccaaaggaaaatatctggcacaagattaaatgtagctctagaaagagaagggacagagaatggaaaatagctgtaaatattcttgaaccaataaaagacatggcttcacagatccaggaaaaccaaaagagcccaaacaagatacataaaaagaaatcaacatcactgtaaacaccaaaaaccaaacagaagaactagaaaatagactaagagataagacaggacaaaacagatgagcaggctttgacagcaacagtaaaagacagagaggaatattatctctatagtgcctgaaaaaaatctgttaacctaaaattgtcaactagagaaaaataaacaatttatagataaaaaccaaagtaatttaccaccagaagacttgttctaaagaaatgttcctacaagcacaatctaacatacaagaggtcaccataatacaacacatacaaaagtaatttttttaaggactacatatgagacatttactggtgtggtgaaaaactggtgtgtgcatattgttgaatttctaaaaagtcacactttaaataccttcaataacaaaagtgtcatttcaggaagggagtgaccaaagctaatgaagtccttaagttgggggaaggaaaatattttaaa

SEQ ID NO: 75882 - DNA, 1136 bp, Homo sapiens
ctgaaaacttttaagaaatgcaaactcttgggctcaatcctactaaatcagaaaatctctcagcaaacaggactaaataagtatttttattatcctcatgcctctaaaactttccttcaaaactgtttgctacttcaaaacttgctaaaatattgtctgaagaataatggtaattagagcaaaggagagtctcacttccatatatcatgataaatgaagagctctgagggaacagtgcaccataacaatattctgaagaagaggcaccactggtctttcaaaatgtaggcaaagtctccggggacatcatcccccattatcagaaataaacagaatgaaggtgaggctggaaccactattaaactcaatggaaagattaaagagcaggtgtgacatagctggagagaattagagaacagaaagatgcaaagaacgtaaccacaggaaacaaagaaagaaaagaaaactgaaaatatcaaagtggcgttaaaagacataaatgaccaaaggaaaatatctggcacaagattaaatgtagctctagaaagagaagggacagagaatggaaaatagctgtaaatattcttgaaccaataaaagacatggcttcacagatccaggaaaaccaaaagagcccaaacaagatacataaaaagaaatcaacatcactgtaaacaccaaaaaccaaacagaagaactagaaaatagactaagagataagacaggacaaaacagatgagcaggctttgacagcaacagtaaaagacagagaggaatattatctctatagtgcctgaaaaaaatctgttaacctaaaattgtcaactagagaaaaataaacaatttatagataaaaaccaaagtaatttaccaccagaagacttgttctaaagaaatgttcctacaagcacaatctaacatacaagaggtcaccataatacaacacatacaaaagtaatttttttaaggactacatatgagacatttactggtgtggtgaaaaactggtgtgtgyatattgttgaatttctaaaaagtcacactttaaataccttcaataacaaaagtgtcatttcaggaagggagtgaccaaagctaatgaagtccttaagttgggggaaggaaaatattttaaa

SEQ ID NO: 75883 - DNA, 694 bp, Homo sapiens
acttcaatacctcctaaaaaatgctagtgcagtgtctcacgcttatgtggattcttctattctgatctttggctcccttttctcactcctgccttagtttcttttatttatttcccacattttattgagtagaaaaatgtatactatttactatgtgctgggtcacagaaatgtaattctaaaaagaatcagttttcaccaaagggccaaagtatggtgagggggataggaatacagacaaaaatcacaatttaatgtttcaatatatctaagacatcctcagcaggctgaattaaattaactctaaataaagagtgatgaagtacaatcaaaatattccacaggaaaatgaaattytgagctgagtttgaaaaataagtaagcttttaccaagtgagaaaggaggtaccaaacatttcaggataggaaatcaagccataaatatgtgctttgagaatggccatatatctcttttggctgaacagttaatgtgaagagaatttaaagtttacgtgcctcgttagcacagtagttagtgcttcagtctcataaactcagtgggacagacaattagaaagatagattaaagagggacataaagcttggaggtttggttcactcaattactttgagcagtaattttcattttaagagaactctgtacattgtcctgactgatcttccgctttatgca

SEQ ID NO: 75884 - DNA, 1121 bp, Homo sapiens
tagtttttctccagggtgttcatacagcttagtggttacaagttcaaggtttgaggtcagattgccagagtctgagtccttgcactgctacttattatttatgtaatagtgagtgagtctttttattgttgcaagcttccctggactagcaataagaacacttacattataggtttaaaggagacagtggttgtaaaacactgaaragagtgtccgacaaaaagtgaatgttcattaaccattggttgttagagttaattattaattttaaagccaggaatttccatttggacattctttttcatatcttataacaattagaatggtgctgaggtcatagggaggtaacagtcaatttctgatcagaaaataactgacttatttgaaaacagtataaaactgtgaaaaccttatctacaaataatattgccaaatatttatatgcaacaacattttcacacttttcactggtatataaggggaaaaaagttaatattagaataatgtaaacatttattctaatattctttttttgcactttgttgaggtagcatgcttcttttttggaaataattattagattagattagattaaatgagtatgttattcataccatcatgaatcaaaacacacaaattatgaattttctatcaatgctataaagaagtacttacgtgtaagatacaagaatctagaaactactaatagatgatagttggtaagaagtcccttaaatttagaaagagcttagactttgatgaatggaagctcaagttcaaatcttgagaaaccaaattaacaatgtcaacatccataaaatagaaacaataataacatacacctcataagttatacggctcagtgagatactatatctgaaatccatttagtggtaatgaaatatactgacttgattattgttaatatttaatttgacattattttcaaaggtttagaattcagactattgacactatttcatgtctaaaggcaatggaataaagatgacaattaagtcattgggtatgctgtaaacatagatatcgttaaaaaggatccttgtttctttgaacattagttttaggtgacatttctccttccctgtagttaataggaaggc

SEQ ID NO: 75885 - DNA, 1121 bp, Homo sapiens
tagtttttctccagggtgttcatacagcttagtggttacaagttcaaggtttgaggtcagattgccagagtctgagtccttgcactgctacttattatttatgtaatagtgagtgagtctttttattgttgcaagcttccctggactagcaataagaacacttacattataggtttaaaggagacagtggttgtaaaacactgaagagagtgtccracaaaaagtgaatgttcattaaccattggttgttagagttaattattaattttaaagccaggaatttccatttggacattctttttcatatcttataacaattagaatggtgctgaggtcatagggaggtaacagtcaatttctgatcagaaaataactgacttatttgaaaacagtataaaactgtgaaaaccttatctacaaataatattgccaaatatttatatgcaacaacattttcacacttttcactggtatataaggggaaaaaagttaatattagaataatgtaaacatttattctaatattctttttttgcactttgttgaggtagcatgcttcttttttggaaataattattagattagattagattaaatgagtatgttattcataccatcatgaatcaaaacacacaaattatgaattttctatcaatgctataaagaagtacttacgtgtaagatacaagaatctagaaactactaatagatgatagttggtaagaagtcccttaaatttagaaagagcttagactttgatgaatggaagctcaagttcaaatcttgagaaaccaaattaacaatgtcaacatccataaaatagaaacaataataacatacacctcataagttatacggctcagtgagatactatatctgaaatccatttagtggtaatgaaatatactgacttgattattgttaatatttaatttgacattattttcaaaggtttagaattcagactattgacactatttcatgtctaaaggcaatggaataaagatgacaattaagtcattgggtatgctgtaaacatagatatcgttaaaaaggatccttgtttctttgaacattagttttaggtgacatttctccttccctgtagttaataggaaggc

SEQ ID NO: 75886 - DNA, 532 bp, Homo sapiens
caagcctcccttccctacaaggagctgcaaagggaagccaagtagtaaggagttttaaacagagttgaaaaatccagagccagagtgccagagtttctccaccagaccacttaagccaggggaggggtgccacccatttgctgcctgctgggttaatcaatcckggggagtcaatcatttcaacccattttccatggatgtctattaaggtgactcaaaccagtaaaactaaggtaaagtgagaaaaagaaaaagaaaaggtgcaccagaaggaaaaaaaaatagaaaagaaagaaaaatgtttcttgccaaggtgaagccaggagccctgggaggctagaggaagacacaccactcatggtgatgttgaatgaaaggttcaagaagccactcatcagcaataagagaggttgtgttcagccaccctgatggcccttaagtccctgaggggaagggagatattaccctggtccctttgtggtcacctggaaatatgttactgtacacaggttcttaggcttttcatgcaatg

SEQ ID NO: 75887 - DNA, 781 bp, Homo sapiens
ggagaatggagcatatagaaattattattgtgatttgtcctctttacacaaaagcagagaaagcctctgacaactgcctacattgactaatttagtgcttgaaacttttaaccacaaacagatatccaaagtgcactacccatttgaaaggaagactgtagggtcagactgtctggatttgggtccagctccttcacttactaactgtgtggacctgggcacagatcagtttccttacctgtgtgagggaaaccctgtgcctcagtttccttatctctatattgaggttagtaatagtccttaccttagagaggctttttaaatattaaatgattgcgtatgtaaatgcttataatagtacccggcaaacaataagcaagcatttgcaatcatgatttgaggtaccccaacagcacaagacacactagggctaaaacgaacattcagaataaatgaccccaatggaaacagaaagaatttttttaaataagaaaactttcagaaactacaacttaatattactcarttagttttcacagaacattgaaaggatattgcaatcacaatagaagaatataaatagggccgggaccggtggctcacacctgcaatcccaggactttgggaggacgaggcaggaggatcgcttgagctcaggagttcaagaccagcctgagcaacataatgagaccccctgtctctataaaataaattctttttaattagctggccatggtggcgcatgcctgtggtcccagctactcaggtggctgaggcagga

SEQ ID NO: 75888 - DNA, 907 bp, Homo sapiens
gatttcatcttaaaacttcttagacttggttaaatccacattaattgatacatattatattactgtaacaaatctgaacatggattttttattcagttataattraagatgggagcccttctcttactttccctttgttctgagctgcgccatgccttttctcttttgggggctcttcagcaaagacaagtgtccccagattgaaactctggatagaactttttagactcagggaacatagattaaatttacctttcagctgggtgtggtggctcatgcctgtaatactagcactttggaaggccagagtgggtggatcacctgaggtcaggagctcaagaccagcctggccaacatagtgaaaccccatctctaccaaagatacaaaaattggctgggtatcttggtgcatgcctgttgtcccagctactcgggaggctgaggctggagaatcacttgaacccaggaagcggaagttgcagtgagctgagatcacgccactgcattccagcctgggcaacagagtgagactccgtctcaaaaacaaaaattaccttttaactgccatgtgatcagaggcaaaaacatgactgccatatccataagtttcttttgatagtccttctataatcaatttgctcactctaataactctagatatgtaatcatgcaatacaggcatgattcttcatggctctaaagagtgatttcttaatcctagatgctacagttccaatgcagagaatcagtcctatattaaggcaaaagacttgataacacgtttcaaccaacattaagtaatgatttaaacatgtattaacttcactcattcagttgattctgcctattgtttcatgccattctttttgccagaattggtaacctttaataacccacattcatatgc

SEQ ID NO: 75889 - DNA, 907 bp, Homo sapiens
gatttcatcttaaaacttcttagacttggttaaatccacattaattgatacatattatattactgtaacaaatctgaacatggattttttattcagttataattaaagatgggagcccttctcttactttccctttgttctgagctgcgccatgccttttctcttttgggggctcttcagcaaagrcaagtgtccccagattgaaactctggatagaactttttagactcagggaacatagattaaatttacctttcagctgggtgtggtggctcatgcctgtaatactagcactttggaaggccagagtgggtggatcacctgaggtcaggagctcaagaccagcctggccaacatagtgaaaccccatctctaccaaagatacaaaaattggctgggtatcttggtgcatgcctgttgtcccagctactcgggaggctgaggctggagaatcacttgaacccaggaagcggaagttgcagtgagctgagatcacgccactgcattccagcctgggcaacagagtgagactccgtctcaaaaacaaaaattaccttttaactgccatgtgatcagaggcaaaaacatgactgccatatccataagtttcttttgatagtccttctataatcaatttgctcactctaataactctagatatgtaatcatgcaatacaggcatgattcttcatggctctaaagagtgatttcttaatcctagatgctacagttccaatgcagagaatcagtcctatattaaggcaaaagacttgataacacgtttcaaccaacattaagtaatgatttaaacatgtattaacttcactcattcagttgattctgcctattgtttcatgccattctttttgccagaattggtaacctttaataacccacattcatatgc

SEQ ID NO: 75890 - DNA, 907 bp, Homo sapiens
gatttcatcttaaaacttcttagacttggttaaatccacattaattgatacatattatattactgtaacaaatctgaacatggattttttattcagttataattaaagatgggagcccttctcttactttccctttgttctgagctgcgccatgccttttctcttttgggggctcttcagcaaagacaagtgtccccagattgaaactctggatagaactttttagactcagggaacatagattaaatttacctttcagctgggtgtggtggctcatgcctgtaatactagcactttggaaggccagagtgggtggatcacctgaggtcaggagctcaagaccagcctggccaacatagtgaaaccccatctctaccaaagatacaaaaattggctgggtatcttggtgcatgcctgttgtcccagctactcgggaggctgaggctggagaatcacttgaacccaggaagcsgaagttgcagtgagctgagatcacgccactgcattccagcctgggcaacagagtgagactccgtctcaaaaacaaaaattaccttttaactgccatgtgatcagaggcaaaaacatgactgccatatccataagtttcttttgatagtccttctataatcaatttgctcactctaataactctagatatgtaatcatgcaatacaggcatgattcttcatggctctaaagagtgatttcttaatcctagatgctacagttccaatgcagagaatcagtcctatattaaggcaaaagacttgataacacgtttcaaccaacattaagtaatgatttaaacatgtattaacttcactcattcagttgattctgcctattgtttcatgccattctttttgccagaattggtaacctttaataacccacattcatatgc

SEQ ID NO: 75891 - DNA, 942 bp, Homo sapiens
tgcattttacttttacccatcaggaaaagaaagttaaatagtaaccaataatataatataaaaagtagtcaagataactacagaagagttgtcataagacattagcaatgaaaagtatgtgttgtaggagatcagaggagggaagaatcactagattaggatgattgaggaaattcctgtgaaagagaatccatcactatatttcatatacatatagatggtacagtataccataaattctctattatccagttcaggccatcctgggacaccctgaaaatagtcaatcagtcctttatttcaatctcaagcrttttgtcccaagccatgcagaatctgaagggcattggagatttagtgagagtttttctcacctagtctactctttctcttgattgtccccagtgccctgttcttagttatagagccttctggggcatcacctgccatccctttgccttgggcagagaacattccccagaaactctgctcttccttccctccctctaagatccttaaatctttttgcaaccttttaactccctcacctcacagccctgcctcctacatgtatggccctagcaggagctgtggtctccgccaggtctgaatcctcatgggtcgggatgaggacggaagcctcaagagtgcagcatcagaagatactcctacttcacgtgtgggcacacaaatctttagtcacttctccctgtgctgagttgtgctgaagtgtgtccttttccttgctagctttgaatcaaatcacaaaaggtgacagtggagcaagtgcagaggaaaactgagtgttctcatcaataaaataccctttcgtctgatgggggcaaatatccggcattctgcccgtatgaaaatacaggtctttggagacaaacaatcctactttttaaattctctcgcattttgaagttccactctttccaa

SEQ ID NO: 75892 - DNA, 814 bp, Homo sapiens
cccaaacctccctccctgaggtgtcatgttgctgtgatggtgtcacaggagtctcaggaaagctgagagctcaacataacaaagttcctacgtggacagtggtgctcaatagttgcttcttaaaaaatagattagttaggactatcggatgccagggactgaatctagtcacttaataatcaggttcccacagatctayttatctatatcccaaacactgtataattctaaaactatgagaaagaaagaaagagagagagagagagtgtgtgtgtgtgtgactcaactgcctcaaacacaccaaggaaacatgtttgaatataaataactgaagacagaaaagacagaatgaatcaaccagaggactagggagagttatatataaactgatatagatagatataattttttaaaattatttttaaatagagacggaattttgccatgttgcccaggctggtctcgaactccgggcttcaagtgatcctccaaccttggcctccagaaatgctgggataacaggcatgagccaccatgcccggcctagtgatataatttttttttatataggccttgaggtgttgtattttttataagaggtattatatagtttataaactcataaaaaatttaaaaacaaggtaaactgtaatattttaattgaaaacacttctttagttatatccttgaaaactgaaaccttacacattacaggattgttatcttgttagttggacaccgttaaatgaccaaagctattcatggtctcctgatgagaacccaagtaaagagtcttcccttagttaattcacag

SEQ ID NO: 75893 - DNA, 814 bp, Homo sapiens
cccaaacctccctccctgaggtgtcatgttgctgtgatggtgtcacaggagtctcaggaaagctgagagctcaacataacaaagttcctacgtggacagtggtgctcaatagttgcttcttaaaaaatagattagttaggactatcggatgccagggactgaatctagtcacttaataatcaggttcccacagatctacttatctatatcccaaacactgtataattctaaaactatgagaaagaaagaaagagagagagagagagwgtgtgtgtgtgtgactcaactgcctcaaacacaccaaggaaacatgtttgaatataaataactgaagacagaaaagacagaatgaatcaaccagaggactagggagagttatatataaactgatatagatagatataattttttaaaattatttttaaatagagacggaattttgccatgttgcccaggctggtctcgaactccgggcttcaagtgatcctccaaccttggcctccagaaatgctgggataacaggcatgagccaccatgcccggcctagtgatataatttttttttatataggccttgaggtgttgtattttttataagaggtattatatagtttataaactcataaaaaatttaaaaacaaggtaaactgtaatattttaattgaaaacacttctttagttatatccttgaaaactgaaaccttacacattacaggattgttatcttgttagttggacaccgttaaatgaccaaagctattcatggtctcctgatgagaacccaagtaaagagtcttcccttagttaattcacag

SEQ ID NO: 75894 - DNA, 1316 bp, Homo sapiens
ttttgttgggcagaacaaagtcacaaaaaaagaatgaggttttaggggattaatgtctatccatcagttaaaaaataaatttctttccaggcttgtgacatgacaagttttcaggttgttttttaactcgaagcctgaaatatgaaacacctaagcttttgaatttcaaattaagtcaaataaagtgcttcaaaatacacagctaatatgataaaagcatctctctcaagcagcgtgttttttttaagagaggaacaccacctgaaatgtgcaactttcccagctgcttccatcattaattgtgggtggtttctgtgtgggtacaaaaataagggtggtttaaaaaaaaaacaggaaaacaataattcaattgtccaactgagagctattaaaaagtaaaatatgcttcctctgcagagttaaaaagaaaatgttatttgtataaacamtttaggcatttagaaatgttccactttaatacacgacttcctgatttatataaccacatttaagtggttgtaatgagggtctgtaaagaatgatggatattttttttttgattcagcaaatgagaaggtagtttacttcctcaaatttaataaaatatcacaggtctcttttagaagagttcagctgtggttgataatggcattgcctttggtttagaaatttttcctaaaaatgcccaagaagaatctcatggctacaaacaacttcaccgtttcttttttttttttcttaagagacagggtctcaacatgttacccaggctgcagtacagtggtgtgatcatagtttaatgtaacctcagcttctgggctcaagggatcctgcagcctcagcctcctgagtagctaggtctataggtgcatgccaccatgcctggctaaatttttactttttatagaactggggcctcatccaggatggtctgggactcctggtctcaagcattcctcccgccatggcttctgcaagcactaggattataggtgtgaactatcacaccccgcccagttctaccttttgtatcacaataccactagacaaatattgagtaaactgtaaaaatgcatatttgtactcatgaccaaattctgaagaaaattttcacagaagcattttcaataatttaatcattgaatttgtttaagtcaaaaaagaaaataggtcttttttttaagaaaaattattaatgatcttttgaatgcattttctgcatttattatggcagttatgatttttaacctgaaacaaaagctattatctctcaaagtgtttctacactatagaggaatcctttccaaatacaaaaa

SEQ ID NO: 75895 - DNA, 998 bp, Homo sapiens
acagtcctaacttaagcacaccttgagaatgagcctgtatggcagataccctgaatgtgtgttcagagttccaaactaaggaattgagagtggccaactggagattcattacttatctatgtggaacatctgaaccctcagcccatccagtggaacacaggccattcaggggatcgaggcctttgccttgggttaaataaaaattgccaggtggaggttgttagtgggagggtgttaagtgaaaatactatgtaacctgcatgctttttacaagtgggttggtggttcttctgttccatcccactgtcactggaccactccgtatgtaagtttcccactaataaagccctgtgttttgtgtgctggctctgggtctcttcttcagctgcttgaacctggtgccatcctattgaagttaacaggggtctggcatgccaccatgtaacacgacttataaattctagctccccctggacctcttcaatccttctctctgttccacttgttccctatctgaacacctcttactcattttttaaacctcagccaagttttacctccttgctgagccttccctaatattcctaggctaagtctcgaggcccttcttcaaactcccacaggatattgatcatatgactatcacagcagataccagtactctgcagaccacagtgtgcacagtgtgtcttcccatccagattatgagtatttttgagaaaatgcttaygtctccagcttttatttttgtatcccccaaagatgagagcagtatctgaggcatatagttactagccaacaaatatttattgatataagcttattggttggaagtgggggtagggtaggaggtggagaaagaatatggaagacaggaagttagagagtggaaaatgccaaaatcaaacttaaatgataaagatggacaatgtcagactttacattcctacaaactaaacatcattttcctattcatatatcagtttcagtctcaaaca

SEQ ID NO: 75896 - DNA, 652 bp, Homo sapiens
gagagggaggtgtgccagawgatcactttatgctatcctagaaggcagaaaatattctctcaattgtcttaaccagtatctggaactgagtagaaagggcacatttctaaggaagaggtgtagaataagtttcacattttctgagaaatcatttggatgtccatggaaattttagagttcagaagataaagaaaaccaggctgggcgtggtggctcatgcctgtaatcccagcgctttgggaggctgagacgggtggattgcttgagagcagcctggccaacagggcaaatcctcgtctcaactgaaaatacagaagttagccgggtgtggtggcaggcacctgtactcccaggtacttggaaggttgaagcatgagaatcccttaaacccaggaggcggaggttgcagtgagctgagaatgagccacattgcgctccagcctaggtgacagaataaaactctgtctcaaattaaaaaaaatacagaaacaaaaaataaagaaaaccagagataatgtttagaagttatagacaaggcaaatttcaatgcacagaaatattttaatcctcgtaaaaatggttgaataaaatgctgcttatagcagttcattcatatagaaactatatattttatactatttcactggacttt

SEQ ID NO: 75897 - DNA, 481 bp, Homo sapiens
acaaaaacccataaatttattttttgcatttctgaaggctggaaagttcaagatcaatatgctggcagatatggtatctggaaaaggcccacttctggtgtgcagatggctacttttcattgtattctcacaggaaggaaggaaatgcatcttgtgtattttcctctttttataaggtcattaatccctggatcttttgtctcttcctctttttatcagatcattcatcatatcataagagtttcactctcatggactcatctaaacctaattaataccaaaggcccagtctcccaataccatgcccttggggttacagttttaacctatgaatttgggggtggaacaaagttattatttacttttataacctaaacatattttattgtatcattttttacagatattttcaatagagatacaatttttggttcacaggttttttgtgttttgttktttcctctcagtgattgaaggatcc

SEQ ID NO: 75898 - DNA, 568 bp, Homo sapiens
ttgttcttacttattttttaaactcttcagataattgctttttttgtactttatttagttcttcattgtaatcagtaggaaagataacccatagtgaatatatcctaccatgctggaagaattgaaaaaccttggtattttcaattcctgatgagtcagatggttctgaagattttatttgttccattaaagactttttttttttcccacaaaatagcatcacacttgatgggaaaatggctgaaaaactaggaaactgaacataattaatataattaataaatgctaacaaagtttctattctaaaggaaaaagtttctaggtctattggaatgaaaayttagctttaatcaccaatacttcattttctgaaaattcatcttaatatcaaaataaaaagaccatactatttttagagaaatatatctcatcctatttgatcatcataattatgaaaatctcaataatatgaatgaaaatccataaaaaccagagtaagaaagatattaagcaaaaccataaatatagttctacatcatattttttcattttctaacattggagatat

SEQ ID NO: 75899 - DNA, 635 bp, Homo sapiens
ttatgaatttatgaaacctcactgaaaaggatggggaaaatggtactgactcaagcaatgctagaaatgactcgagtaagactagagacaaaagaaactgcacataatcactgtactctgaaggatgaagctatttcccaggtgggtatgggttaaaaattctgatgctcgtatctatgtatactggaatttagcaattaataaactgaactttagcacatagcgtaaacttaaatggggatgttgaagaccagattgctcattgttgaagtgggattgtatagacaagtaaggggaacagctagaataacccatgtggtaatgcttagcattaaagacatcagtatgaacccacacttagcttaatatagatacaaatagttgcaatagaaagatgtatagataygtgtacatgggttagtatacacacatatatttcctaactctattagctgagacggcctagaatcgaagacactccagtagcaacaagtactctacacaccaagatcttgctttctaataccattctgcaataaaaggaacctgggctccttgaagaaatggctgattctaggactggtgcagaaaagatacaagatgatcttgaagcattttgtaatatcagaaagtaa

SEQ ID NO: 75900 - DNA, 551 bp, Homo sapiens
  misc_feature (1)...(551): n = A,T,C or G
agaatcagaatgttcttatacaaataccactttgtgtcctgaaaaagagagattccacatggwcccaaactacaggtgtttgtacaagaacattctgtggaatctctctttttgaggatgcaaagtgctatttgtataaaatggcttcatttcaccagcaattttgatttcatttttcagcctaatttgggtaaaaaaaatgaaaccaaaattgctaatgaaataaaaaccaatgtttcatgggttgaatttttaactttttgtattagcccaacagcgtccatctcttctagttaaatatcgacttctctccaggtagatattctaaagacaaatggaaaattcaaacaagtatgctgacctataaaatgatgtcgacaaatagtttaaaggttgaccaaatactttgctccttaacttgattctctcctttttaagtagacagttacannnnnnnnnnnnnnnnnnnnnnnnnnnnnnnnnnnnnnnnnnnnnnnnnnnnnnnnnnnnnnnnnnnnnnnnnnnnnnnnnnnnnnnnnnnnnnnnnnnng

SEQ ID NO: 75901 - DNA, 568 bp, Homo sapiens
atatattcacaggtttcagggataggacatggacacctctgcatttgtatattggagagggtggggcattattcagtctactattcctttgtttgtgtttttctgtatctatttttttctattctctctaaatcttggtccttttctgtgaatattgcatttaaaacgaaataaaataacagataatctgactggccytgctggtctcattactgaacagctttctcatgtcataggtaagcagatcatcgtacagatgacatatttgactgtggacccagactccgctccagttaagttgtagtcagagttggcaggtcacatgacacaaagcacattaaccagtgtgcagaattatattggctattttgttctgatggagctgtgagtatggcaggcattcaaaatccagtggactcttttctagtactcaaatattccttcactgctaacaaaactggtcatccacctccttgtctgtttgtccaattgattctgaatgagctgaagtctgattagatggagaaggcagcccttccaggtggaaggagtggcaaatggaaaacat

SEQ ID NO: 75902 - DNA, 561 bp, Homo sapiens
taaataaataatatgatacattcctttcataaaatgcttttaaatatatgcttatctgtattttagaaatatatatcttcacacagtccaggctcaacctaaaatattaaataaagtcaaatatgggcaggcttatctggataagaatatataatatttaaaaaaataaattgatttatttagcagaccaaattttagaagctatagttctactttaccaacaagaaaaaatgttagagggaaatatttcattaaaaactgcagaaggtagatatcatttcaggattgattctgatactggaaaaaaacaaaacctctttttttaagccaaaaatactgcttctaaacactttaataacttggtgtattttaatagagtaagaggagaaaatatttctgtgaaattatcaataaaatatctactagttcaaatggtgtaaaatgttatatgaaaagtttacccaataaatatactaattcaagattaattcaagatagtctagamtgtatcctagcttaaactttacaccattgtattttagtattataaaactcatttat

SEQ ID NO: 75903 - DNA, 926 bp, Homo sapiens
atatcacaaaaacgcttttaaacattaaaatcatgatatgtgatgtgttcacatccaagtgtatgcaccacttgatttaaacattgttaaaaaatcaatctgaaaattcttctatactttattaaaaataatctatactggaagatactagtaagagtatgggactccaggtcttccaaatcttctataaatctgtggattgtacaggccaaaagagagatatttttatattcaaccaggtgattgactctctccaataacaataaagaatttcttacataagtaatgattacagtagactagacatatcattatctgctacaaccatcatacccattgagaattatacttaaattttgtatttagtagayacttttattcaccccttggtttattgttagtgtaattcagctgcttcagtttctaggggtgtgcagtttttgtgtgggcttcctttaataatgatgaacatgaagctgtctaagaccttgtgatgaggtaagtagagacatgttcctttaataccatattttgaaacgtgcacattgtttaatcacaggaataaataataaattagttattctttcattcaagttttgattgacatggatattctaatgtatttgtaatgtatttattaatggttctttcttttgacttgagaaaaagacaagcagaattacctcagtgtcagtttttatgatatgcaaacacagtatatgctaatccctccttctgggactcaatgcattccgtcgtcttatctctttaatgtatcttaatctgaaacaatttctccgactttctttgtctttcatgatcttgatatttttgaagagtacaggcaaattattttctagattgtctgacaatttgagattctcagtttctcatgactagattcaggttagtcattttgcgcagga

SEQ ID NO: 75904 - DNA, 1003 bp, Homo sapiens
attacttgccttatctgtcttcttcagaggaatgtgagctccaagaaagaagtatcctgccgggcgcggtggctcacgcctgtaatcccagcactttgggaggccgaggcgggcggatcacgaggtcaggagatcgagaccatcccggctaaaaacggtgaaaccccgtctctagtaaaaaaatacaaaaaattagccgggcgtagtggcgggcgcctgtagtcccagctactagggaggctgaggcaggagaatggcgtgaacccgggaggcggagcttgcagtgagaggagatctcgccactgcactccagactgggcgacagagcgagactccgtctcaaaaaaaaaaaaaaggaaaaaaaaaaaaaaaaaaaaaaaaaaaggaggtttcctatctgctttcttcatcactgcatccccagaacctaacacaaagagcaggcacatagtttgagaaatgaaaacatgtggaaagtttctggtgtagagttccactaaattcaacaaatgagagcagaaggaaaaggtatcatgcttcatgaaactcattgttagtatagcttccatactttccggcttctttgaaagcctaattattgaagttactctagtattaattaatataatacatgtacattaagggtttttttcttataatttttccatattaaaaatgttttaaaaaatctctgtgggtttttaagtgcaaacattttccataatgggattacccatggggaaaattttataaatctatgactaaaacaatattaattgtacctgccatgaagcaaaagcaaaataaatagcagatgttggagtaatataatacatttagtttttaatagctagtatgagatttgctacttttctctagaacatctccacactgaaatgatagcaattaaactatacrgcatctgtgagctcactttgtttagacttgtagctgatcactcttcaaaaaaaatagagtatagcatctgctggctatactctga

SEQ ID NO: 75905 - DNA, 668 bp, Homo sapiens
tatacatataatctgtttacagatatatagcaaacacttactatatgttagtctgttagacactgttctcatctcttgaaatatatgagcacacaagacaaagatctctgttctccaagtgtttacattccagaaaggagaggtggaagtaaataataaatgtaatataagaaaataaaaacgtagaccaggataaggaaattgtattatacagttttatacaatttgcatattaaatagagaggatagccttcatagagaagggggattcaaacagaggcttgaaggtaactagccaagtaggtggctggtaatcagtatcccagtcagagggaacagctagcaaaggtgggagtaaacctcctaagttccaggaaaagcaagaagagttggacagagctgcagaagaacaaggggaaggatgcrgggaaaacggatcagaaataaaatgaggcggcacagactacacagacacttggtacttcctctaaggtaagttgggaactaccagttgatttttaccagacaggtgacatgatctgccatattctaaaagaatagcattttctcttgaggctaatctttggagaactagaagcagtaatttggataagcaattactactacgggagtcatggtgacaagagagcaacagatgaaaattggta

SEQ ID NO: 75906 - DNA, 792 bp, Homo sapiens
tgcattaataacaaatattttaccttttgaaaaaataaatgaaggatttgacctgcttcgctctggaaagaggtagattttaagttgtttttttgttttgctttgtattctacagtagcggcggkggggggggcgttgtctagcagagaatgaaaaggtggaaggatgagaaaaaattacagtgccttggttttccattgccagttcaatctttgcatggagcacatgtaaggtaatactgtgagaagctaaaaacagttgctttgcatttcctattctgctgaaggcaaattatgttgattatagcataactgaatgatcagagtcattcagccttctttaaaagagaacactcactttggcccccatccccctccaaaaaaagtttaagcaaccagaattataacatggaatcactgacacctctgcctgtcatataagtaagtgtgacatctaatgattgtatattaaaattattttcaggacatcctcagcatattcattatgggagtaggtggaactacattgagattgatttctaagtagatattactagattttcctttttcttttcttttctttgcagtttagaaaaaaaaatttactaagaaaagttgttgtaaaagagaagggtactaaaccctattttaaatatttgtcttacattttctccaagtcttagaaaaataagccaattctatttcctacctctaacacttacacttacaatcacctaatataatgaactttgtcacttgcatttatatgagacataactggaaataggcagtt

SEQ ID NO: 75907 - DNA, 2020 bp, Homo sapiens
tctcttcttcctcacaatggggtaagccatgtcagagcagccctatagagaggaactggagcctcctgccgacagccacttgaaagtgttggaagctcaactttggccccagtcttctaggactgcagctccagctgacagcttcagtgagacctcaagaaacgccttgagccagaactacgcagctaatcctttcctggatatctgatccttagaaagagtgagagacaactaactggtggttgttttaagctgctaagttttgggataatttgctgcacagaaaagataactacagtatctggttaaatgagtaactgctgcttctttaccaattacaggttcatttccactttattactcttgccttcttgataaatgctattaaaatgcccaatcatagaattgcccctgcttcctgacagcatccaatcccaggcaaagctccacttccttaaaccctttgcagactcatctaacacaagcacaactcttataataacttctttctggcatcctcttatgagataccttacagttcccaaaggcatgttgtctcttgttacaacaagcaaataaacccaaatctttctttgatttcaggtgtctccctggtggacttcaactaaagtcatcaaaagtagtttggagttgtattggacaataagctttctgcactatgcataaatgaaaatcaattcaagctgttaagagatatgattacacaaatgttagctaatatttattgaatgtttaccatgtgccagatgcagggctaagagctttacatgcattatatcgtttcatttttatgaaataactttatgaagtggttgatattagtattcccatatcacagataagtaaattgaagggttgcgaggttaagtaactaatccaatatcacacagctaagcagcagtggaatctgaatccagactttatcaagaccaatatttctaactattaatagattatcccccaccaatgtgtatcataatactgacttaaatctaacagccagtgattccatatctcctcagcctgatagccaactaacttagcaccccactaactggcactgtctggagttctaccttttccaatcatctagaaacagatttcacatgttctttattgattccctcagggacagcacaagggaagaatggtaagaattttatggctaaagcaattttgaaaaccacgtatgtaaccttctcttctataacagtcacaaatctggattccaaatcctgtacggactcgaattcttaggatatttaaatgcagaaactttttcttggaaataaagtatacattgtatttctttttctaatccagtaagtcatcacaagaagaaataatcaatatattaaatgattttactgtttcttatttgtttctatgtattacttttcacaaaaggtaatttccccccacagctggaaaaataaaggagcagaggcctggagactcttggcatggccgaggagcacaggaggtgaggacagccttggggtaaaggacagccgccgaggaagatgagctgcttccagggaacagactctgagagaagaggtgtacacattttaaccaaaagaagaaaaccaggaaattggagttgtctggatgaacaatcattcctaaggaacgctgtgaggtgaaacctgattcctgtttcagactcccccaacaccttcctgtctctgccctagtctgcaaagattcttaactatcattccttcattccactcattcatttagctacygattatcctaacagtggcgcaacattgtagtatgtgcaacataaaagacacattacagtagggcagaaaacataagacattgtcctatgaaaagtttcgtaagacgataagcagctaacattaattaatcaaacaaggagtattgtattaattcagaggcaagagcactggaatctgggatgggcttgggaacaggtgagctcacagaaggactcttgcctgtggctagtgccatatataattatgca

SEQ ID NO: 75908 - DNA, 644 bp, Homo sapiens
tgactgtaatctcaggctgcagtgaactatgattgtgccactgccctccagcctgagtgacagaatgagactcccaactcaaaaaaaaaaaaaaaggaaagaaaattaagaatttgttgaaaattgttttactacaatgctaggctgcatgtcttgcacctgtactcccagcaactcaacaggctgaggsggaaggattgctttaggccagcggttggagaccagcctggggaacagggcaagacctcgtctctaaaaaaatacaaggcaagctgagccaggaggattgcctgagcccagaagttccaagttggtcagctatgattgccccgctgcactctagcctggataacagagcaagaccctgtgccttatttttaaatttatgttatttttttactacttatgcttatttatctatttatttatttttgagacagagtcttgctctgtagcccaggctagagtgcagtggtgccatctcagctcactgcaagctctgcctcccaggttgaagctatttccctgcctcagcctccagagtagctgggattacaggcacatgccaccacgcccagctaatttttatatttttagtagagacagggtttcatcatgtttgccaggctagtctctaactcctg

SEQ ID NO: 75909 - DNA, 644 bp, Homo sapiens
tgactgtaatctcaggctgcagtgaactatgattgtgccactgccctccagcctgagtgacagaatgagactcccaactcaaaaaaaaaaaaaaaggaaagaaaattaagaatttgttgaaaattgttttactacaatgctaggctgcatgtcttgcacctgtactcccagcaactcaacaggctgagggggaaggattgctttaggccagcggttggagaccagcctggggaacagggcaagacctcgtctctaaaaaaayacaaggcaagctgagccaggaggattgcctgagcccagaagttccaagttggtcagctatgattgccccgctgcactctagcctggataacagagcaagaccctgtgccttatttttaaatttatgttatttttttactacttatgcttatttatctatttatttatttttgagacagagtcttgctctgtagcccaggctagagtgcagtggtgccatctcagctcactgcaagctctgcctcccaggttgaagctatttccctgcctcagcctccagagtagctgggattacaggcacatgccaccacgcccagctaatttttatatttttagtagagacagggtttcatcatgtttgccaggctagtctctaactcctg

SEQ ID NO: 75910 - DNA, 644 bp, Homo sapiens
tgactgtaatctcaggctgcagtgaactatgattgtgccactgccctccagcctgagtgacagaatgagactcccaactcaaaaaaaaaaaaaaaggaaagaaaattaagaatttgttgaaaattgttttactacaatgctaggctgcatgtcttgcacctgtactcccagcaactcaacaggctgagggggaaggattgctttaggccagcggttggagaccagcctggggaacagggcaagacctcgtctctaaaaaaatacaaggcaagctgagccaggaggattgcctgagcccagaagttccaagttggtcagctatgattgccccgctgcactctagcctggataacagagcaagaycctgtgccttatttttaaatttatgttatttttttactacttatgcttatttatctatttatttatttttgagacagagtcttgctctgtagcccaggctagagtgcagtggtgccatctcagctcactgcaagctctgcctcccaggttgaagctatttccctgcctcagcctccagagtagctgggattacaggcacatgccaccacgcccagctaatttttatatttttagtagagacagggtttcatcatgtttgccaggctagtctctaactcctg

SEQ ID NO: 75911 - DNA, 644 bp, Homo sapiens
tgactgtaatctcaggctgcagtgaactatgattgtgccactgccctccagcctgagtgacagaatgagactcccaactcaaaaaaaaaaaaaaaggaaagaaaattaagaatttgttgaaaattgttttactacaatgctaggctgcatgtcttgcacctgtactcccagcaactcaacaggctgagggggaaggattgctttaggccagcggttggagaccagcctggggaacagggcaagacctcgtctctaaaaaaatacaaggcaagctgagccaggaggattgcctgagcccagaagttccaagttggtcagctatgattgccccgctgcactctagcctggataacagagcaagaccctgtgccttatttttaaatttatgttatttttttactacttatgcttatttatctatttatttatttttgagacagagtcttgctctgtagcccaggctagagtgcagtggtgccatctcagctcactgcaagctctgcctcccaggttgaagctatttccctgcctcagcctccagagtagctgggattacaggcrcatgccaccacgcccagctaatttttatatttttagtagagacagggtttcatcatgtttgccaggctagtctctaactcctg

SEQ ID NO: 75912 - DNA, 644 bp, Homo sapiens
tgactgtaatctcaggctgcagtgaactatgattgtgccactgccctccagcctgagtgacagaatgagactcccaactcaaaaaaaaaaaaaaaggaaagaaaattaagaatttgttgaaaattgttttactacaatgctaggctgcatgtcttgcacctgtactcccagcaactcaacaggctgagggggaaggattgctttaggccagcggttggagaccagcctggggaacagggcaagacctcgtctctaaaaaaatacaaggcaagctgagccaggaggattgcctgagcccagaagttccaagttggtcagctatgattgccccgctgcactctagcctggataacagagcaagaccctgtgccttatttttaaatttatgttatttttttactacttatgcttatttatctatttatttatttttgagacagagtcttgctctgtagcccaggctagagtgcagtggtgccatctcagctcactgcaagctctgcctcccaggttgaagctatttccctgcctcagcctccagagtagctgggattacaggcacaygccaccacgcccagctaatttttatatttttagtagagacagggtttcatcatgtttgccaggctagtctctaactcctg

SEQ ID NO: 75913 - DNA, 3529 bp, Homo sapiens
taactgtttgcacaaacttgggataaatgattttgggataacgatctaccagaatagggatatttcacccttggttctgagatgcaaaccaaagaatatcatgaccagctttcaggcctcctgaagtatatctctcacattgtcctgttctcttgctgaggagcctgagatccctgtgtggggattagacagtggactgttacgggtgtaggtgaattggcttattttgtctgtccctgtctgaatgtattgcaggaattaaaaaggaccaagaagaggaagaagaccaaggcccaccatgccccaggtaactgagcaattgtgaacagcttcttctgtgttgacatctggagactcctggttcagggaaaacagggcgggctgacattatcgattacatcttttcaaccgagcctgaattattcctactaacattgctgttggttttcattgcagtagatatttaggtttccatttcttcctccccttatcatttactaacctactgtaggtggaccagacttcaaaaactgtattctcatggcgactgcatggaaacttgagcacattttatggaaaattattgagcacagtcctttcctgatcactgtatgctgtgtgtcctgagggcactaactcagagtgtcctgttactccctcatcagtgtgtcacctggacaattcactgagctcattctctctctctgtgtgtgtgtgtgtgtgtgtgtgtgtgtgtgtgtgtgtctatctgtctttctctttcattcttttccatttggccctgttctgtcccaacatgaaggcaataatttgttacctcattaatggatctatccttttacttttttaaccacttccttatgctacccatgaaacctagttggggctctgttgtgtctgatttcccctggcttattctttactttttcctccttttccaggctcagcagggagctgctggaggcagtagagcctgaagtcttgcaggactcactggatagatgttattcaactccttccagttgtcttgaacagcctgactcctgcctgccctatggaagttccttttatgcattggaggaaaaacatgttggcttttctcttgacgtgggaggtgagtacctttctatgaaggtgataaggatccactgagtcttccatataaagatcatattcctgctccaagtggccattactgagctgagagatgtcattgctgcagtgaggacctataggcacatgtaggttgaatgaaactctagttctaactggaagcccagacatgggatgggtcagtgagcatggctctcttcctagtctcaggccatgcctgtggcactctgattctactctcatgacattggacctgggcagatgtgacaaattcagagaactatgattttgactcaagggtttgtagatttcctttttcactctaatttcagtgtctaaagtcctcacaaccatgaacaatctgagtatttgatgagacagggctaaatattgcagtttttctcctagaaatcatttgagggtatttgctttaaattgattggaaaaatatggcataactgtttgcacaaactcgggacaaatgatattgggataacgatctactagaatagggacattttacccacagtttctgggagaaaaaccgaggaatttctatcatgaccagccttcaggcctcctgaaatatatctctcacagtctcctattcttatgctgaggagcctgaggtccctgtgtgagggttagacagtggattgttatgtgtgtaggggaatcagcttaatgtgtctgtccatgtctgaatttattgcagaaattgaaaagaaggggaaggggaagaaaagaaggggaagaagatcaatgaagaaaagaaggagaaggggaagaaaagaaggggaagaagatcaaaacccaccatgccccaggtaactttcagcaattgtggatgcttaattctgtgttaacacctggaggcaacagattcagggaaaccagagtgtgtttgatttcatgttttcaacgaaggctgaattactcctactgtcattgctgttggttttcattgcagtagatgtttaggtttccatttcttcctccccttatcatttactaacgtaccataggatgaccatacttcaaaagctgtactctcatggccactgcatcgaattttgagcatattttatggaaaactattgagctcactcttttcatgatcgcagtgtgctgtgtgtcatgagggcactaactcagagtgtccttttactcccttaccagtatgtcacctggccaattcactagctcactttctctctgtctctgtctctgtctctgtctctctgtctttctctttcattgttttctacctggccctgttctatcccaacataaagacaataatttgttacctcattaatggatctgtcctttttcttttcaaactcttccttatgttagccatgaaatctagctggggctgtgtggtttctgatttcccctggcttattctttactttttcccactgttccaggctcaacagggagctgctggatgagaaagggcctgaagtcttgcaggactcactggatagatgttattcaactccttcaggttatcttgaactgactgactcatgccagccctacagaagtgccttttacatattggagcaacagcgtgttggctgggctcttgacatggatggtgagtacctttctatgaaggtgataaggatccactgagtcttctggttagggtcatattcctactgcaaatggcccttactgagctgagagatgtcattgccacagggaggacctataggcacatgtaggttgaatgaaactctagttccacttggaagcccaggcaagggatgggtcagtgagcagggctctcttcctagtctcaggccatgcctgtggcaccctaatccyactctcaagatgttggatctgggcagatgtgacaaattcacacaactctgattttgtctcaattttgtagatcttgtagatttcatccttcactctaatttcagcatctaaaatcctcgctaccatgaagaatctgagtatttgatgagacagggctgaatattgcagtttttctcccagcaaccatttgggggcatttgctttaaatcgattggaaaaatatggcataaccatttgcacaaacttgggacaaatgatcttgggataacgatctaccagaatagggaattttacccacagtttctgggacaaaaacccaggaatctctatcatgatcagccttcaggcctcctgaagaagatctctcaccgtgtcctattctcatgctgaggagcctgaagtccctgtgtgaggattagacagtggattgttatgtgtgtaggagaaccagcttaatatgtctgtccatgtctgaacttattgcagaaattgaaaagtaccaagaagtggaagaagaccaagacccatcatgccccaggtaactttgagcaattatggatgcttaattctgtgttga

SEQ ID NO: 75914 - DNA, 3529 bp, Homo sapiens
taactgtttgcacaaacttgggataaatgattttgggataacgatctaccagaatagggatatttcacccttggttctgagatgcaaaccaaagaatatcatgaccagctttcaggcctcctgaagtatatctctcacattgtcctgttctcttgctgaggagcctgagatccctgtgtggggattagacagtggactgttacgggtgtaggtgaattggcttattttgtctgtccctgtctgaatgtattgcaggaattaaaaaggaccaagaagaggaagaagaccaaggcccaccatgccccaggtaactgagcaattgtgaacagcttcttctgtgttgacatctggagactcctggttcagggaaaacagggcgggctgacattatcgattacatcttttcaaccgagcctgaattattcctactaacattgctgttggttttcattgcagtagatatttaggtttccatttcttcctccccttatcatttactaacctactgtaggtggaccagacttcaaaaactgtattctcatggcgactgcatggaaacttgagcacattttatggaaaattattgagcacagtcctttcctgatcactgtatgctgtgtgtcctgagggcactaactcagagtgtcctgttactccctcatcagtgtgtcacctggacaattcactgagctcattctctctctctgtgtgtgtgtgtgtgtgtgtgtgtgtgtgtgtgtgtgtctatctgtctttctctttcattcttttccatttggccctgttctgtcccaacatgaaggcaataatttgttacctcattaatggatctatccttttacttttttaaccacttccttatgctacccatgaaacctagttggggctctgttgtgtctgatttcccctggcttattctttactttttcctccttttccaggctcagcagggagctgctggaggcagtagagcctgaagtcttgcaggactcactggatagatgttattcaactccttccagttgtcttgaacagcctgactcctgcctgccctatggaagttccttttatgcattggaggaaaaacatgttggcttttctcttgacgtgggaggtgagtacctttctatgaaggtgataaggatccactgagtcttccatataaagatcatattcctgctccaagtggccattactgagctgagagatgtcattgctgcagtgaggacctataggcacatgtaggttgaatgaaactctagttctaactggaagcccagacatgggatgggtcagtgagcatggctctcttcctagtctcaggccatgcctgtggcactctgattctactctcatgacattggacctgggcagatgtgacaaattcagagaactatgattttgactcaagggtttgtagatttcctttttcactctaatttcagtgtctaaagtcctcacaaccatgaacaatctgagtatttgatgagacagggctaaatattgcagtttttctcctagaaatcatttgagggtatttgctttaaattgattggaaaaatatggcataactgtttgcacaaactcgggacaaatgatattgggataacgatctactagaatagggacattttacccacagtttctgggagaaaaaccgaggaatttctatcatgaccagccttcaggcctcctgaaatatatctctcacagtctcctattcttatgctgaggagcctgaggtccctgtgtgagggttagacagtggattgttatgtgtgtaggggaatcagcttaatgtgtctgtccatgtctgaatttattgcagaaattgaaaagaaggggaaggggaagaaaagaaggggaagaagatcaatgaagaaaagaaggagaaggggaagaaaagaaggggaagaagatcaaaacccaccatgccccaggtaactttcagcaattgtggatgcttaattctgtgttaacacctggaggcaacagattcagggaaaccagagtgtgtttgatttcatgttttcaacgaaggctgaattactcctactgtcattgctgttggttttcattgcagtagatgtttaggtttccatttcttcctccccttatcatttactaacgtaccataggatgaccatacttcaaaagctgtactctcatggccactgcatcgaattttgagcatattttatggaaaactattgagctcactcttttcatgatcgcagtgtgctgtgtgtcatgagggcactaactcagagtgtccttttactcccttaccagtatgtcacctggccaattcactagctcactttctctctgtctctgtctctgtctctgtctctctgtctttctctttcattgttttctacctggccctgttctatcccaacataaagacaataatttgttacctcattaatggatctgtcctttttcttttcaaactcttccttatgttagccatgaaatctagctggggctgtgtggtttctgatttcccctggcttattctttactttttcccactgttccaggctcaacagggagctgctggatgagaaagggcctgaagtcttgcaggactcactggatagatgttattcaactccttcaggttatcttgaactgactgactcatgccagccctacagaagtgccttttacatattggagcaacagcgtgttggctgggctcttgacatggatggtgagtacctttctatgaaggtgataaggatccactgagtcttctggttagggtcatattcctactgcaaatggcccttactgagctgagagatgtcattgccacagggaggacctataggcacatgtaggttgaatgaaactctagttccacttggaagcccaggcaagggatgggtcagtgagcagggctctcttcctagtctcaggccatgcctgtggcaccctaatcccactctcaagatgttggatctgggcagatgtgacaaattcacacaactctgattttgtctcaattttgtagatcttgtagatttcatccttcactctaatttcagcatctaaaatcctcgctaccatgaagaatctgagtatttgatgagacagggctgaatattgcagtttttctcccagcaaccatttgggggcatttgctttaaatcgattggaaaaatatggcataaccatttgcacaaacttgggacaaatgatcttgggataacgatctaccagaatagggaattttacccacagtttctgggacaaaaacccaggaatctctatcatgatcagccttcaggcctcctgaagaagatctctcacmgtgtcctattctcatgctgaggagcctgaagtccctgtgtgaggattagacagtggattgttatgtgtgtaggagaaccagcttaatatgtctgtccatgtctgaacttattgcagaaattgaaaagtaccaagaagtggaagaagaccaagacccatcatgccccaggtaactttgagcaattatggatgcttaattctgtgttga

SEQ ID NO: 75915 - DNA, 564 bp, Homo sapiens
aagaactctggcacatgtacccccaggtgaagtgtataaaaatgttaattgctgcattctttacagtagcaaaaaatagaaatgatctaaatgttcatcaatacgagaagaaaataaattacaaggtactcataagatgaaaaaccaaactattgaaatgaattaaatacatccagatgtatctcgacatggacagattccaaaagaaatgaaacatttggatgcygaggggaaaaactcttcacagaattatagttaggcgtatgatagcatttatctacatctttaaaacatataaagttatactatatattgttcttgaatatgcatttgttaataaaatataatggcatgcatgacacagaaaaagttcaaagcagtggttacttctggcgagggagagggacaaaaggaacttgaatttttaaggaagctctatttcttatactaaaaaacaaaacaaaacacatctgaagcaggaacattcaaatggtttttttttatgatttttggatccatgggtgtctctgtacttttctgtatttttaaacctagtttcggttt

SEQ ID NO: 75916 - DNA, 564 bp, Homo sapiens
aagaactctggcacatgtacccccaggtgaagtgtataaaaatgttaattgctgcattctttacagtagcaaaaaatagaaatgatctaaatgttcatcaatacgagaagaaaataaattacaaggtactcataagatgaaaaaccaaactattgaaatgaattaaatacatccagatgtatctcgacatggacagattccaaaagaaatgaaacatttggatgccgaggggaaaaactcttcacagaattatagttaggcgtatgatagcatttatctacatctttaaaacatataaagttatactatatattgttcttgaatatgcatttgttaataaaatataatggcatgcatgacacagaaaaagttcaaagcagtggttacttctggcgagggagagggacaaaaggaacttgaatttttaaggaagctctatttcttatactaaaaaacaaaacaaaacacatctgaagcaggaacattcaaatggtttttttttatgatttttrgatccatgggtgtctctgtacttttctgtatttttaaacctagtttcggttt

SEQ ID NO: 75917 - DNA, 1482 bp, Homo sapiens
gcatcaacctaaccattttataaagaggacatacagacagaactgaacttattattcaaaaatatacatctaactataatatttgttgttgtgccttgttttctcctttactttcaactttcacactgttaggagctagatgtatactttcaaataataatgttgcacattaattctgtaatgttgcacaaattgaaacatagatgaattaggaagctttttttccagttttgaatatatgattataaagcacagtcctagatgaatgtaattagttttctttctactctagtagcatataccagagaatggagaacacttgaacaacaaaagccatcttatatatttgtcctcacagataccctacaactatcttaagtcaagatgaaaaagagaaaaaagttgtgatgatgacacacgcaaggctccaggcaaccacacagtacagcaaaggcttagtagaaatctatcatactgagattgattagaaaaataacaaactgctctgcatttcattcacaataaaccaatatgacttaaattctacagaattggctcccaaattatgtatatatgtaatatatatattacatatatatataattacataattataaaacctcctcctagaaactatatattaattgagagtagtttatttgtggtttgatgatatttgtaaatagttttacatcataatgagtgtcaagtaagatatttcacttataaaacctactaaagatttagactcctttgcaagctatcagatataagataacaatgatctcataggcagagggcaatgaaagctaaaatgtctcatgagaaagtttcaatcaagtaataaaatttaaaggaatttaagcagcctttaggatgtcatgcatcaatttagaaagaatttgtgatctagttgagaaatgcaaaaccctctgtccagtaagaatgcagtggttgtcttctacagtaagtaaagcttcactgggaaagaaatagttctgtgtataagtctgtgggcatgtggatatgaaggtgtagtgtcttttccaaactctgaaaatactactaatggtagcaacagatacacatttacacatagatattttagagctttgagctacatttcctctaaaacaactggttgacctttcctctcttttttgctctctctctctctctctcctgtcctaatctagtctgtctttcatctctcacagtttccttgtgtcttctattatttcagcttgaaattacaaacctaaattcaacaagggtcaagcagataacatgaaagaatacagtgtgctggttgggggctatggcaaattggagagtgcatgctatatctgaagggggcaaaattagcattcagtttaagaacttgacctctagttatatgcgaacccatctctccacttaccaggtatatggccttggctaagcaaagcacaatasttatctatttgtgtctcattatccaca

SEQ ID NO: 75918 - DNA, 569 bp, Homo sapiens
ggcaattgaaatatgtatcacattcaaatttgagttccaacatcacctttctggattaataaagtaaagaaagcttaaataaaagtggaaattcttgcttcattttcaacctataaaaagagactttaagtgcaagcaaggtaaggagtttgagtacagttcyacagaccacaaagagtaaaattaaggttttaagcacaggaatgatgtgaccagattggatttttagaaagtcaactctggtggcagtttgggagatggtgtgaggtgacaagagaggctggatgcagggagaccaggaccagggcacaggggagagaagtcgggggtcgggaggctgtgattctgactcagatgaaacaaaggaataagaatcagtgtggtgagcagagggtctcccaattatgtccccagactacctcttcaggttcatcttcctcacccagtcccacattctggcatgcaggctgatctactcgcacacacacactgcatatttgatgcccttctcttttgctggaaaaagctcctaaacatcttcttgtgatctaaatcaactttcctcttct

SEQ ID NO: 75919 - DNA, 658 bp, Homo sapiens
caggatgtgtgtctaagcaaatgagctccagaattcttcagcaccatactgaatagtttctcttatgacatcaaatttgtcttaaccatgagatgggagcacagtgaaaggagcaaccacctctgcctggggaagctggggaaggcctaagaggcaacgccaagtgggccagaggaacaaggtsgagagagtgttccaggctgaggggagcaggtgcatgggagatgtgcaggtttgtgtagtgcagtgaggctctgcagtgcagactcggggcaggggcaggacacctggtgggaaggagtgcagcaaaggaggctggaaaagaccttggaagccttgtgagtgacacaggcccagtgggccagggaatgccatggctggagtggtgtgttagaaggaatactgtgtcagtacagtgtgaagaaggtcatgagaaagctgggctggaagcaaagaagccagttaggaggcaaatactgtggcccaagtgagcaagaacactggaggccactattcactcattcattcattcattcattcattcattcagtatttcttgtgcacctactctatgtcaggtaccgctctgggcactaggaaaacagctgagaacaagatgaagttttggtaatgtatggcattagcatacattctaatg

SEQ ID NO: 75920 - DNA, 658 bp, Homo sapiens
caggatgtgtgtctaagcaaatgagctccagaattcttcagcaccatactgaatagtttctcttatgacatcaaatttgtcttaaccatgagatgggagcacagtgaaaggagcaaccacctctgcctggggaagctggggaaggcctaagaggcaacgccaagtgggccagaggaacaaggtggagagagtgttccaggctgaggggagcaggtgcrtgggagatgtgcaggtttgtgtagtgcagtgaggctctgcagtgcagactcggggcaggggcaggacacctggtgggaaggagtgcagcaaaggaggctggaaaagaccttggaagccttgtgagtgacacaggcccagtgggccagggaatgccatggctggagtggtgtgttagaaggaatactgtgtcagtacagtgtgaagaaggtcatgagaaagctgggctggaagcaaagaagccagttaggaggcaaatactgtggcccaagtgagcaagaacactggaggccactattcactcattcattcattcattcattcattcattcagtatttcttgtgcacctactctatgtcaggtaccgctctgggcactaggaaaacagctgagaacaagatgaagttttggtaatgtatggcattagcatacattctaatg

SEQ ID NO: 75921 - DNA, 745 bp, Homo sapiens
ggatcctggttcctgggtcttctgtttttctttgggtccttttctctgcttgccttcacctgcaggcttgggagctggggtgtcctggggcaaggagcagccagggataggcacctggacacatccttttgcagagtcattctggccagagcacccatttccttctttcaaagcattgagcacgcaagggtatagaaactgtgcagaatctgggtgagaactgggtcctaatgttctgaattatttttgatggaaacccaaataacccccattctttccactctctctatcttcagctcaggtgctaagacccacttttattggcagaccaggraagccaccaaaagagatgtcatttgaaggcatcctggaagggtccgcctaccaaaaatgttctcttcgtcctgttacggtgtcatacttccaccttagggaggtggcttgtggaggggaagagcactggaagagtcaggtagtgacttaaggcccggagttgtcactatttgctgtgagaccttaggtcactttcatctcagagtacatagttcagcaaaagaacatggcttgggggtcgggagacctgggtttgaatccctgctctgccacacttactgtgcagacttgcacagatgagttagataacctctctgagcctcatcacttaaaacatggcaataatctttccctctttgggatattggggaatttaatgagatcatatctctagctccaagcttgatacatt

SEQ ID NO: 75922 - DNA, 699 bp, Homo sapiens
tgcatcttagagagtcaataagttactgtcacggtagcatgaccttgattctccaagagtgccagaacctatgaaattaacctgtggtctcagttgtacttgtttacagaaacaaaagccgggctggatgccagtagccacaaacaagccacgagataaaaactcagcttggcagtgctactcagacagacctgaatcctcacttccttatcatattaaaatctctgcccagtggggagagatgccctttgctaggcacatatagtaagtgcccagtgcaaaagaaagaacaagactgcacacattctagttttctctggaaagtcccacctctttccaggaattcgcatccttagtctccaccttcatgctctaagagaccttaaaaatcccccttctgcacacacctggggaaaaggtgaatgggaagctcaccttctctactctttgaacaacaaataaagtttctgctctgcttaacagaacctcccgtctttttactgtctcaatggcacaggcaagtaaagggaaccatggggtaaaacaaccccttttaagggcagaacattaccctgcaaatctgaattgggggggatcagttaatgtaagaggaaaattaatactttttcactttactgggamtaagaaaaaactagtgcttttgttgaaaaaacacaatcttattcaatagcttgaggg

SEQ ID NO: 75923 - DNA, 687 bp, Homo sapiens
tggccaacatggtgaaagtttgtctttacttaaaaaaaaatacaaaaattagccaggagtggtggcatgttcctgtaatcccagctattcaggaggctgaggcacgagaattgcttaaacctgggaggcagaggttgcaatgagctgagactgcactactgccctccagcctgggtgacagagtgagacactgtctcaaaaaaaaaaaaaaaaaaagaaaagaaaagagaaaagtgcttatcacttagccaaattcttgctaagggaatgtaaatataattgtaccttcttcagggaattcaacatcaaggtacactggcttaactgcagtgactcactcgtttttcaatgtggaggtaatattcatagaaaaatcaatattccatgtggagaaaatgtatttttcctgtggatgtattaatgattaattgggttggagtaaactttactttctgcagctctagtatttatttgtcaaatgaagatccaatttgacmaacagctcttacaaatggtccatcagattggtaagatagattattctatagctccaatccctcccaaataaagtcattgattatctgtgtataatcaactggggaagacccgcaccgcaagaggacagagtatgtgatgtaactgaaatgattcacacccctgttaatgtgtcatagaccgtaggatccc

SEQ ID NO: 75924 - DNA, 2809 bp, Homo sapiens
tctaattaggtctactctgtcttaacgttttgttcacttgccatcataattaatgttctgccttgccatcataattaatggagaacaggaagaaagccttcacattaagcttatatattttcttttttctcttttttttttttgagacggagtctctctctgtcgcccaggctggagtgcagtggcgcaatcttggctcactgcaagctccgcctcccgggttcacgccattctcctgccccagcctcccgagtagctgggactacagtaggcgccgccacaatgcccagctaattttttggtatttttagtagaaacagggtttcatcgtgttagccaggatggtctggatctcctgacctcgtgatccgcccgcctcggcctcccaaagtgctgggattacaggcgtgagccaccgcgtccagcaagcccatatgttttcttagtgtctcccaggcagcaacgagacttctctattgtggcccttacggagccttatagttactttgtaatttcctgggaggcttgtgtgcgtaggtaggcagctgtaatgttagagtgcaggaatgacaaattttttgtgagtcccctccatggggggagtctagtgagaggagacttggggctctgtctttaacatttgggggagtgttctgggataccattttctaaaactctggcccgcgttgactgtacgaaataatgttttcttcagtgaaagtactttcaaatattatttctaaaggaaacttttctcccaaatgtgactgaaaatatgtgaatgcctgcctataaggaaataaagttttgagcaccaaaaagtgaactattacatccttctaaagtgaagccaagacacagtggaaatcagtttctcttaatcattcatcagccttggggttttttggttgttgtttttttggggtttttttttttgttctactagacttactttcctcgtgaaaagtgtgcttattttcattttatacatttctctacttggtgccttttggtgtctaccccttcccccgtcggggaaaaatcaaaagctcattgaaggctgaggtcagtgaagctgagtcctcagatgcctttggcacctcccatccacattttgttctctgccctgccccacctttgagtgtcctgtggagaggactggaggtcacttcctgaagcttgtcagaaaggcgccttccttctcctcgcaggagtctctaaaggatgtttaagggacaaaagttttccacaccctggggtggtagcatttcccaggctggcagcactttaggaagccacggaagaagagacttcagaagtgaaatggcctgtggcccatgcacggtgctgccccacagccacgctgtgyccctcctcacactcaagtgacaaaatagaagatgctgaaactgaagtgatttttacctcctgattctggagaaaccataaactcataagggatccaatctccatacagttctctttttcaaattgtatagcacagaaagggcattttatgtaatgcttggacatctgtaaaagtcattttcatgggaagttccagaacttggcaaaggcagcctggaaaaccagtgccttttcccgactgaggggcggctgagatgcagagaggttcagtgaccagtccaagatcacatgtgagttgactggaacctcagaccccttccagtcaacatgtctaaacaaaatgaaggtcttaagttgtttgtaggaacctgaatcacaatttgaccattagattaatttctgttcattcattagtgttcatttagggggctgggtgtcccaagcaatactggtgaaaataattccttagctcacctagaacacagcaaatcttacttttttctcacactttttggcacaaaactgagaacgtctagttgaatagtgtttcctctttgaggtttgacatagaaatggctggaggtggcttatactcctaacaagtacctgccatattttcattgtcattggtctttgataagggaacttgatatttcattcattttcttttttctgttagaatggacgaaaatatgggtgagcagtttttttaatagacgttcctgctatcacctttatttctaatttaaggttttacagtgttgcaatttgcacactattttattttctcctgtgctatcgcagaactataaagcaaaagccaatgttgcgggagatgcccctcgtagaataagctttgctaacatatgtaaaagaaagagtttatttgtatgccaacttttaataatagagacagggttactctaggtttgtaaccagatattttgccttgaataataagtttaaagagggaatggattatataatcttaaaacacgtgcttcattttaccaaaaaaaaatgagactcagaaaaataaggacctttaaaactgtattaattagatacttttctttcttgaaattcttaatctatgcagttatcatcttcaaaggacttcgtactttatgagctattccaaattactgttgttagtgcatagtttgaactgcataaatatttgacgtggaatactagaaatacgtacacgtgtgtgtgtgtgtgtgtgtgtgtgtgtgtgtatggatagagagatatgtgtgtccctgtagcagcgatttatttttatcctgccccaggttgaaatgaaacagaaagatgtgatgattcagtatccatttccttcttagtttattttgatttcagtttgacctctttttgctgggtaataagtgccaatttttgattatttgggagatattttctgttcctggaaataact

SEQ ID NO: 75925 - DNA, 2809 bp, Homo sapiens
tctaattaggtctactctgtcttaacgttttgttcacttgccatcataattaatgttctgccttgccatcataattaatggagaacaggaagaaagccttcacattaagcttatatattttcttttttctcttttttttttttgagacggagtctctctctgtcgcccaggctggagtgcagtggcgcaatcttggctcactgcaagctccgcctcccgggttcacgccattctcctgccccagcctcccgagtagctgggactacagtaggcgccgccacaatgcccagctaattttttggtatttttagtagaaacagggtttcatcgtgttagccaggatggtctggatctcctgacctcgtgatccgcccgcctcggcctcccaaagtgctgggattacaggcgtgagccaccgcgtccagcaagcccatatgttttcttagtgtctcccaggcagcaacgagacttctctattgtggcccttacggagccttatagttactttgtaatttcctgggaggcttgtgtgcgtaggtaggcagctgtaatgttagagtgcaggaatgacaaattttttgtgagtcccctccatggggggagtctagtgagaggagacttggggctctgtctttaacatttgggggagtgttctgggataccattttctaaaactctggcccgcgttgactgtacgaaataatgttttcttcagtgaaagtactttcaaatattatttctaaaggaaacttttctcccaaatgtgactgaaaatatgtgaatgcctgcctataaggaaataaagttttgagcaccaaaaagtgaactattacatccttctaaagtgaagccaagacacagtggaaatcagtttctcttaatcattcatcagccttggggttttttggttgttgtttttttggggtttttttttttgttctactagacttactttcctcgtgaaaagtgtgcttattttcattttatacatttctctacttggtgccttttggtgtctaccccttcccccgtcggggaaaaatcaaaagctcattgaaggctgaggtcagtgaagctgagtcctcagatgcctttggcacctcccatccacattttgttctctgccctgccccacctttgagtgtcctgtggagaggactggaggtcacttcctgaagcttgtcagaaaggcgccttccttctcctcgcaggagtctctaaaggatgtttaagggacaaaagttttccacaccctggggtggtagcatttcccaggctggcagcactttaggaagccacggaagaagagacttcagaagtgaaatggcctgtggcccatgcacggtgctgccccacagccacgctgtgtccctcctcacactcaagtgacaaaatagaagatgctgaaactgaagtgatttttacctcctgattctggagaaaccataaactcataagggatccaatctccatacagttctctttttcaaattgtatagcacagaaagggcattttatgtaatgcttggacatctgtaaaagtcattttcatgggaagttccagaacttggcaaaggcagcctggaaaaccagtgccttttcccgactgaggggcggctgagatgcagagaggttcagtgaccagtccaagatcacatgtgagttgactggaacctcagaccccttccagtcaacatgtctaaacaaaatgaaggtcttaagttgtttgtaggaacctgaatcacaatttgaccattagattaatttctgttcattcattagtgttcatttagggggctgggtgtcccaagcaatactggtgaaaataattccttagctcacctagaacacagcaaatcttacttttttctcacactttttggcacaaaactgagaacgtctagttgaatagtgtttcctctttgaggtttgacatagaaatggctggaggtggcttatactcctaacaagtacctgccatattttcattgtcattggtctttgataagggaacttgatatttcattcattttcttttttctgttagaatggacgaaaatatgggtgagcagtttttttaatagacgttcctgctatcacctttatttctaatttaaggttttacagtgttgcaatttgcacactattttattttctcctgtgctatcgcagaactataaagcaaaagccaatgttgcgggagatgcccctcgtagaataagctttgctaacatatgtaaaagaaagagtttatttgtatgccaacttttaataatagagacagggttactctaggtttgtaaccagatattttgccttgaataataagtttaaagagggaatggattatataatcttaaaacacgtgcttcattttaccaaaaaaaaatgagactcagaaaaataaggacctttaaaactgtattaattagatacttttctttcttgaaattcttaatctatgcagttatcatcttcaaaggacttcgtactttatgagctattccaaattactgttgttagtgcatagtttgaactgcataaatatttgacgtggaatactagaaatacgtacacgtgtgtgtgtgtgtgtgtgtgtgtgtgtgtgtatggatagagagatatgtgtgtccctgtagcagcgatttatttttatcctgccccaggttgaaatgaaayagaaagatgtgatgattcagtatccatttccttcttagtttattttgatttcagtttgacctctttttgctgggtaataagtgccaatttttgattatttgggagatattttctgttcctggaaataact

SEQ ID NO: 75926 - DNA, 2809 bp, Homo sapiens
tctaattaggtctactctgtcttaacgttttgttcacttgccatcataattaatgttctgccttgccatcataattaatggagaacaggaagaaagccttcacattaagcttatatattttcttttttctcttttttttttttgagacggagtctctctctgtcgcccaggctggagtgcagtggcgcaatcttggctcactgcaagctccgcctcccgggttcacgccattctcctgccccagcctcccgagtagctgggactacagtaggcgccgccacaatgcccagctaattttttggtatttttagtagaaacagggtttcatcgtgttagccaggatggtctggatctcctgacctcgtgatccgcccgcctcggcctcccaaagtgctgggattacaggcgtgagccaccgcgtccagcaagcccatatgttttcttagtgtctcccaggcagcaacgagacttctctattgtggcccttacggagccttatagttactttgtaatttcctgggaggcttgtgtgcgtaggtaggcagctgtaatgttagagtgcaggaatgacaaattttttgtgagtcccctccatggggggagtctagtgagaggagacttggggctctgtctttaacatttgggggagtgttctgggataccattttctaaaactctggcccgcgttgactgtacgaaataatgttttcttcagtgaaagtactttcaaatattatttctaaaggaaacttttctcccaaatgtgactgaaaatatgtgaatgcctgcctataaggaaataaagttttgagcaccaaaaagtgaactattacatccttctaaagtgaagccaagacacagtggaaatcagtttctcttaatcattcatcagccttggggttttttggttgttgtttttttggggtttttttttttgttctactagacttactttcctcgtgaaaagtgtgcttattttcattttatacatttctctacttggtgccttttggtgtctaccccttcccccgtcggggaaaaatcaaaagctcattgaaggctgaggtcagtgaagctgagtcctcagatgcctttggcacctcccatccacattttgttctctgccctgccccacctttgagtgtcctgtggagaggactggaggtcacttcctgaagcttgtcagaaaggcgccttccttctcctcgcaggagtctctaaaggatgtttaagggacaaaagttttccacaccctggggtggtagcatttcccaggctggcagcactttaggaagccacggaagaagagacttcagaagtgaaatggcctgtggcccatgcacggtgctgccccacagccacgctgtgtccctcctcacactcaagtgacaaaatagaagatgctgaaactgaagtgatttttacctcctgattctggagaaaccataaactcataagggatccaatctccatacagttctctttttcaaattgtatagcacagaaagggcattttatgtaatgcttggacatctgtaaaagtcattttcatgggaagttccagaacttggcaaaggcagcctggaaaaccagtgccttttcccgactgaggggcggctgagatgcagagaggttcagtgaccagtccaagatcacatgtgagttgactggaacctcagaccccttccagtcaacatgtctaaacaaaatgaaggtcttaagttgtttgtaggaacctgaatcacaatttgaccattagattaatttctgttcattcattagtgttcatttagggggctgggtgtcccaagcaatactggtgaaaataattccttagctcacctagaacacagcaaatcttacttttttctcacactttttggcacaaaactgagaacgtctagttgaatagtgtttcctctttgaggtttgacatagaaatggctggaggtggcttatactcctaacaagtacctgccatattttcattgtcattggtctttgataagggaacttgatatttcattcattttcttttttctgttagaatggacgaaaatatgggtgagcagtttttttaatagacgttcctgctatcacctttatttctaatttaaggttttacagtgttgcaatttgcacactattttattttctcctgtgctatcgcagaactataaagcaaaagccaatgttgcgggagatgcccctcgtagaataagctttgctaacatatgtaaaagaaagagtttatttgtatgccaacttttaataatagagacagggttactctaggtttgtaaccagatattttgccttgaataataagtttaaagagggaatggattatataatcttaaaacacgtgcttcattttaccaaaaaaaaatgagactcagaaaaataaggacctttaaaactgtattaattagatacttttctttcttgaaattcttaatctatgcagttatcatcttcaaaggacttcgtactttatgagctattccaaattactgttgttagtgcatagtttgaactgcataaatatttgacgtggaatactagaaatacgtacacgtgtgtgtgtgtgtgtgtgtgtgtgtgtgtgtatggatagagagatatgtgtgtccctgtagcagcgatttatttttatcctgccccaggttgaaatgaaacagaaagatgtgatgattcagtatccatttccttcttagyttattttgatttcagtttgacctctttttgctgggtaataagtgccaatttttgattatttgggagatattttctgttcctggaaataact

SEQ ID NO: 75927 - DNA, 1182 bp, Homo sapiens
tcagaggctgaagtgggaggattgcttgagcccagggattcaaggcttcagtgagccatgactgctattgcactccagcctggatgacagaggagacactgccttaaaaaaaattctcagccgggcgtggtggctcacacctgcaatcccagcgctttgggaggccgaggcgggcggatcacctgaggtcaggagtttgagaccaggctggccaacatgatgaaaccctgtctctactaaaaaatacaagaattagctgggtgtggtggcaggcgccttaatcccagctacttgggaggcagaggcaggataatcgtttaaacctgggaggcggaggttgcagtgagccaagatcaagccattgcactcaaacctgggggacaagagcgagacttctctcaaaaaaaaaaaatctctatatctatctatctatctrtctgtctgtctgtctgtctctctctctgtctgtctatttgtgtttctgtctatctgtgtgtcaaacaaaaaaacccaaggtagtgttcatggtccaatgtagaatgatcatattcatccagtcaaggcagtagggctggtagttgggtcatatgcctgatatcttccccttgttttctctcatcttcctgatgttccctttgaaggtcctcttggcattaattttaacgggatcttatctatatgagcatatcaacatggaaccatgttggcatgggatgtggtgtgtgaattggtacaaaaacttcacccctctggaggtagcaaggcatagccagtgcagacattgatacttttacatcaggagaaagctctttcctctgtcataattatattttacttctgagacttctccttcagagctttcacaaatgctctacccagacactgtcaatggcattgtactaaaattgtttgtcagctctggcaattcagtggaattgccttaaactatattagtgaaaatggagttgtgatggttatgaaatggaatctgaattagcagagattgtgaatctccattttccattttctggaggcttttgctgcattttgtgtgtgggagttgaagtacctttgtagccccggatatcagtgaagaaattgtcatctgaatatggtaagttgcagaatggatatggatggctttatgactggtttctgattggtttctctttctactagggt

SEQ ID NO: 75928 - DNA, 1182 bp, Homo sapiens
tcagaggctgaagtgggaggattgcttgagcccagggattcaaggcttcagtgagccatgactgctattgcactccagcctggatgacagaggagacactgccttaaaaaaaattctcagccgggcgtggtggctcacacctgcaatcccagcgctttgggaggccgaggcgggcggatcacctgaggtcaggagtttgagaccaggctggccaacatgatgaaaccctgtctctactaaaaaatacaagaattagctgggtgtggtggcaggcgccttaatcccagctacttgggaggcagaggcaggataatcgtttaaacctgggaggcggaggttgcagtgagccaagatcaagccattgcactcaaacctgggggacaagagcgagacttctctcaaaaaaaaaaaatctctatatctatctatctatctgtctgtctgtctgtctgtctstctctctgtctgtctatttgtgtttctgtctatctgtgtgtcaaacaaaaaaacccaaggtagtgttcatggtccaatgtagaatgatcatattcatccagtcaaggcagtagggctggtagttgggtcatatgcctgatatcttccccttgttttctctcatcttcctgatgttccctttgaaggtcctcttggcattaattttaacgggatcttatctatatgagcatatcaacatggaaccatgttggcatgggatgtggtgtgtgaattggtacaaaaacttcacccctctggaggtagcaaggcatagccagtgcagacattgatacttttacatcaggagaaagctctttcctctgtcataattatattttacttctgagacttctccttcagagctttcacaaatgctctacccagacactgtcaatggcattgtactaaaattgtttgtcagctctggcaattcagtggaattgccttaaactatattagtgaaaatggagttgtgatggttatgaaatggaatctgaattagcagagattgtgaatctccattttccattttctggaggcttttgctgcattttgtgtgtgggagttgaagtacctttgtagccccggatatcagtgaagaaattgtcatctgaatatggtaagttgcagaatggatatggatggctttatgactggtttctgattggtttctctttctactagggt

SEQ ID NO: 75929 - DNA, 1182 bp, Homo sapiens
tcagaggctgaagtgggaggattgcttgagcccagggattcaaggcttcagtgagccatgactgctattgcactccagcctggatgacagaggagacactgccttaaaaaaaattctcagccgggcgtggtggctcacacctgcaatcccagcgctttgggaggccgaggcgggcggatcacctgaggtcaggagtttgagaccaggctggccaacatgatgaaaccctgtctctactaaaaaatacaagaattagctgggtgtggtggcaggcgccttaatcccagctacttgggaggcagaggcaggataatcgtttaaacctgggaggcggaggttgcagtgagccaagatcaagccattgcactcaaacctgggggacaagagcgagacttctctcaaaaaaaaaaaatctctatatctatctatctatctgtctgtctgtctgtctgtctctctctctgtctgtctatttgtgtttctgtctatctgtgtgtcaaacaaaaaaacccaaggtagtgttcatggtccaatgtagaatgatcatattcatccagtcaaggcagtagggctggtagttgggtcatatgcctgatatcttcccctkgttttctctcatcttcctgatgttccctttgaaggtcctcttggcattaattttaacgggatcttatctatatgagcatatcaacatggaaccatgttggcatgggatgtggtgtgtgaattggtacaaaaacttcacccctctggaggtagcaaggcatagccagtgcagacattgatacttttacatcaggagaaagctctttcctctgtcataattatattttacttctgagacttctccttcagagctttcacaaatgctctacccagacactgtcaatggcattgtactaaaattgtttgtcagctctggcaattcagtggaattgccttaaactatattagtgaaaatggagttgtgatggttatgaaatggaatctgaattagcagagattgtgaatctccattttccattttctggaggcttttgctgcattttgtgtgtgggagttgaagtacctttgtagccccggatatcagtgaagaaattgtcatctgaatatggtaagttgcagaatggatatggatggctttatgactggtttctgattggtttctctttctactagggt

SEQ ID NO: 75930 - DNA, 749 bp, Homo sapiens
tgttttgaaagaagagtctttttggattgctataggttttatatttatggataacwattaatgaaatagtaataactatttatttatttttattttattttattttttgagatggagtatcactctgtcaccaggctggggtacagtggtgcaatcttggattactgcaacctctgcctcccgggttcaagcaattctcgtgccgcagcctcccaagtggctgggactagaggcacgcacctccatgcccagataatttttttttggtatttttagtagagatggggttttacttggttggccaggatggtctcgatctcctgacctcatgatccacccaccttggcctgcgaaagtgctgggattacaggcgtgagccaccatgcccggccagtattaactatttataaggaaatctatgactttggactgggaaaatatttaacaggcagatcagtacaaaatagagccctgattacctggcacagtccacctcttcctgccatcccaaacctgttcacctcttcataattcccatcataggagatggcatcatcagccacccagttgttcttatcaaaaacctgggagtcataattgattcccccttgcttttatctcctgtacccaaatccagcagcaaattgtgttttctctgcctccagggtagatcttatttatgttcacttcttgctgtcagcagtgccacgtccttggcacaagtcataccatcatctctcatattggtg

SEQ ID NO: 75931 - DNA, 527 bp, Homo sapiens
tgcaaaaatattgtaaatgagaatcatctcagttcatttattcaagtgtgtttaaaatgatatatttggagatctgtactttctgagctctgtagtagacatttctttaaggaaattaaaaataaaatgtcaaattcaggacaaaacaatctagaattttagttatgtaaatgagtgagataaatagtactgttctagcacctctctctctcaaaggtcctttttagaatgctgcattccagtaggcacttctcttcaacatcttggcaggtgcatttgtaggtataagcgaacacattgcattgcattgcattgcattgcctggcatcgtttgcagtggagaaatatttgaccgaattgcttttctctaatttaaccagtgttatttcagtagagmagattgcaggcaggtcacagaacagctaggagcagggctctgaagacagacttgggtttgaatgctgtctttgcaatgtatataagctgcgtaacttcgggcaatttagtcaatctctctaagtctcaga

SEQ ID NO: 75932 - DNA, 1529 bp, Homo sapiens
gagccactgtccccagactattagtatagtctttgaactcactaagatgataccagttcttccagaaaaattctgttatttttataggcagaaattaaacaactatcagtaagtttaatatttttttcttaaaattatattttataagattttagtatctagtttttagactagcagtcttttagctgagcactatttgagtgtttgttttgttgtgtgtgagaggtcagagtgcctagagtggaagggaggacagttgggtacctttaattagcaaacacttgtatagtgcttcctatatgctgggcactattcttagcactaccacaaatataagtcttcatcataaaaacccaacaaagtagatactctcattatctctattttaccagtgagaaaactgaggcagagaggagttaggaaatccacagcaaggacaggcagctaataaataacagagctcatatttgaagtgagagtctggccccaaagtctatctaaattgctaatctgtgctgcattatatagcaaaaacatgcatgttaattcacaatgttattgttaaaatagaacatgaagttcatttgcattttactcaaaaaagtatgtttcttgtatatgtcctcaatctgccaaattaaatgtctttatgaatttctttaaagttttgggctttatgtgaggagctctgttagttttgactgaggcccttgctgaaacagtttgaccaatttctataggagagtgtagtgggctccctatgtcaaaagctggaatgactgctgatcttgatgtgttatccttgaacacacaaagtatctgttttctggctaaaaacagtttctaagacttcattacttctatcagctaattttatttcagtagtagctaattttatttcagggctaattttagacaggtacattgtgtgygtgtgtgtacacattcatatacataaacacacacacatatatataaaacaatatctatatatatattgttttagatttgctttgtcacccaggctggaatgcagtggctcaaccacagctcactgtagcctcaaacttctgtgctcaagcagtcctctcacctcaacctcctgagtagctggaactacaggtgtgtgccaccacatctggctattttttgttgttgttgttaaaattttgtaggaatggaggactcactgtgttgcctaggatggtctagaacttctgaactcaagcaattgttttgccctggccttccaaagtactgggattacaggcatgagctaccatgctgggcccagatacataatatttttgacctttcatgacagtttatttgaaaactttgaagctgagtggagaataacaaagttgtgatgagatacaattgctgcaaacagcctcctggggtccattattagattagtgtctggtctacaaagcagtctctccatcctctaattcaaagccttccctccataaaatttcagatttttcacattatctttcacagaagccagaggattgtcacaatta

SEQ ID NO: 75933 - DNA, 1529 bp, Homo sapiens
gagccactgtccccagactattagtatagtctttgaactcactaagatgataccagttcttccagaaaaattctgttatttttataggcagaaattaaacaactatcagtaagtttaatatttttttcttaaaattatattttataagattttagtatctagtttttagactagcagtcttttagctgagcactatttgagtgtttgttttgttgtgtgtgagaggtcagagtgcctagagtggaagggaggacagttgggtacctttaattagcaaacacttgtatagtgcttcctatatgctgggcactattcttagcactaccacaaatataagtcttcatcataaaaacccaacaaagtagatactctcattatctctattttaccagtgagaaaactgaggcagagaggagttaggaaatccacagcaaggacaggcagctaataaataacagagctcatatttgaagtgagagtctggccccaaagtctatctaaattgctaatctgtgctgcattatatagcaaaaacatgcatgttaattcacaatgttattgttaaaatagaacatgaagttcatttgcattttactcaaaaaagtatgtttcttgtatatgtcctcaatctgccaaattaaatgtctttatgaatttctttaaagttttgggctttatgtgaggagctctgttagttttgactgaggcccttgctgaaacagtttgaccaatttctataggagagtgtagtgggctccctatgtcaaaagctggaatgactgctgatcttgatgtgttatccttgaacacacaaagtatctgttttctggctaaaaacagtttctaagacttcattacttctatcagctaattttatttcagtagtagctaattttatttcagggctaattttagacaggtacattgtgtgcgtgtgtgtacacattcatatacataaacacacacacatatatataaaacaatatctatatatatattgttttagatttgctttgtcacccaggctggaatgcagtggctcaaccacagctcactgtagcctcaaacttctgtgctcaagcagtcctctcacctcaacctcctgagtagctggaactacaggtgtgtgccaccacatctggctattttttgttgttgttgttaaaattttgtaggaatggaggactcactgtgttgcctaggatggtctagaacttctgaactcaagcaattgttttgccctggccttccaaagtactgggattacaggcatgagctaccatgctgggcccagatacataatatttttgacctttcatgacagtttatttgaaaactttgaagckgagtggagaataacaaagttgtgatgagatacaattgctgcaaacagcctcctggggtccattattagattagtgtctggtctacaaagcagtctctccatcctctaattcaaagccttccctccataaaatttcagatttttcacattatctttcacagaagccagaggattgtcacaatta

SEQ ID NO: 75934 - DNA, 630 bp, Homo sapiens
cagtgcataactaatgctaactatcactagttatcactagttaaaattacacaagaggctgctacagtggagagaggctagggctcagacacaattcatgatcagagtagccagggaaggtctggctgatatgactcttgagtggtgagtgtgctcagtcaccacagggacttgggtccactctggagagaagacactgcaggagaaaggaatggcttgggaaaggccttgtggtgctcaggctctgaggaagaaacatcatttgacctcatcatggactgtcccagttggcatgaactttaaagatttcttcacacactcctcaaatgtttattttattttttcttcccagaatccaaccaatgttttgtgaattttaaaygtcacgaaaaatattttagggtgttagctggggatacatgatacctgaacagtacagcatcctgtgaatttttgctgagtgaatgaatgatgaacttttattttactttccactttccttgttagccactgtgccttatgtacgtgaggaattttaaaacttcttgcaggaaaccacatctctcaagcctccatttaacaattactttcccccttggtacccagtctactcaataaaacggaaataaa

SEQ ID NO: 75935 - DNA, 958 bp, Homo sapiens
catctttcctatgtacacttgttttcttcagatgggaggtgggaggactgcagccaggtggggagcagccaggggtggggggatagggatcagaattttctgaggacttcagacttggcccttgccttctacccaggcgggccagtctctatgcaaagcagtgcctttgactggaggagggcacagatacacttggtagggcaagctgtgggtgaggagggatttagccctatatttggcttgatttgagggctgtgacctgggcgtatgagcatcaatagattaaaggtggtgacaggtctggcactgttttggttgtggttatgtttcactgcttaaccaaccactttaaaacatagtggcagaaaacagttaccgttgtatttatacccatgggcttggtggatcaggaatttgagacggggatggctcttctttgtttcgtgatgcctgggaccacacccaggttagagcatccacttgcagggggcttcttcactggcaggtctggaccttgaggacagactcaggcttggctgttagagtgcccacaggcaacctgtctggcctcacgtggtcagacttcacgcatggtggttcagggctctgagaccaagtgtctcagcaaatgtggcagaagcactggcggccatctgtgaccatctaaaggcatcatatagtgtatcttttgctcttcmctgtggtccaagcagctcaagacccccagacttaaaagaaggacacagagacacttctgtccccccatgcaaggtgtgccagataatttttggataggttttaaaagtgtcactttggagtatccctttgggtataaaggctccatgtagctttgctgcaagcacttggcagagaaactgtttttcaacttagatgaagcttttcgatacagctcacatgttcagaaaagcttgagaggaacagcaaacagtccagcatt

SEQ ID NO: 75936 - DNA, 1229 bp, Homo sapiens
ccaggctgaactcccactgaaggcagagacctcaactttggatttctgtatccctggttcctggtaaggggatttgtaggcactcaagaagtccagctgtcgcaagagtgaatgcctgtgaccagaggggagtgaaatgggcatcaggcagcgcacccgtggtggctcccgcagcaggggggtcgcaccccaccgcctgttgctaggagatgatggacttcggaaggatgtgcagtgttgcatagcaacacctccccactgttccatcactcagaatggacagcaccaagcaattcttacagcaagaatcttttgatctatttcagccaaaagcaggaaagatctttctgtctcagctcagattacataattttttaaaggaccacaagagcaaaaaatatggaggatccccaatattcacacccaagaactactttgttagcaggttaactgtgtatcagagggacattaggaggattgccaagagctcacagcctgccttctggggacgctgggaagcctccctgcagggacccttcacttagctgtagccagctatccactgggcttggagtgcttcccacacccctcctgcatgctggcttggccctaccagggatcgcaaagcccagctggtcaccaaggacagaggtgctctctcgacgtggctgatgtttttctaaccagcttagcccagaaagaacatttggattcatttcccatctgtaacgcagagaaccttcatatgaacttaagttccttgagatatttgcactgaaataggcacgtatgaatttaagagtcataaatgggcccaatttccctgaactgtgccctagaatgcgcagtgcatgctstgtgactgtttttcctttccttctggtaactactagcttccacatgggagagggttcacagggggtggggtgtccaggctgcacgagtggctgaagaagagctccctgctagtctctgtgagtacagggaaggccctatgtggccgtagagcccttggaagctcagcctgctgagagcggtgctcaccaggttccactgaagctgaacagcactggagctaggaatgcaggaaggaggcgctgcccacaccctgagctctcagtctggctgggaagccggcagtagctgtgtcctataaaggcacctcgaacactggacaacactgtagctcatgcttgaatgaaggttctctaacaagtgtgtttcctccg

SEQ ID NO: 75937 - DNA, 677 bp, Homo sapiens
tagtgcaaagaaatgacaagctctttatggttttaagaaactttgaagaacttctccattccttacactgatttaattgatgtttggtgaatgaaaggttgatattgtgatataataagaaatatgtatttggtctttgtccccatttccaggaacagagctcctaaaacccttagaatggaatttcctgagtgataaagtttagaggaatatcttttattattcataataagcctctttcaaacatctggagctgctaatgctaatgagctgactcttggaggatgggggctggttgccccagcatcccgctggtgatgagaggttgggaactttcagccctatcccctggtcctccaaggaggggaggaggattggagactgacttaatcacctgtggtcaatgatctaatcaatcrtccctatgtaatgaagctgccataaaaaaccacaaacaaagggtgtttgggaatttccaggttgatgaccacattgaggtgctgggaggttgttgtacccagagagggcctggaagctttgcagtgcccacccctcacccttgccgtgtccatctcttccattcggctgttcctcagttgtattccttgtaatgaaccaccaatagtaagtaaagtgatttcttgagttctataagtcatcctagcaaattatggaac

SEQ ID NO: 75938 - DNA, 677 bp, Homo sapiens
tagtgcaaagaaatgacaagctctttatggttttaagaaactttgaagaacttctccattccttacactgatttaattgatgtttggtgaatgaaaggttgatattgtgatataataagaaatatgtatttggtctttgtccccatttccaggaacagagctcctaaaacccttagaatggaatttcctgagtgataaagtttagaggaatatcttttattattcataataagcctctttcaaacatctggagctgctaatgctaatgagctgactcttggaggatgggggctggttgccccagcatcccgctggtgatgagaggttgggaactttcagccctatcccctggtcctccaaggaggggaggaggattggagactgacttaatcacctgtggtcaatgatctaatcaatcgtccctatgtaatgaagctgccataaaaaaccacaaacaaagggtgtttgrgaatttccaggttgatgaccacattgaggtgctgggaggttgttgtacccagagagggcctggaagctttgcagtgcccacccctcacccttgccgtgtccatctcttccattcggctgttcctcagttgtattccttgtaatgaaccaccaatagtaagtaaagtgatttcttgagttctataagtcatcctagcaaattatggaac

SEQ ID NO: 75939 - DNA, 1161 bp, Homo sapiens
attgctttgctgattctatgaaatttattctataatgatcaaagagattctgatcaaggaatctggctaatatatgacacaaatcacattatactactatttctactaagcctgtgttttcataccatgtcaagagtcagatctgtaagagtctcctgatagaccagatttcaatttcaactgctataaaattgagtgctttttagtttggtttttcccttacttatttttcaataacttaatacacttttagatgaactggcatacattctgtcctgctgtgacatacatccacttaatatgttacacagaaatatcgtaagatcagttgtaatatggcatctagcttgaccaaaaaagagcttcaattatattcaagtgaaactttacattttatactgatctcactttacttttaatcttttaaatgaagtgaattagttataaaaggtaactaaattcattattaaataatcttataattatttatttgaaattcagaaaacatctgttaggtcaattatttgggctttattagagtttacatgtaacacttattttttcctgcttaacagaaattagamaagagcatctttagctgttttggaagaaactccttgtccacaatgataaaactgcgttctcagcatacaaatgcttgcctattttaaattaactggtatatgtcacagcaggacagaatgtatctcagttcatctaaaagctgtatcaagttcttaagaaataagtagatgaaaagtcaaactaaaatgtactctattttatatcacttgagattgaaatctgatctgtcaggagattcatctagatagttctgacacttgcagcagtacgaaaatataggctctagaaatagtagtataatgtgatttgtgttaagcttatgaaatatggtccatagaatattaaaatatgatggtagataaatgattattgtgaagcttcttaaattattctttgctgatttctcagtgagatgactgaaagtagccagtggagtattgtgtctaagaattagtagcacaaagaatcagtggtagagctgagatagcctgtatatccattatcctgtaacaatcactacatttacactgctgtaactgtacataatgtaacatgagcaattttactgtacttaat

SEQ ID NO: 75940 - DNA, 400 bp, Homo sapiens
cttggctaaatttttttttttttttttaagagatgatgggctcactatgttgcttaagctggtcttgaactcctgggctcaaataatccttctgtctgggcctcccaaagtgctaggattacaggtgtgagcccaccatatcctgccctggagggtttttttcttttctttttcttttttttttttcctctggtaaactgggatccacagctagaaccaccctctagaagaagggaggtgatgacttcccttctttcaactatttgctcagcttgggcctcaaattctcacttttcaagtgcatctcatgagccctaacagacaggaacccctttgtttcccagatctcaagtcccttctcctggcagtcatacaactggacttggaaagaaggcarata

SEQ ID NO: 75941 - DNA, 1444 bp, Homo sapiens
taagggcaaattggctctctgttcaatccacacttcaggcgatggcttccctctctgcttttctatttaccttccagcatctaaaattaagtttcctgtcactgatgtcttctctatcaatccctgtgaccttgttggtttatatattatatttctttaacagagtcttaggaaggagagtacakaaccctccacgtctaacgctttacctttaataaaaagacagactgagttaagtcatatttttaaaatacagtcattatatgattccttttataggaaatatccagaataggcaaatcatagagacagacaatagattagtggttagcaggggcagcggggaggatggaatgagtagtgactgctcaatggctatggggcttcctttcagggtgacagaaacattctggattaaatagaggtgacagtgtgaatgtacttaacgccactaaattatacatttttaaattgttaaaatggaagttttatattacatgtattttaccacaataaaaaaaatacatagtaaaaaatatacagtgaccatggagagcttacaaaagattttcacaaacagtatattcaggttatgctgccattagagtcctgttgttctgtaattggtggtaatatcctttaccatggaaatttaaaaataccagccttccccatttagatttttaaaaatcaactcatatttggatactcccagttgttgttgttgaaacagtggtcttactctgtcacccaggctggagtgcaatggctcaatcacagctcactgcatccttgacctcctggactcaagcaatcctcctgcctcagcctccgaagaagctgggaccacagtcatacaccaccctgtccagcttatttatttatttatttagtagagatagtgtctccccatgtttcccaggctggtcttgaacttctgggctcagtcgatcctcctatcttagcctcccaaactgttgcgattacaggcatgagccaccacacaagtcctattcccaattttgacttttcctccacaattatttaatttctgacacctgatgtctcttagctatcctaaaaccaaataaaagatgttctcttatttactgtaagaatagatatatagaattatttcaagtgtaaaatatcagtatctcttgtcattccacaaagagcccaagccacccctaaattttctctctttcatttgcttagaaagtataatactcagctgttaatcaaatgaacaaataaaatagcagctttttatgaagagttattgtaaaactacgaactatttcattaactaaatcagaaaatgcaaatagcaacttagctattgagcagccttgggtgtttggaagaaacaggcccacacatctgggaagtgataattcactgaacaaaggtggccagatttccctgacctcatcaaccccag

SEQ ID NO: 75942 - DNA, 1444 bp, Homo sapiens
taagggcaaattggctctctgttcaatccacacttcaggcgatggcttccctctctgcttttctatttaccttccagcatctaaaattaagtttcctgtcactgatgtcttctctatcaatccctgtgaccttgttggtttatatattatatttctttaacagagtcttaggaaggagagtacataaccctccacgtctaacgctttacctttaataaaaagacagactgagttaagtcrtatttttaaaatacagtcattatatgattccttttataggaaatatccagaataggcaaatcatagagacagacaatagattagtggttagcaggggcagcggggaggatggaatgagtagtgactgctcaatggctatggggcttcctttcagggtgacagaaacattctggattaaatagaggtgacagtgtgaatgtacttaacgccactaaattatacatttttaaattgttaaaatggaagttttatattacatgtattttaccacaataaaaaaaatacatagtaaaaaatatacagtgaccatggagagcttacaaaagattttcacaaacagtatattcaggttatgctgccattagagtcctgttgttctgtaattggtggtaatatcctttaccatggaaatttaaaaataccagccttccccatttagatttttaaaaatcaactcatatttggatactcccagttgttgttgttgaaacagtggtcttactctgtcacccaggctggagtgcaatggctcaatcacagctcactgcatccttgacctcctggactcaagcaatcctcctgcctcagcctccgaagaagctgggaccacagtcatacaccaccctgtccagcttatttatttatttatttagtagagatagtgtctccccatgtttcccaggctggtcttgaacttctgggctcagtcgatcctcctatcttagcctcccaaactgttgcgattacaggcatgagccaccacacaagtcctattcccaattttgacttttcctccacaattatttaatttctgacacctgatgtctcttagctatcctaaaaccaaataaaagatgttctcttatttactgtaagaatagatatatagaattatttcaagtgtaaaatatcagtatctcttgtcattccacaaagagcccaagccacccctaaattttctctctttcatttgcttagaaagtataatactcagctgttaatcaaatgaacaaataaaatagcagctttttatgaagagttattgtaaaactacgaactatttcattaactaaatcagaaaatgcaaatagcaacttagctattgagcagccttgggtgtttggaagaaacaggcccacacatctgggaagtgataattcactgaacaaaggtggccagatttccctgacctcatcaaccccag

SEQ ID NO: 75943 - DNA, 1444 bp, Homo sapiens
taagggcaaattggctctctgttcaatccacacttcaggcgatggcttccctctctgcttttctatttaccttccagcatctaaaattaagtttcctgtcactgatgtcttctctatcaatccctgtgaccttgttggtttatatattatatttctttaacagagtcttaggaaggagagtacataaccctccacgtctaacgctttacctttaataaaaagacagactgagttaagtcatatttttaaaatacagtcattatatgattccttttataggaaatatccagaataggcaaatcatagagacagacaatagattagtggttagcaggggcagcggggaggatggaatgagtagtgactgctcaatggctatggggcttcctttcagggtgacagaaacattctggattaaatagaggtgacagtgtgaatgtacttaacgccactaaattatacatttttaaattgttaaaatggaagttttatattacatgtattttaccacaataaaaaaaatacatagtaaaaaatatacagtgaccatggagagcttacaaaagattttcacaaacagtatattcaggttatgctgccattagagtcctgttgttctgtaattggtggtaatatcctttaccatggaaatttaaaaataccagccttccccatttagatttttaaaaatcaactcatatttggatactcccagttgttgttgttgaaacagtggtcttactctgtcacccaggctggagtgcaatggctcaatcacagctcactgcatccttgacctcctggactcaagcaatcctcctgcctcagcctccgaagaagctgggaccacagtcatacaccaccctgtccagcttatttatttatttatttagtagagatrgtgtctccccatgtttcccaggctggtcttgaacttctgggctcagtcgatcctcctatcttagcctcccaaactgttgcgattacaggcatgagccaccacacaagtcctattcccaattttgacttttcctccacaattatttaatttctgacacctgatgtctcttagctatcctaaaaccaaataaaagatgttctcttatttactgtaagaatagatatatagaattatttcaagtgtaaaatatcagtatctcttgtcattccacaaagagcccaagccacccctaaattttctctctttcatttgcttagaaagtataatactcagctgttaatcaaatgaacaaataaaatagcagctttttatgaagagttattgtaaaactacgaactatttcattaactaaatcagaaaatgcaaatagcaacttagctattgagcagccttgggtgtttggaagaaacaggcccacacatctgggaagtgataattcactgaacaaaggtggccagatttccctgacctcatcaaccccag

SEQ ID NO: 75944 - DNA, 1444 bp, Homo sapiens
taagggcaaattggctctctgttcaatccacacttcaggcgatggcttccctctctgcttttctatttaccttccagcatctaaaattaagtttcctgtcactgatgtcttctctatcaatccctgtgaccttgttggtttatatattatatttctttaacagagtcttaggaaggagagtacataaccctccacgtctaacgctttacctttaataaaaagacagactgagttaagtcatatttttaaaatacagtcattatatgattccttttataggaaatatccagaataggcaaatcatagagacagacaatagattagtggttagcaggggcagcggggaggatggaatgagtagtgactgctcaatggctatggggcttcctttcagggtgacagaaacattctggattaaatagaggtgacagtgtgaatgtacttaacgccactaaattatacatttttaaattgttaaaatggaagttttatattacatgtattttaccacaataaaaaaaatacatagtaaaaaatatacagtgaccatggagagcttacaaaagattttcacaaacagtatattcaggttatgctgccattagagtcctgttgttctgtaattggtggtaatatcctttaccatggaaatttaaaaataccagccttccccatttagatttttaaaaatcaactcatatttggatactcccagttgttgttgttgaaacagtggtcttactctgtcacccaggctggagtgcaatggctcaatcacagctcactgcatccttgacctcctggactcaagcaatcctcctgcctcagcctccgaagaagctgggaccacagtcatacaccaccctgtccagcttatttatttatttatttagtagagatagtgtctccccatgtttcccaggctggtcttgaacttctgggctcagtcgatcctcctatcttagcctcccaaactgttgcgattacaggcatgagccaccacacaagtcctattcccaattttgacttttcctccacwattatttaatttctgacacctgatgtctcttagctatcctaaaaccaaataaaagatgttctcttatttactgtaagaatagatatatagaattatttcaagtgtaaaatatcagtatctcttgtcattccacaaagagcccaagccacccctaaattttctctctttcatttgcttagaaagtataatactcagctgttaatcaaatgaacaaataaaatagcagctttttatgaagagttattgtaaaactacgaactatttcattaactaaatcagaaaatgcaaatagcaacttagctattgagcagccttgggtgtttggaagaaacaggcccacacatctgggaagtgataattcactgaacaaaggtggccagatttccctgacctcatcaaccccag

SEQ ID NO: 75945 - DNA, 954 bp, Homo sapiens
atatgtaactaacctgcacattgtgcacatgtaccctaaaacttaaagtataataaaaaaaaaaaaggatgagttcatgtcctttgcagggacatggatgaagctggaaaccatcattctcagcaaactttcacaaggacagaaaaccaaacaccacatcacatgttctcactcataggtgggaattgaacaatgagagcacttggacacaggacaggaacatcacacaccggggcctgttgggggctggggtgctgggggagggatagcattaggagaaatatctaatgtaaatgacaatttgatgggtgcarcaaaccaacatggcacatgtatacctatgtagcaaacctgcacgttgtgcacatgtaccctagaagttaaagtgaaagaaggaaagaaagaaagaaagaaagaaagaaagaaagaaagaaagaaagaaggaaggaaggaaggaaggaaggaaggaaggaaggaaggaaggaaaggaaggaaggaaggaaggaaggaaggaaagaaagaaagaaagaaagaaagaaagaaagaaagaaggaaagaaagaaagaaaaaagaaagaaagaaagaaagaaagaaagaaagaaagaaagaaagagagaaaataaacagatatgtgaaaataggcactgttaatgtagcactttttggaactgccaactgccctaatatttcttgctatttaggctgagagcagaggcaggtaccacaaaaaataaaaaaggaagtgttgttctgatccttgactgggtcttgttgccagcgtttggtcttatcctctgcagtgaataatttgtgataaaactggcaagataatgtatgcttcaataacttggccaattgcattaggcaaacacagagccttaaacagtattgtttatgataaaagctgaccaagaattcttacattagaagaatggggttaggggagccctaatg

SEQ ID NO: 75946 - DNA, 2558 bp, Homo sapiens
  misc_feature (1)...(2558): n = A,T,C or G
tctctctctctctctttcactgtctccaagtccctgatggaaagagcataagatgtgctgtttccaaattcaaacatacgtatttgtaataacaattacacagattctattatcagaaaatgatgtttaatgtttaagaattgaaaattaaaagtcacctttgacagcgtggccaacatggtgaaactccatctttactaaaaagtacaaaaattagccaggtgtggtggtgcacgcctgtaattccggctactcaggaggatgaggcacaagaattgcttgaacctgggaggtggaggatgcagtgaaccgagatcatgctactgtactccagcctgggtgacagagcaagactctgtctcaaaaaataaaaagtcacctttgattccaaggatccaaaaaaatccatttgactccttgtctccttgtttttccatgaaacgtctgcaaaagtggttgttctagcattgtatatacactgaatacatactattttaccaaagaaataaaaaggaaaatcaatagcctagctcaagtactcaactagcttttttaaaaatgtgatgatctgataaagtcaagctccagagagccaatcagcaaagaactaattgcttgagtgaattcattattattttcaattcaatcagttgtgtaaagtttatgtacgagtgttaaaagtcagctagtttgaggtttaaaaactttcttcatgactgtaggaagatagagagaatgcagcttcagttataaccactgaacataaacattactttggataactctaagttatctaacaagcatttactatacactgcatctccgtgcagggctcaagcttgtttcctgaggtcccagaactgacaatctatctgggaagagaaggtgtgtgcctaagtaaactggcacataagattaggttaacaaacaaaatgcattatccttcttccatctcagccttaactctgagctgacttgggcccctggctgtaggctgaatgaagtctctgactttaagggattaagtacaaagcagcactgccctgcctctctcctaatccgctttaggacaatagaggtgaccagaagagagcaattcatttgtgcagatggcttaatttaaatagctcttcataacaattgggttgggccaacagcagaacttcttaggttttctctcatgctgggacttagggctactcctcactgctcactgagtttccaaggcatgatatgtgctcgccatckaggcaaatttacacaaaattgattaatacttcacttccatgttattgaatttgatatatgagttttaaatcatatagctcatggcatttagtcaacaaaacactgaaatgcctctttttaaaaatgatttggatgatgtcctaaaaatttctaagttattgagactgtgtgaacgaatttattaagtttagtgaacaaatttcctgtattagggtaagatgactctttgtgtatgcaaaactttcttacgaaaggttaaataacttttccatcattctttcaatgtctaagataaatggtcttaggttatcaggtagatgatatttaatgcagtagtgtaccaaaattaaaagcactctataagaaaaagaagaaagagaaagaggaaagggatttgaacacaataaatggcacattcatgtttatatgtgaatgtttagattcctaactagactgtaagtgatcacagaaagattcatttcttcacccgcttcatactgttcattcacagtgtgagggcattacacaatcaactactggaaaggcacagtccagagcaggaattcnnnnnnnnnnnnnnnnnnnnnnnnnnnnnnnnnnnnnnnnnnnnnnnnnnnnnnnnnnnnnnnnnnnnnnnnnnnnnnnnnnnnnnnnnnnnnnnnnnnnatggagaaaagatagtcctttcaacaaatggtgctaaaaatgttggatatcaatacgcaaaaaggagagttgatcacactatttataaaattaacatataatggataatagaattaaatgtaaaacctaaagctataaagcttctaaaaaataacaaagtcttaatgcacattaattaggcaaaaatttctttaaaaactcacaaaatcataatccataaaagagtaaaaatgacaaagtgtacttcatcaaaattttaaaacttttgctcttcaaaaaacacttaggaaaatgaaaaacagaccacagcccaggaagacacatttgtagaacagatatgtcataaacaacgtgtattcataatatatattacacactttcaaactaataataagtaaacacacaacccaatttaaaaatggggcaaagacacacacagttatttcaccaaagaagaactataaatggaagataaagacatgaaaatatactcgacaacacttattagggaaatgcaaaataaacccacaacaagataccactagtcaacaaataatagactaatgctactatttgtcaacaaataatagactaatgctactatttgtcaacaaatagtagactaatactctaatgctatgtca

SEQ ID NO: 75947 - DNA, 526 bp, Homo sapiens
actctttgaaacttgaaaaaaagagagtttcagacaaatttaaaagaatgcagatcacacagtggataataaatgaagacgattcattaaccaagaagtaccattgagggaaatgaaaataaatgcaaagggttttggcagactttgagaggaaaggatattctaggttgacatctgggaagttcatctttctatacttgaaatctcacatgaaactgctcctgctaaatgagtccaaaattgaagctggttctccagccctgaatgcttcacttctttcagaagcccattccagctcttgaggtckgcactgctctgctgtgattgactcccactgtccagcccacagtctctgaggtatggccttgctcctgctcccttgtgcaagcatctctatcccctctgatactagagaatctccagctcatccctccagatgtcacacagcacttccctgtggagccttggcctgctgctacccttgatctactttgtgagtgccttcttggctgctgcccagatcctc

SEQ ID NO: 75948 - DNA, 526 bp, Homo sapiens
actctttgaaacttgaaaaaaagagagtttcagacaaatttaaaagaatgcagatcacacagtggataataaatgaagacgattcattaaccaagaagtaccattgagggaaatgaaaataaatgcaaagggttttggcagactttgagaggaaaggatattctaggttgacatctgggaagttcatctttctatacttgaaatctcacatgaaactgctcctgctaaatgagtccaaaattgaagctggttctccagccctgaatgcttcacttctttcagaagcccattccagctcttgaggtctgcactgctctgctgtgattgactcccactgtcyagcccacagtctctgaggtatggccttgctcctgctcccttgtgcaagcatctctatcccctctgatactagagaatctccagctcatccctccagatgtcacacagcacttccctgtggagccttggcctgctgctacccttgatctactttgtgagtgccttcttggctgctgcccagatcctc

SEQ ID NO: 75949 - DNA, 1009 bp, Homo sapiens
tttaaagtttctccatgtcttttttatggcttgatagtgaattttgttttagcactcaataccgtttcattgtttggatgtaccacggtttatccatccatccactaattaaaggacatcttggttgcttccaagttttgggaattataagtaaaacagctataaacagctgtgtgcaggtttttatgtggacatagtttttaattcatttgggtaaatacccaagagtctaattactggattgtacagtaacagtatatttagttttgtaagaaactgctgaactgtcttctagagtggctgtaccatttcactttcccaccaacaaggaaagagagttcctgttgctccacattttcaccaacatttgatgttgtcagtgttctggattttggctattcaataggtatatagtgatatatcattttaatttgtaattaccttatgaagtatgatgttgcataccttttcatatgctttatctatatttgctaaagtgtgtcttatttgttaagaagtctgttcagattttttgcccattttttakttagattgttaattttcttgttcttaagtattgagttctctgtataagaacatttaattttattaaaaatcctttatcagtaagtattttagaaatattttcttccactatgtggcttctcattttcttgacaatgtgtttcatcatctaatatttttgtgtctaattgtttttgtacatatagtatgtgttttccaaatagaaaataaactccatgattatggagatgttttttgtgcctggcaaatagtaggtatcaaataaacagcgattgaattgtttgaatgaattagagtgattttttttttgtatttttaaggcttatctacaacgagaccttattatatggagataacaacactgaaaacaaacctatgtacatatatgtagaaaataagttgtgtaaaccatatacctgcaagttggtgctttacttggttagcaattcagattttgagtaca

SEQ ID NO: 75950 - DNA, 436 bp, Homo sapiens
atatataatacatacacacagacacacacatacatgtatacatatatatatacacacacacaaatattcacatatatgcatacacatacatatattaaatatgaagatatttataacactatatattaatcatctatataatatagtctatcaaattatatgttcctataaaatacatatttatatatagccatttatctatttatggtayctctctctcctattgcctctgtttctctggagaagcctgattgacacatcatgattaccaatatgataaatcaaaaataatttatacatacatttcaaggaaatgtgaggtgctttcagcaattttgcgtggtcagcatggaaaattcaacagcttttctatataccaggaattaccaactagaaaatacaatataaaataatttgcctttacactagcaacaaa

SEQ ID NO: 75951 - DNA, 436 bp, Homo sapiens
atatataatacatacacacagacacacacatacatgtatacatatatatatacacacacacaaatattcacatatatgcatacacatacatatattaaatatgaagatatttataacactatatattaatcatctatataatatagtctatcaaattatatgttcctataaaatacatatttatatatagccatttatctatttatggtatctctctctcctattgcctctgtttctctggagaagcctgattgacacatcatgattaccaatatgataaatcaaaaataatttatacatacatttcaaggaaatgtraggtgctttcagcaattttgcgtggtcagcatggaaaattcaacagcttttctatataccaggaattaccaactagaaaatacaatataaaataatttgcctttacactagcaacaaa

SEQ ID NO: 75952 - DNA, 690 bp, Homo sapiens
aggtcttctacctcctaggattctatstggctatttgtggcatcaggaaactctgagagcaccactttttaattcatttttttaattgacaaaaaagtatatattgatggtgtacaacacgttttgatatatgtattcattgtggaatagctaaataaaactatttaacatattcattacttcacaaacaccatttttgggggatgacaacacttaaaatctactctcttagcaattttcgagtatacaatacattattattaactatagtcattcatcatgatgtacaatcgatcttgaatgtattccttctatctaactgaaatgttgggtcctctgaccaatatctttctaatccccctgccccccaacccttggttatgaccattctattcctactcctatgagtttgagctttttagataccacaagtaataagtaagatcatgcggtatgtgtctttctgtgcctggtttatttcacttaatataatatcctctgggttcatccatgttgtcataaacaacaagatttccttttttaaggctgaatagggtatttcatatatatgccatattttctttatccattcatgcactgatgggcacttatgttgattccatattttggccagtgtgaataacactgcaatgaacatgggagtgcagatctcactacaacatactgatt

SEQ ID NO: 75953 - DNA, 690 bp, Homo sapiens
aggtcttctacctcctaggattctatgtggctatttgtggcatcaggaaactctgagagcaccactttttaattcatttttttaattgacaaaaaagtatatattgatggtgtacaacackttttgatatatgtattcattgtggaatagctaaataaaactatttaacatattcattacttcacaaacaccatttttgggggatgacaacacttaaaatctactctcttagcaattttcgagtatacaatacattattattaactatagtcattcatcatgatgtacaatcgatcttgaatgtattccttctatctaactgaaatgttgggtcctctgaccaatatctttctaatccccctgccccccaacccttggttatgaccattctattcctactcctatgagtttgagctttttagataccacaagtaataagtaagatcatgcggtatgtgtctttctgtgcctggtttatttcacttaatataatatcctctgggttcatccatgttgtcataaacaacaagatttccttttttaaggctgaatagggtatttcatatatatgccatattttctttatccattcatgcactgatgggcacttatgttgattccatattttggccagtgtgaataacactgcaatgaacatgggagtgcagatctcactacaacatactgatt

SEQ ID NO: 75954 - DNA, 629 bp, Homo sapiens
cacctggacagtccaggatgcttaccctatgcaaaggtctttaccttaatcctatctacaatgtcccttttgccatgtggggtaacatattcacaggttctggggattaggatctggacatctttaaggatcattattctgctcaccatgagttgaaaagccagctgtacaccttatagttgctcttttgcagggcatctgcctttttctaatacatggttttcggcagtttgaccacgatgtgccgaagagtggttttccttgtgttgatcctgcttggggtttgctgagttcttcaatgaacaccaactcagctgatgctttctattggttttggaaaattctcagccactttctcttcaaatactgcttctatgtcattctctcctctcttctgtaggcccccaactacattagacacctgatggttccccatgcatcttccacactctcttttgctcttttcatgctcttctctctgtgcttckttctgaaaatttcctattggttttggagttcactcatgccatcttttgttatgtcccactgctgttaaattcaccccagagtccttgatttgatactgcatttaaaaattctagaatgttcaattaattattctatagagt

SEQ ID NO: 75955 - DNA, 629 bp, Homo sapiens
cacctggacagtccaggatgcttaccctatgcaaaggtctttaccttaatcctatctacaatgtcccttttgccatgtggggtaacatattcacaggttctggggattaggatctggacatctttaaggatcattattctgctcaccatgagttgaaaagccagctgtacaccttatagttgctcttttgcagggcatctgcctttttctaatacatggttttcggcagtttgaccacgatgtgccgaagagtggttttccttgtgttgatcctgcttggggtttgctgagttcttcaatgaacaccaactcagctgatgctttctattggttttggaaaattctcagccactttctcttcaaatactgcttctatgtcattctctcctctcttctgtaggcccccaactacattagacacctgatggttccccatgcatcttccacactctcttttgctcttttcatgctcttctctctgtgcttctktctgaaaatttcctattggttttggagttcactcatgccatcttttgttatgtcccactgctgttaaattcaccccagagtccttgatttgatactgcatttaaaaattctagaatgttcaattaattattctatagagt

SEQ ID NO: 75956 - DNA, 1236 bp, Homo sapiens
ctggttcaaatgcatcccctggtccctgcaggtccggggtggggctggagcttttgygtgtctcatcagctcccaggtgaggcgtgagggcgcagggacgagcacagaggaggtcgggagccccgggctggtgggggcggcttgcccaggtctcgctgggcagctcggagcaggtcctgccaccaatctaggggtccagtctcaagatgtcccaggttgtggtaaggacccgaaagggaggtgcaccggcttctagcccagggcagaccctgtcaggggggcttctaggagcgacggggatgccagcgtccgcccttccagccctgctgggaaagcgtcaccgtgttctgaagaaagcatcctttttgttcattccagaaacatttatcgagtgcctatggcatgtcaggcacagttcaagttctgaggatacagagtaaacaacaggcaacatcacgcctcctcgagcttctgttctactgggagtcagggtaggaagagacgacaacaaggtaaataagtcaaatccggactgtgttactgacaatgcaagctaggagaaaaaaggaagcaggagcagagaggagcctgggtgatgatggagatggggagtttacttaaataggtggccatgaggctatccagcctgtcccaggcggacttttagaagacggattgtttataagagcccaaaagtataagttcttaaaaaaaattaatttctgaatgtgtgatgagaacacaaattcctccacgacagccctgtttttcctgtgctgcgtagctgagctctgggtcacggctgccgagtgcaggcaacactcgggcagtcccagggctgaccgactgcgcatctggacactggcaatcacagggaaggaggcgagagctctgccgggtgctttgaggctgtcgcgtcatgtcttcctccccacagcgttctgcggggcctgtccccttggtgttgtggcacctcctggtcctcggctctgctcttggggaagaaagaggacactgtcacaggttcctgtcccctccagccaacaggagcagccacacgtggcatctgccctcgaagctctgtggcatccctgccgtaggagaagttaccaagaaacccccagagcccacaggctggagcccccccaggttctgctcagcggggagaggcagattgagtccaaattttccattttaactggaatcctaggggttaaacctggctgtgacttggca

SEQ ID NO: 75957 - DNA, 1236 bp, Homo sapiens
ctggttcaaatgcatcccctggtccctgcaggtccggggtggggctggagcttttgtgtgtctcatcagctcccaggtgaggcgtgagggcgcagggacgagcacagaggaggtcgggagccccgggctggtgggggyggcttgcccaggtctcgctgggcagctcggagcaggtcctgccaccaatctaggggtccagtctcaagatgtcccaggttgtggtaaggacccgaaagggaggtgcaccggcttctagcccagggcagaccctgtcaggggggcttctaggagcgacggggatgccagcgtccgcccttccagccctgctgggaaagcgtcaccgtgttctgaagaaagcatcctttttgttcattccagaaacatttatcgagtgcctatggcatgtcaggcacagttcaagttctgaggatacagagtaaacaacaggcaacatcacgcctcctcgagcttctgttctactgggagtcagggtaggaagagacgacaacaaggtaaataagtcaaatccggactgtgttactgacaatgcaagctaggagaaaaaaggaagcaggagcagagaggagcctgggtgatgatggagatggggagtttacttaaataggtggccatgaggctatccagcctgtcccaggcggacttttagaagacggattgtttataagagcccaaaagtataagttcttaaaaaaaattaatttctgaatgtgtgatgagaacacaaattcctccacgacagccctgtttttcctgtgctgcgtagctgagctctgggtcacggctgccgagtgcaggcaacactcgggcagtcccagggctgaccgactgcgcatctggacactggcaatcacagggaaggaggcgagagctctgccgggtgctttgaggctgtcgcgtcatgtcttcctccccacagcgttctgcggggcctgtccccttggtgttgtggcacctcctggtcctcggctctgctcttggggaagaaagaggacactgtcacaggttcctgtcccctccagccaacaggagcagccacacgtggcatctgccctcgaagctctgtggcatccctgccgtaggagaagttaccaagaaacccccagagcccacaggctggagcccccccaggttctgctcagcggggagaggcagattgagtccaaattttccattttaactggaatcctaggggttaaacctggctgtgacttggca

SEQ ID NO: 75958 - DNA, 1236 bp, Homo sapiens
ctggttcaaatgcatcccctggtccctgcaggtccggggtggggctggagcttttgtgtgtctcatcagctcccaggtgaggcgtgagggcgcagggacgagcacagaggaggtcgggagccccgggctggtgggggcggcttgcccaggtctcgctgggcagctcggagcaggtcctgccaccaatctaggggtccagtctcaagatgtcccaggttgtggtaaggacccgaaagggaggtgcaccggcttctagcccagggcagaccctgtcaggggggcttctaggagcgacggggatgccagcgtcygcccttccagccctgctgggaaagcgtcaccgtgttctgaagaaagcatcctttttgttcattccagaaacatttatcgagtgcctatggcatgtcaggcacagttcaagttctgaggatacagagtaaacaacaggcaacatcacgcctcctcgagcttctgttctactgggagtcagggtaggaagagacgacaacaaggtaaataagtcaaatccggactgtgttactgacaatgcaagctaggagaaaaaaggaagcaggagcagagaggagcctgggtgatgatggagatggggagtttacttaaataggtggccatgaggctatccagcctgtcccaggcggacttttagaagacggattgtttataagagcccaaaagtataagttcttaaaaaaaattaatttctgaatgtgtgatgagaacacaaattcctccacgacagccctgtttttcctgtgctgcgtagctgagctctgggtcacggctgccgagtgcaggcaacactcgggcagtcccagggctgaccgactgcgcatctggacactggcaatcacagggaaggaggcgagagctctgccgggtgctttgaggctgtcgcgtcatgtcttcctccccacagcgttctgcggggcctgtccccttggtgttgtggcacctcctggtcctcggctctgctcttggggaagaaagaggacactgtcacaggttcctgtcccctccagccaacaggagcagccacacgtggcatctgccctcgaagctctgtggcatccctgccgtaggagaagttaccaagaaacccccagagcccacaggctggagcccccccaggttctgctcagcggggagaggcagattgagtccaaattttccattttaactggaatcctaggggttaaacctggctgtgacttggca

SEQ ID NO: 75959 - DNA, 1236 bp, Homo sapiens
ctggttcaaatgcatcccctggtccctgcaggtccggggtggggctggagcttttgtgtgtctcatcagctcccaggtgaggcgtgagggcgcagggacgagcacagaggaggtcgggagccccgggctggtgggggcggcttgcccaggtctcgctgggcagctcggagcaggtcctgccaccaatctaggggtccagtctcaagatgtcccaggttgtggtaaggacccgaaagggaggtgcaccggcttctagcccagggcagaccctgtcaggggggcttctaggagcgacggggatgccagcgtccgcccttccagccctgctgggaaagcrtcaccgtgttctgaagaaagcatcctttttgttcattccagaaacatttatcgagtgcctatggcatgtcaggcacagttcaagttctgaggatacagagtaaacaacaggcaacatcacgcctcctcgagcttctgttctactgggagtcagggtaggaagagacgacaacaaggtaaataagtcaaatccggactgtgttactgacaatgcaagctaggagaaaaaaggaagcaggagcagagaggagcctgggtgatgatggagatggggagtttacttaaataggtggccatgaggctatccagcctgtcccaggcggacttttagaagacggattgtttataagagcccaaaagtataagttcttaaaaaaaattaatttctgaatgtgtgatgagaacacaaattcctccacgacagccctgtttttcctgtgctgcgtagctgagctctgggtcacggctgccgagtgcaggcaacactcgggcagtcccagggctgaccgactgcgcatctggacactggcaatcacagggaaggaggcgagagctctgccgggtgctttgaggctgtcgcgtcatgtcttcctccccacagcgttctgcggggcctgtccccttggtgttgtggcacctcctggtcctcggctctgctcttggggaagaaagaggacactgtcacaggttcctgtcccctccagccaacaggagcagccacacgtggcatctgccctcgaagctctgtggcatccctgccgtaggagaagttaccaagaaacccccagagcccacaggctggagcccccccaggttctgctcagcggggagaggcagattgagtccaaattttccattttaactggaatcctaggggttaaacctggctgtgacttggca

SEQ ID NO: 75960 - DNA, 1469 bp, Homo sapiens
cttttcctgtcccagctcacccacagggggccatttctgccccacacaggactccctgtgaaccaaggctgcacatgcttctgggtgcccctctctgggcagctggagggcagaaggagcacctggcaggtgggtcccaggcccggcagcaggagctgcctgccagacaggaccagaggggatggcagtccgctcgggtgaggggtccacaggcagagggcgtggggggctaggaggtctgggggcctctggggaaagggggccccagaaaccaatgggaattatgggatctcctcaaagaacatgctggagcaaggctcagctgcccactgctgccccaaaaaggctcagctgcccactgctgccccaacgggagtcactgctcacacagagaccgctccttccccagccactccagccagtgactggatacggtgcaggcactagtccctagaaccaggccattcctgacccaccaactgccctgtatgcaggcctctctctggggcttctcatcagcctagcagcacggctttctcagggcttccctgggtacgcacgtcctcctacccaatcccccttccctctctccctgtcccaggttcagacctgcatcctggctcgaggctgtctccccatctgccacaggtgcttcccccaacggatctcttgcccctctcctcctggcttggggtctgctcactggaggacctggatggacatgacagggcycagacaggacttgggaggagctgtgagctcgccatcagggccagccttgaaggacgggtgtgggcgtgtcccccatcaggatcccgctgtgggtctccttcctgctgtgggggctgatgaaagatgcaggccagacacctgcacatctttaccctgtgctcagcagcaccccctgacagggcaccctccccactacatccccattccattccaaaggaagagaccctgagggtctggaatgaagaaccccttaccccaggtcaaactgatgttgctggaatctttggttgggtctcgacattaccccatatgggcaacagagaaggactgccgagagctgggcaaggccccatgcctgctcctcctgcttgtgctctctagatcagagaccctcccaacctctcccgtaggggcctgactcctccctggtatgtcacctttgcttgatctaggcctctggaggggcggcagcctgtctccccgcaccagctggggttctggccctggtggttgctcaccacacctccgggggctgccacgcggggtcatgttggtaccaaggttctctgtggggtgcagggatgaccactggagaaaaggccagccctgccttccgctgctgcctcaggctggtccccgtgcctcgctcaggcgggccagtgaccctcctcaccagccatggcttctcttgtgacaggcccaacggcaggccaggtcctgaaccccgcagggaggcc

SEQ ID NO: 75961 - DNA, 1158 bp, Homo sapiens
gggagtcacctcccaggtcaaaacctgctgtgataccatcaccctgcagcacagaccacagtcccaagcctcccattcttgactctaacaccagcccagcctgacctgctgcagggtgtggcctgtgaccacatctgtgctccgtccacgctgcttcgtccagcctcccacgccgatccccagagtagctccccgggatgctctctcctcatcactgcatctgccgcccgcccaggccctctgactttaccctcccgcaggcccctcccgtctgaggtgctctggaatgcctgtggtgtgattgtgcatgaacttttacgtgcctgcgtccatgctcgagagcggtcttgcctgaaccaccttgtctcaataatcagcatgaaactcctcaaaagaaacagagaggcccctcagaacatcacggaaaagacgatggctccaaaacagctagattctaatcccagctctgctgcggggcgcggcctcrggcacacctgtgctccgtgcatgtgacgtgactctcaaaagcatccatttcctcatctggaaaacgggacagttcctggactctgcgcacctggaagtgaccatgagggtcaaatgtttctcaaactgcaaatgcttttcagatgctggcgccgtgaccaaagacctggctcttacatctgctctgttttcatgggacacagccctgggtatacagtaggtgcttaatgcaggtgaccgtgaggaagggctgtggcccgtggagggcaggcaggtgggattcagctgaggtcctcaaaggctgcactatgggaaaggctgagcggcaggaaagggacagacaggccctcctcctggggcccagggctgggaaccagagcccctcctttggccactctgaggtggaagaacaaggagcacataggaggagtggcccaggctctccacctgaggacattcggaggacctagaagcactggcagagcctgaacgtggcaccgtagcctcctgctggctggagatgtgtctgggcggtgtgtcttggcatggaatccacagccagctagcctgaggcggggatggggccaggacccccggctgtacagacggagagccagaggcggttgcaggttcccaaccgacagcggagctgatgagtggcggggctttcat

SEQ ID NO: 75962 - DNA, 1518 bp, Homo sapiens
gaattctacttagagggaaaatctgggagttcagatacggaaaattctgtcttctcaacaccaagactttccatcaaaaactagtttagtcttttgaatgttttgtccacatgatggtaaatatctgaatatttaacagatatctgaagttaccatcctgcaggtctcagtttatccaggtagattttcgtcatgttgctgtaagtgactatattctgaatctaacttctcattttcaaatcatctctcagaaaccgtgccttctctatgaagctatttatgtgttgattaaaaaatataattgcttcctcaccagtagcattcaaacaggtacattttatttattttgtatatttaaaaaaagtttgtacagttgtctaactrgtgtcttttctgctaacacagggctaaatacgtagtaggtccgccataaatgcctgttgatttgttaatcacttcaggagtgaatatcagaggagaccgtggctttcagataataattccaccagttttaattgctttattctgaacattaggctggtggtagttttgcatgggtagattgtggccaacctgcatgactcgttctgaagataagtttactgctagtatgtctttacccctgggaaataaacatatgtaatcttcttgccattattcttaatttaaagccctgtattgtatgtttaggttatttcaggccttgtgagggtgaggggctggacttggaagataattgggggggaaatgtcacaccacgtccctattgtaggagggtgcaaggttcacaccacgtggtgagcagccctgtagagggcatccacttgaagacagagaaccagaagatgcatggcttggtgtaagcagatggagccaagccagcaagcacatcccagctgggaatcttcctagtctcctgggccttctccttccatcactgcccaggctgcagtttcattgaggctggtctccttgttctttcctttcctcacctaaatctgtcattgtgtaaattcacccttattgatgacacctctttcacctctccccacctcctccactttggtgactccagaacatgttcatttctctctgctacagtgccagtcaccttcccttggccgccctgcacaaacactcctcagatgcacaaccttcattgttgcttcatagatgcatggatttgatctctggctttgccaggaactagctaagtgacctcaagcaagttatgttggtgatctccaaggacctcagttttctcaccagggaattgatctacaatgacacttgccactttggaatgtgcatcatacatgagagcacgcactgtgatgacaccttgtagaataaacaatcatttcccaccttcagccactgtctgctgcagaggtggttgtttggcctgattcatgtctgctgctacttcttcttttggctaactttccacttttatttttcagggctgggagagggttctgccctccttcatccagacagcaggtctcatcctaggtc

SEQ ID NO: 75963 - DNA, 998 bp, Homo sapiens
ttgtcatttaacctaatattcttatttttccttgagagagatattataatccaaccaagtaacagatgaaggaaactgttccctttcatgttgctgagccagggttcaaccaataaaagcacagtgcatgataaatttgggcattacactttcaaaaaacagcagatcttttaatatctaattcagtgtgcctactgtctagtaaatgttaatattctattgtgtggcctggtgtgtctacagcttataccaaaaaattaacaagctatcccccaaattactttccagttccaaatgtggattcaaagtakagttaaacacacagcaatagtttttaaagacatacctacgtcctcgtactagtagtctggaggcttttcctagtaattcaactgcctgtcgtaagcgttcttcattctgaaggaatcaaagaaaaacaagtgttggctgctttaatgttgaaatgtttttatcccctaatatttattttgtaaagaagtaatggcactggatcaaggggggaacacgaaagctgctagttcatttcactactctctaacagaaaagaaatagcgtgcaactgtgagcagggaaaagttttaaaagtagccactgcacttctctattttcctatatattattaatctaaacattctaagtaattaaagaaaaaaataagattcaaacttacttcaaacacattagctgtctgttgatataactgtacagccttctctggatcaacattttctataagcctgaatcagacaagaaaacatgtcttatatgagaaatggaaaacttgtttttcagggacctctttaaaacaaaaagacaagacttctatgcagagacttgtccatctcacactcactttccagctcgctccaaagccatggctgctgtgtctggggtgccgttttctagatacatcatgctggccttctcaattagctgaacggcctctggtagtttctgcatctcctttgggcaaagga

SEQ ID NO: 75964 - DNA, 563 bp, Homo sapiens
ttggagcagtgaaggctaatttcagatggacccagggttgtaaatttaaccgaaaacgtccatgcttggatggaatgtggggcagacctagggtatgtagcattggtatccttaatccatattctaaaagatacaccagcgtctatattcctaactggaatgagtgtaccatgctgagcaataaataagtgaattcctctgtgtttaataaatttcccacaaatgggaaatctctccctgctgtcagaaacaattgtgctttttcctgagcaattaacttgttcaagtcatatgaaattttaagccacattaccacgttagcatctagaaaggctgacattaaatatggctcaactacagctagagtttaagatttgacagcacagcctaagyattccaaggccacatctggattgttcttgttttcacagccctacattctggttgtccagatgcactcagctatttttatattttatttggtcttcttgaattgtaggtatttccgtaagctgccttgaatcatttttggaataaagtgggatataagtaagtaaataaag

SEQ ID NO: 75965 - DNA, 943 bp, Homo sapiens
tatatgcagagctacagaagactttgtttaaatataatcatgcagaagcatgcgttcctggtgcttgtytgtatttgcagatacagtgcagggatgatatgcaaacaaaaatgctaacttggtgtttgggagttcagagtggaagggaaacttcctttcaaaccctttcagatatttagaataatttctaaccataaatatgtaatacatttagaaattaagttaataagaaaagcttacagttctgttcttctcctgggcacatgtctggtggacatggggctgtcatagtaagtaatgtgtgtaaactgagaaaaatccaagaatgggagtctgcttttttcatcaaatgattcttaagagtagtagtgtggtggttattgctcattgatatattacaaatatgtactagataatttctgacatttgaactgtatttacatgtgttgaattgaaatacctagataaaaattgaaatacgtagataaaatattgtgactaatgtaggcaaacaatagcttttttggcattttacaaactgatcatcattcctcatggcacaggttcatgtgatatcaagtagcttgctttgtttgggaaaggcaatgatgactgcaagaatcacttcaaaaactaaagcacaatggagatttcaattgtgttctgtttaatatttgaatatttaattacattcccaggttatttctcatcctaatagttctcacccacatcatgtgggtcccattagtacaggtatctccgagtgctccactcttccattacattgagtcaattgctcatgaccttgggcctccaattggggctattttcgggctatccatctcctggtctatagtaaaaagccaatgagcagataagtgaatactgaaaaacatttttcctgctggagtgagaaataaatggtctctttcaatagggtagt

SEQ ID NO: 75966 - DNA, 943 bp, Homo sapiens
tatatgcagagctacagaagactttgtttaaatataatcatgcagaagcatgcgttcctggtgcttgtctgtatttgcagatacagtgcagggatgatatgcaaacaaaaatgctaacttggtgtttgggagttcagagtggaagggaaacttcctttcaaaccctttcagatatttagaataatttctaaccataaatatgtaatacatttagaaattaagttaataagaaaagcttacagttctgttcttctcctgggcacatgtctggtggacatggggctgtcatagtaagtaatgtgtgtaaactgagaaaaatccaagaatgggagtctgcttttttcatcaaatgattcttaagagwagtagtgtggtggttattgctcattgatatattacaaatatgtactagataatttctgacatttgaactgtatttacatgtgttgaattgaaatacctagataaaaattgaaatacgtagataaaatattgtgactaatgtaggcaaacaatagcttttttggcattttacaaactgatcatcattcctcatggcacaggttcatgtgatatcaagtagcttgctttgtttgggaaaggcaatgatgactgcaagaatcacttcaaaaactaaagcacaatggagatttcaattgtgttctgtttaatatttgaatatttaattacattcccaggttatttctcatcctaatagttctcacccacatcatgtgggtcccattagtacaggtatctccgagtgctccactcttccattacattgagtcaattgctcatgaccttgggcctccaattggggctattttcgggctatccatctcctggtctatagtaaaaagccaatgagcagataagtgaatactgaaaaacatttttcctgctggagtgagaaataaatggtctctttcaatagggtagt

SEQ ID NO: 75967 - DNA, 946 bp, Homo sapiens
gggggtggatccctcactctattagttcccatgagagctagttgttaaaaagagcctggcacctcgcccttctctctcgcttcctttctcactatgtgatctctacacagctccccttcacattccaccataagtagaagcagcctgaggccctcaccagatgcccaatcttccagccagcagactggtgagccaaataaaccttttttctttataaattacccagtctcatgtattgctgtatagcaaaaacagaacagataagataaatagcaggttagctaatcctagatggtatgacttaagtcaattactctaaattcaaacacatattttggtagtttttcactaatttttacatggccgccattaagtaaattgatcaatgaggctaagcccatccactatttaagaacagcaaatatgttgcaacaaacaggacttttacacttaaagaaaccttggaaacaatctagttctactccacacacaatgctgtgatcctctcaatgctgtaactgatggagaattttccatgtcagcttggtcacttccagagacattactcagatctccaaagcttctcattccattttggaagacttgkaatttctttcctgatagcacttggacaccactgctttaagtcactgctccattcttgcacctttggtcaagctccagtttgacaaattaacatttctatgaaaatgctgaataaaagaaatgtagatgaatcaatgaaaataatattagtaccactacttcccctatcctggaccaattctggtgaaatagataaattatagtttttaaaataagatttacattcattttagaattgatattctcaaagatttggaagccagagtcatctcttttatgttacatgatgtagaaatgcaaagattcaataagccattagtataagaacttgcaaagattg

SEQ ID NO: 75968 - DNA, 544 bp, Homo sapiens
ttcatgccacccagtccacagtactttcttatggcagccctaggaaatgaatacacccgtaatcggcagattttgatttaacatggaagtttctaacgctctttatttattttttactccatagtgatgggaggtgagataattacccagtggatttacagtctgtctagacaaactgaattcattcagagagctgtctcacaggaatgaaaaacagctcttccctcagctaacttgcatatgtacttgagattgtttgaacacttccaaggtccaccaaaggaacacaatcacagtgttaataggaatcctgactgttgaagctcctcactaaagccaaactcygttgggcctttcccggtcctcggcatcaggagcccgggctgcacgttcttgtgcctcatttcaggagggtccaatcttttggcttccctgggccacattggaagaagaattgtcttgggccacacctaaaatacactaacattaatgatagatgatgagctaaaaaaattgcaaaaaaatcttataatgttttaagaaa

SEQ ID NO: 75969 - DNA, 988 bp, Homo sapiens
cttggaaggcagataggacccgtgtccctactgcctttactcaattgtccactccttgagcttccaacccgctgtctttctgcctcctgtcactttagaaaggatctgaggattctccagttatggatttctagagcattctgtcatttatgggggaaatttgggtgggataattgttcttgatggcttttattgtctcttcttattcagtttttaatttattccggcaatatttttcaagcacctgccatggtttatgcactgtcctaggtgctggagattcatgataaatgagacagttagatccytgaatgtatggagctggcagagtgggtatgttccaggatttgcccaaatcagagctcatatcccccagacaatacattaatacactaatatgactcttagttcagagctccaagatgcagagaccagtcaaagggattcacgatccctttattcctgaaaaagtccattgctaagcaagttgtaggtattagacaactgacttcagccctccaccatgttttgtgtgtatgtttgtttgttttgattttgctttggtccaaacagttctggacctcagaagtgccgtagcttgcttgatggtggcattgttctgctgggaccaggtggcgattcttccaatgggagttttgctccatagggttagacttatggaaaaaagttggaacacccggggacactcggtcctctctccctcacttcataggctgctgtgttgtctctctaacagaaacattaacaacaacaaggagaaagaagcacgttttctaaataatgacaaacttttcgtaggagtaggtttgtgtgctctcttctcatgagacagatggtggcttaactctgggaaagggcacacatgtcttgtaccaagcttaaaaattaagaagtctactcttctcatttagctcccatgagaaggagagatctgcacacatggggatcactggagaccagagtgccc

SEQ ID NO: 75970 - DNA, 1007 bp, Homo sapiens
gttcccctaatgcctggaataacatgaaatctgcctgatgcctatgcctygtggagataaagacccatttttttttatattattagacacaattatgagaagccagagaaagtgaaaaaaaaatacacatttctgtattcaaatggaaataagtgcttcattagtaataaaggctctaggttatgttaccatgtaaccttttgttcaaacatgatgtttgaaatttgcataagtagtcagctgtgtatatctcagggctattgaaatgctatgactcaccaatctaagcagcctcataaacagtgtttttctccttttctggtgcccttgttttcacagaaacacagctgcacggcactgacagagaactcgcagagtaaaaaggaacccacaataaacgagctgctttgcgccatgttcacaatttccttgcagggtgggagcagagatggtccgagtaaactgacccatttggaagcccacttggaaactgggttcctttttttaaaaaaataaatttatttccataggtttttggggaacaggtggtatttggttacatgagtaagttcttcagttgtaatttgtgagattttgtgcacccatcacccaagcagtatacactgaactcagtgtgtagttttttatccctcactcccctcccacgccttctctcaggtccccgaagttccttatatcattcttatgcctttgcatcctcatagcttagctcccacttatgagtgagaacacatgatgtttggttttccattcctgagttacttcacttaaaataatagtctccagttccatccaggttgctgtgaattccattaatttgttcttttttatgggctcattcttaaatgaaatcttggcaaccatagaacttcttgttttaaaggaggagaaggaggcatggggaaaggttcagaagactgcctggacttcaatggaacttacatataattttctgcattacgtataaatccatcagaaacatatgg

SEQ ID NO: 75971 - DNA, 457 bp, Homo sapiens
ctggaggcctgagtgagattaggatgaggctccttctgacccacatcaataccaaagaacaaacttcaaagattaggccctagccccagtctggagcaaacagaaccactgtgagtggggtggaacagatctgaggcacacatgtcagaagctactcgtcctatcttccctgcaactgctaggggaagttggggagtggtgggagggaggagccygaaagcaagagacagaaacaagaaaccaaacctcaaaactgggacagcagagacagaagctgaaccccagaggtggagctgggagctgagggaacagcaactaagacatgcactgaagtggagagggagtgacagcagcagcccatggttgggacggaggcagggcaggcaggccatggtggtcagttaataaataataatgaaggacccaaggatgagggggcaggtatgtacagtgccca

SEQ ID NO: 75972 - DNA, 631 bp, Homo sapiens
ggttttagtctgttgtgcagcttccctaataaggggtaagtgtttctttggctggctgaaagaggcctgctcctttcctggtgctatgaatccaggtgggactgcagtggctcttctatggccattgactgtgtgagccccacggtaaggcggggaggaggcaggacaggatgcaggcatccaaagacaccactgtgagctctctgaggggtcagaagacacagagagccatcccttatcacttaggaaattctgagttattgacaataaatgtggcagggtacaggaggagagagctcttgtaattaagtgattgcttcaaatatatcaccgccctctagagatgggaaatacctagaccaagaattctttcagagccatatctcagatacgacaggacttcctgtcgtaagataataaacagtaccatactttaaaagccagtatttctagtatcatagtattactgtgtttctctctgtttatccctgagccccrgggaggtcttgttagagtgtaccagcactgtgacagctggcagatggggcactgagagccggaggaggtgaggaccggtcactccacaggcctccccgacgtctgcagcgcttgtagggacatctaaggggcc

SEQ ID NO: 75973 - DNA, 750 bp, Homo sapiens
attcgaaaatataaatacaatggctttgatctatttaaccatctctccactaagctttaagtcttactagggattttttttggaagggagagaaaaacacccactacagaaacagttttattactccagcaagctggggtttctgtggtgatacacagaatcctcatctaccagagagagccctgactgggatgcaggactggttacaacgtcaagatccttctctgtgaccaacttgatgtcttatttgtaaaattcttccaaggaggaaacgctaaattttttttaaaaactcttctcactgaaaaccttatgtccatcgcggagctgtctgcggtggcggcggcgcctctggtctcccgcggcccggagcccgcagcaccgcctctccctccctgccgcagccccgcagcccagcagcgccccagacacacgccgtcgggcaggagccgctcgctctccggaaagtgacaacagaattcatcgaagtgaagaatttyttaagaagataacaaaaagagaaagaaaatgccggaaccaatcaacgtaacagtaactacaatggatgctgagctggaaatttgccattcagcccaaaacaactggcaaacaactttttgaccatgtggtgaaaatagttggtttgcgcgaggtctggtttttggggctgcagtatgtagacagcagaggttattctacatggcttcaactaaataaaaaggtgacgcagcaagatgttaaaaaagagaa

SEQ ID NO: 75974 - DNA, 763 bp, Homo sapiens
gttaacatgacagcctttgggtccctgggtgtcaatgtcaatctgaaccctatatccaaaagtccctgaaaggatctgggaaacccccttgtggcagccctggagatgccactcagcacccccttgccacagggcagtgagctgacagcctccacaatgggtgacagtgtttgagccaaggtcatgctgccccaggcagctcccagccagtgcctacctgcagcaggggtaggagaccctggcattccttcccaacgtgggactcctctttgagcaatcttggttccagagcccctgctgggctggccagactccctccaagctgcactgcagtccaaggcttttcctacccaatcctccttccttccycatctcctctcacaggtgtcagaccctcctcagagcctgaaagtccccagccccctcctgccccctcctttacctgtcacaggtactacctccataaatcccctgcttttctaactccatccacccaattcccacaggaccagagctggccatgccctcttcccagtgtacggctgctggagaaaatggctaagttccctgttatgtgttggatcatgcctccaccattcccccggtactggggaaatcctgatccccaggaccgtgaatgagaccttatttggaaatagagtctttgcagatgatcaagctaagatgaggttattaggataggccctaattcattacgactgtgtccttataaaaaggggaaattggaggtgggaggatccct

SEQ ID NO: 75975 - DNA, 533 bp, Homo sapiens
caattaccctgatttgattataggaatgtatccaattatcatgcacatcccgaaactagatmcagctagtgtatttcaacttttataaagaaaagaaaaaaacgggcggggtgcagtggctcgcgcctgtaatcccagcattttgggaggctgaggtgggcagatcacttgaggtcaggagttccagacctgcctggccaacatggtgaaaccccttctgtactaaaaatacaaaaattagccagatgtggtggtgtgcacctgtaatcccagctgctccggaggctgaggcaggagaatcgcttgaacccgggaggcagaggttgcagtgagcaagactccatctgaaaagaaaagaaaagaaatgaaaagaaaagacagagggggcccatagatttaaaagaggctgagcagtgacagataatagaagtgtggatggtaagaaaataaagtctcatttttcatggtagcaagtgagatctcaaatccgagatcagaaagtgaagaaaatcaggaattaagagtagaagcca

SEQ ID NO: 75976 - DNA, 753 bp, Homo sapiens
ggatcccggggccagccacagacaccctgtgcagcttcctccttccgggtgcaggcgggcctgggcagtctgagtcctacctcagcccccacctcacctccctgcatcctcctagcatctctgcagggctagcccagaggttggcggcggaaggcccacagctcccctggctccatgggcaatgaccgaacagcccttcacctctctgggccttgttttctcaaactgaaactggagaggatgaccccagcctgggaccttcgagggcctcaaaagggctctgggccttgcgtggtgagtttggtcacccacacacccatcttcccaaatgccaggcttcactcactacagcgttctttcttttcccttcagtatttctcaaagttacccaaaccacatcccctgggaagcctggttcagatgctcctccaagaagcctcccttgaaccccagatagaagggagcatcattcctgtgacctcaccccaccccatcctctatacactcgagactgttgtagccrtactaggtgctatgaaggggaggggatttgacctcggcaggatgatcagggaaggcatcctggagtacgcatgagatcagggatggctgggttaacagggcaaagtggaaaggaagggagggtattccaggcagcaggaacagaatgtgcaactgctctgaggcagctggaagcatggtcagcaaaaagattggaaattatgcatgttttatctattccaagatgcttaa

SEQ ID NO: 75977 - DNA, 674 bp, Homo sapiens
tgtgatatctgaggctgggtcatagaagccttgtcctctgaaagtctctggtctttcagaacatgtactctgggggaagctagctgccatggaaggagtgacactattctgtgaccaccatgatgtgaggaagcccaagctaaccatggggagaggcacctaaagagagacagacagagagagagagacccaccagcccttgctgcctcctgcagtttcagccaaggcaccagacaccagactgctgaagacatcctgggtatcctgcctagttgagttttcaaatcaccgcagtcccagctgccatttgactccaactgtatgagaggccccaggtgagatctgcccagctgagccctgtcagctcatattcagtgaactctgaatgtgagaggtaatatgaaattgttgtcattagttaccacatttagggatggcttgttattaactgggaacaccaatcaacttttcccctacatgttttaaccattgcctgaatcagtcactttattagaagttacaaaaatgaatttctaattccatcattcctctcacatttatttgcttggttaccctgagatatggtccctagatgaaagatggggaaattatgggattctctccttttcatggatggcccactctcctttgaaagtggtgatstgacccttctt

SEQ ID NO: 75978 - DNA, 658 bp, Homo sapiens
tctactaaaaatacaaaaatcaggccgggcgtggtggctcacgcctgtaatcccagcactttgggaggccgaggcagatggatcatgaggtcaggagatcgagagcatcctgatgaacaccgtgaaaccccatctctactaaaaatacaacaacaacaacaaaaattagctgttagctgggcatggtagtgggcgcctgtagtcccagctactcaggaggccgaggcaggggaattgcttgaacctgggaggaggaggttgcagtgagccgagatcacaccactgcactccagcccgggtgacagagtgtgactccgtctcaaaaaaacccaaaaaaacaaaaaaaaccctaaaaattagccaggcgtggtggcccacatctgtaatcccagctactcgggaggctaaggcaggagaattgcttgaacccgggaggcagaggttgcagtgagcccagatcacacctctgcactcctggctgggtggcagagtgagactctgtctcaaaacaaaaacaaaaaaccaaakagtcttagaggagtagtgggatggagaagtgttatgagcagaaggctctgccgcagagagacagaagttgagaagggcagggtggtgacggtggagcttcaggaaccaggagcagggacttgtgggatcc

SEQ ID NO: 75979 - DNA, 658 bp, Homo sapiens
tctactaaaaatacaaaaatcaggccgggcgtggtggctcacgcctgtaatcccagcactttgggaggccgaggcagatggatcatgaggtcaggagatcgagagcatcctgatgaacaccgtgaaaccccatctctactaaaaatacaacaacaacaacaaaaattagctgttagctgggcatggtagtgggcgcctgtagtcccagctactcaggaggccgaggcaggggaattgcttgaacctgggaggaggaggttgcagtgagccgagatcacaccactgcactccagcccgggtgacagagtgtgactccgtctcaaaaaaacccaaaaaaacaaaaaaaaccctaaaaattagccaggcgtggtggcccacatctgtaatcccagctactcgggaggctaaggcaggagaattgcttgaacccgggaggcagaggttgcagtgagcccagatcacacctctgcactcctggctgggtggcagagtgagactctgtctcaaaacaaaaacaaaaaaccaaatagtcttagaggagtagtgggatggagaagtgttatgagcagaaggctctgccgcagasagacagaagttgagaagggcagggtggtgacggtggagcttcaggaaccaggagcagggacttgtgggatcc

SEQ ID NO: 75980 - DNA, 975 bp, Homo sapiens
gcatagtattgctttgcatatttgtaaactttatagaaatactgccctactatacatatccttttgcagtctcccttttgcattgaacattatttttgagatttattcacactggtatgtgtagatctagtatatattcattttatccgccatatagtgttttattcatctatctctgattgatgggtttttctttttctttttttctaccgtgagccctgcagcagkgagcattcttgtgcaaaccttggggagtatacgcaggagtggaatcacatcagggagaaggacaggcaaaacaaagtcatagcccaacaactttcccaccatgcagagctagcaggtgattaaacccaggaaatccctggcaggactgatcaaacagggtttagcagcttgtgaaatgggactttatttctttagctaatcccttgttggggagggggagggagatctgagatctgacttcagcatgatctggaggtaggcgagcccagactatttaaaatatttgctgatcacagagatgggccttttgagtgacaagagaatggcagagtgtacctttactcccctttctttgagtcatgccataaacagcatttactctgctttggaaaaatgcaggggtaagaaaaagcatagagtttggagtcagagagagccaagtttgtgtctgtatgtctgccatttaccagttgcatgaccatgttaattatttacattctctgaacctcaattttcttatctgtgaaatgagtcccactgatgtcccctgctttcagcatcagtagtgccactgccctgagttgtctggattgggctgtagccagaaacctcaagtccaccatgccacggttccttgagtcaagtcctgttggctatagaccttcaggtgagctctgaatgttgatgtttcctcctcacccaggatttactgcatctgcaaagcactctgactgcctgccagggcct

SEQ ID NO: 75981 - DNA, 589 bp, Homo sapiens
cggggagagtttttaagtaggaaagtgataagacattgggggataagatggagacaagggcattaattagattgccatagtagtttaggcaagaggattcaatgctaacaagtataatggcagtggaagtggaaaagaggggatttaggttaggggtctccaactcacgtacagaaatcagctaagtaatgtaggtaagtgaaatgaactgagttgggactctggtgaactgggcagccctttcacagctccagctgattgttgccttgcgacaatattgtctctgtgtgatcagatagtcagttttcaaaagaatccagaagtccagaattgtgtatttactcacgttgaaatgttgaatttaaaattttttggccrggcgtggtggctcatgcctgtaatcctagcaccttgggaggccaaagtgggcggatcacctgaggtcaggagttagagtgaaggggtgggttgcccctccacacctgtggatgtttctcctaaggtggaacgagagacttaggaaagaaaaagacagagacaaagtatagagaaagaaataaggggacccggggaaccagcgttcagcata

SEQ ID NO: 75982 - DNA, 692 bp, Homo sapiens
cgggctaagctcgggaggaggtcccctttggtggggccatttcgggaaagtatgtcaggacgtaagtgcttcactgaagacaggatctgattttttcctaactggttccctatgtcctgccttctggtgcgttttctttagatcttggactactacgggccaacattagctaacatttatggagcaccgttttaagcacactatatgaatcgattaatccaccaaaatcccaagagctaggtaggatgacaacccccattttattgatggggaaccctaaagagctccggcggtgctgcctgctgcaactcctgcctgatcaatatggttgcagtcagctatagactgttttactgagaccggacaacattagttcagtcgtttgtggtaaacatctacgtgtacaagcacactttataaacattyttttctttcttttttttttttttgagacggagtttcgctcttgttgcccaggctggagtgcaatggcccgatctcagctcactgcattccacctcccgggttcaagcaattctcctgcctcagcctcctgagtagctgggattacaggcatgcgccactgtgaccggctaattttgtatttttagtagagacagggtttctccatgttggtcaggccggtcttgaactcctgacctcgggtgatccgcctgcctcggcctcccaaa

SEQ ID NO: 75983 - DNA, 548 bp, Homo sapiens
  misc_feature (1)...(548): n = A,T,C or G
annnnnnnnnnnnnnnnnnnnnnnnnnnnnnnnnnnnnnnnnnnnnnnnnnnnnnnnnnnnnnnnnnnnnnnnnnnnnnnnnnnnnnnnnnnnnnnnnnnnaggtcctgctgcaccccgacttttgagttttaggagtattcacatagcatagatgattcaggcaccaaatcctcatgatgtctttgctaaggccaagaggttttctttgatgtttgcctttgaaggtgtttttaatgtttgaatttacccttttcctggtgttattgtccttcttgggccctgtctttgtctgatagtgtcttacctgactttcagaggcctaaacttttttctcaatcctttccaaccctaggttactaggattcatatatgccccaggagtatctggaagctttattacttgcttttctgcctattgtatcgattcatttccattctttttttttttttttttttttttttttttttkgctatggggtttcattctgttatccaggctggagtacagtggtgtgatcacagctgactgcatgcagcctcaaccac

SEQ ID NO: 75984 - DNA, 1354 bp, Homo sapiens
tgcatggagaaaggtgggacaaggctgtttgtcctcccgtaagagaaagaaatatattctaaatgtgagagttgtgacaggacaccgatcctgtgcctgggaatcagatctgtggcaggatggggaagacagctgccaaagtccagaaagatgctggacaagcctccagtgatacggggagcaaaaggtcttttcaatatttggccacagcttgatggtggccctccagatcagaaattcattgcctgatggatcaggaaaccataccagggaattttgttaaagataaaacatgagagctttcagcacaatgctgacccatacatagatgttaatgtctctgtgcacatagggcttgctgtacttgcagtgtgtgaagtgaggaatatctaaatggacacttctatatttgtttgcagagaatgatgaaggtgataatgaaaatgataaagatgaagagattcataaaggatgagaatcacctgcccccaggtaacactgaataatcaggcaggtagtgggtggataaaccatggaaaaggtcttagaaagaatacaagtgagttgaaggtagtcacagattccagatggagggtaaagaaagctgcagagtgtgctcatttcatgcgctcacccaacaaggaaatagccctagtccattgtcttcatggtccttgtaagcatgaccctygataaacccaccagccctagggatttcctgcattcacagagaactgttctctcctgtaatgaaaaccaggaggagatgcaaagctgctttctacatgattgtcttcaggttcttgttaagaaagataaatagcaaagaggtgggccaggcatggtggctcacacctgtaatcccagcactttgggaggccaatgtgggtggatcacctgaggtcagcagttcgagaccagcctggccaacatggcaaaatttcgtctctactaaaaatacaaaaattaaccaggtgtggtggtgggtacttgtaatcccagctacttgggaggctgaggcaggagaatcgcttgaatccgggaggtggagtttgcagtgagccaagattgtgccactgcacaccagcctgggcaacagagcgagaatgtgtctcaaaaaaatagtaaagaggtaacaaacagaggaattatttaggaagtttctagaaaatataaacatcaagagaagtacctagaaaaaaattgtacatttcacaatattaaaaaaaaaaaagacctagaaggcacaccatttctggagcctacagtggctcaagagcctgtattcctttggccacagtatttaaattcaacccaactttggcacacgatgtagcagctgttatggttctcc

SEQ ID NO: 75985 - DNA, 519 bp, Homo sapiens
gttagtctggggtggggcagtcataacatctttgagaaaaatattccccagtaattccaatgtgtactccaaattagaatttactcatctagattttaggcaactggcatatrtttctgaagtaaaatagttttatcttctttcattatagataaaaataaaatatagaaatagtatgactttatttcggccgaaaattaagacctggttgcagactagtcaatattgtaggatattcaatcccccaaattctcacttttctccttttatgtcccctctttcagttttggctaggaatatatgaaaaaaaaaggggaataggtttcatatgagtcagtagaatgatatagcttccaaagaaataattaaatctagcatcattaaaaaactataatgttctagaacattacaactgttgttctctaaactggccagaccacacctaatgatacattttaaaagtgaagctggagtgcgtttaataaggagagagagaaaaattttttaagggatttgaaa

SEQ ID NO: 75986 - DNA, 816 bp, Homo sapiens
tgcatatttcttccctccctttgtaatatagtgatagctccttaagtaaaggactcatgtttatttgcctttgtattgcaagcctagaccactgcctagcacataagaggtatctaataaacatctattctaagaaatgtcagtttagccttgaggtaaattaaattctaaattctgatgtagaaacttcttatttgaggatctcagcttatgggctaccttagccaatttccagttatgttaaaagcctgaactggactgaaattgcagaatgggagccagatctcttttctctcataacattagctatacactgaaatatgcaggagcaagtcaggattacacagatacaacctgctttaggctgacagcagactgaaggcctaccaccacagaactctaattcagactstcttccttcccaccttgtcttggaacccttggaagatctctgaacttcagttcctcactgttcttcaacattcttcagataacatatactgaccttttagtatgtaccaggccctctgctaggggctggagaagcaaatatgaccatacagaaaatccctatctttctggaatgcagagccaagcaaggaagactgtgttagcccattctcatgctgctataaagaactgcctgaggctgagtagtttctaaaggaaagaggtttaattcactcacagttctgcatggctggggaggcctcaggaaacttacaatcatggcagaaggaacttcttcacagggtggcaggagagagaatgagtgctgagtgaaagggaaagccccgtataaaaccatcagatctc

SEQ ID NO: 75987 - DNA, 523 bp, Homo sapiens
tgtatcacatatgcttatatatttataacaattgattaaaagaaaagattccattaaatctaaattgatacagcttcaaataagattgtccaccaaaggatattttcatcaagagtgtaagtggatgctgttgaaaactttttttctttgtattctgccataggtttagattttggcatctgacactttctttccctggaagaccttggaagaaatttctttgccttcaaataagaataatagaagtsgcattcaaaataattgttgccttaagtttgattttgtgacaaagataaaaaactgtggttttatccctgtgctattaatgggaacagtgctgatacaatcactcccttttcctgccccacagtgagagtcagtgtgaaatatctgtttagaaactgaattatattttattgatatattgcaaatgtaaaacatttcctcacaagtacgttaataaaaatccattcttttaaataaatgagaatactctttccctactggattgagccacctaaca

SEQ ID NO: 75988 - DNA, 604 bp, Homo sapiens
catcaaaaacactcactattggttacggtaagatgtaattataccataggcctttggaatgctcagaacacagctgatttaataatttttaagacctttactttgaaatgaaaactaaaaaaactagagttaattaagagtatgttggcaaaaatggtaaaaatttaaatattataaccagaggaaagcaacagaggttcttcagcctgaaaacattacccattattgggcatgagagggcatgaaagaaagatatattgacatctttaaagggattccttcacgtgttgctaagagagtaaaagaaggctcaggtgaaagctatgaagagaagacttgaaatttagtaggggacaaataattgagaaataagattgtacataaaatagaatggctggctcgtgtctcattccctagttaatttattctttaaatatttgtattgactgcatactttatactaagtctttgctggtagatgggatatcraaatgaatcaaatgtggccaatttctgctttagagatgtcatagttttggggagaagaaaaattgtagacaaatgactgcaatcaagttctatgtttaatgatggaaaatattga

SEQ ID NO: 75989 - DNA, 1286 bp, Homo sapiens
ccagatactcgggaaattgaggtgggaggatcacttgaggccaggagttccagaccagcctgggcaacatagtgagactccatctctacaaaaagtaaaaaaaaaatttagtcaggcatggtggtacttccctgtggtcccagactatttgggaggctgaggtgggaagatcacatgagcatgggaggttgaggttgccatgagccgtgatcaccactgcactccagcctgggcaacaaagtgagaccctgtctcaaaaagtagttaaaataatagggaagaatgcaagatgctcctggagcaggatgggtgatgagtatcatgaatacaatagcagtaggtgtctctccagatccatcacaacccggcaggtgaaccctgcgctccattccaggctgcatctgatcctggcttggggctttgccaccaggtcatcctggaactttgggacccaactctcctggctaggtggtattgggcaagttccttgacctctcagggagtcactttccccaactgtccgtggggtaattatgagatacaccttacagggctcttatgaagcttgagttgacttgcagagcgtttaccattgtgctggcacatgatagacacaatatgtccttgctactgttattatccagcaagtcacttcacatttcagggtgtctgtacaatgcgggattcacactagatcagcgtgccttcaagtactgtccttgcactccctgcctcagaatcatctagaaaaccagttaaytgcagattcctaggccttgccccaacctatagaatcatttccaaacatctgcattgtcaacaagtcttccagctgagtcacaaaaggttgaagcccatggaatagggtacagttgctaaggtccctttccactcagacattttgagatgctgggggttttctgatgatctgcccagcctcttggcctctgcttccaacttggtaatggaagccaggtcttgacgctggaaggttctacagaaacctagccatgggccattcttagaaaatcatagagctctaaaatggaaattctgtagccattgcatgtcaggacactgaagaccagtgagaagagggcatttgtcgcacagtcagctagcgatggagccaagaacacagtcctggtgtcctgactgggataaaaggtgtgtgcacacatgcgggaacacacacacacacacacactgttattcttgctgtggatggcccatgctgtgtctacagcacaaggtcaaggtctggtccgctgtcagataatttgctg

SEQ ID NO: 75990 - DNA, 843 bp, Homo sapiens
tatttttagtaaagatgaggtttcaccatgttggccaggctggtctcgaactcctgacctcaggcaatccacctgcctcggcctcccaaagtattgggattacaggcctgaggcaccgcgtctggccctggtgtctttataagaagaggagagaaggacacagacacacacagagagacagccatgtaaagacactggaggaaattgaccatctacaagccaaagagagaggcctcaaaaggaaccaacaccttgatcttggatttctagcctcaggacgctgagaagagaaattcctgtgattgaagctgatggtctgtggtcctttgttacggcagcccaagctgatcaaagataactggctgctcattccaggggagccaaatcccatgaagacagagccttatagtgatacagcgacaatgtggaaagctttaatgagggcagaacgaactgcgttcgttcattcattcatttttcttgcagttcatctttaaatactggacgaatattgttctcagcatggggaatacaaggctgcaaaatctatggcacacaccataggggtgtcagttaggtgagagacagtccccaaaacagtgacaacgctgggctcagtgctttgaccagagtgtcccagagcaatgaggcagcacaaaggagggcatttcggcagcttggggtgagggtcgatttctgccagggaaggtccragaaccgtttgtgagagagggaggagcacaggtgtagtgggtcagagaccactggaagagggtgtctttgggatgtgcagtctttcttcacagtggggtagggtaggggggcgatgtgtgggcacaggct

SEQ ID NO: 75991 - DNA, 702 bp, Homo sapiens
agaagtttgcatttccagaaagatctctgggtgattgttttgcatgcagaaggtcggaaattcctgcttcatgtgggacagaatttagactagaatttagagaagatggggcggacaatgagagacagcctggtgggaaccaggctgcttgcatttaaatccaggccccacacctcactggctgtgtgactcctccatgcctcagtttgctctcatgaaaaatctgtaaaactacagtgtttaccttattggttgttgtgaagattaaatgagttcacatgtggaacatgtttaaagtagtgcctggcaaaggtaagggctctgaacatgtctgcygtggctactattccatgcaaggggaatggcatgaacaaagtcaaacagaagcagatggcctctttgagagaatggagtaaactgatttgtcagaagtagaaggtttagatcagtggttttcaaattatagtgtgcaaaaaaataacctagggagcttgttaaaagtttcttgcccctataacgattctgagttggtatacatgaagcctggggatctgcatttaaactttttgatgcaggttttgagcaaatgttcagaaacccagtagtttaggtagaagagggctggtatttaaagttggaaaggggcccggcgcggtggctgacgcctgtaatcccagcactttgggaggctgaggcgggtgg

SEQ ID NO: 75992 - DNA, 734 bp, Homo sapiens
ctccctgctgtggtaccagcacaggccacaggaggctctcctgcccctccaagccagggacatgtcattggggacctggtggggagctggaactcccacctctacccagaagcaatgacgactcccctttccccctcrggtgttactagaggccaagtggggaacctggccttctgttcccacgtggccatcatgttgggggcccccttccttgctggagcagtgtcagaagaagccagggaatagggaaagtttaaataagacctagcacctcataccataatacctaaaatgtccaggtttcaatggaaaatcactcatcacactgagaaccaggaagatctcacactgaatgaaaaagacaatcagttgatgccagcactgagttgacagagatgtgggaatatctcacaaagactttgaagcggccatcataaaaatgcctcaaggagcaattatgaccatgcctgaggcaaataaagaaaatataaatgagaagtctcagcaaagaaatagaagaatcaaatggaaattttattttcaaaaaattgtaaaacattttattgtagattgacaatttataactgcattatattatggggcacgaagtgatgctatgatttatgaatacaatgtggaataatgaaatcaacctaacatattcctcacctcaaatacttatcattttttgtagtgagaatatctgaaatttactcttaggaagtttgaaatgt

SEQ ID NO: 75993 - DNA, 734 bp, Homo sapiens
ctccctgctgtggtaccagcacaggccacaggaggctctcctgcccctccaagccagggacatgtcattggggacctggtggggagctggaactcccacctctacccagaagcaatgacgactcccctttccccctcaggtgttactagaggccaagtggggaacctggccttctgttcccacgtggccatcatgttgggggcccccttccttgctggagcagtgtcagaagaagccagggaatagggaaagtttaaataagayctagcacctcataccataatacctaaaatgtccaggtttcaatggaaaatcactcatcacactgagaaccaggaagatctcacactgaatgaaaaagacaatcagttgatgccagcactgagttgacagagatgtgggaatatctcacaaagactttgaagcggccatcataaaaatgcctcaaggagcaattatgaccatgcctgaggcaaataaagaaaatataaatgagaagtctcagcaaagaaatagaagaatcaaatggaaattttattttcaaaaaattgtaaaacattttattgtagattgacaatttataactgcattatattatggggcacgaagtgatgctatgatttatgaatacaatgtggaataatgaaatcaacctaacatattcctcacctcaaatacttatcattttttgtagtgagaatatctgaaatttactcttaggaagtttgaaatgt

SEQ ID NO: 75994 - DNA, 671 bp, Homo sapiens
ctgaccactggacacccctatgggcwactcaaaaagaaaagggctaaactgagctcataggctgctacttccttagcccccaaatgctctagccacatgattttattaccctcaaatttcctgcattttgaaccaccccttctacttctgccattcaagttgaggccaactcagaatttctcatacgagacaaggaaacattcatggactgagaactgcccctcacatggtacgtaagctaagcagattccactggaaataccgtatacttttaataaaagaggtataacagcaaacaggaaatgtagaaagatgaaagaagaggaaagggtggactcgtgggaagctctggactggaccctgcaggctggtcccaagtctgccgtccctctctttgtgatttgaggccagctggtctgtggctcgggacctcagtttccatatcagtaaactgagctggttggacttaatgagggctgaggtcccttccagtgctaacagcctctgatttttcctggaagcacacttacatttcttgccacttattgattcgcttcaagtaccacaacagggagaggcaatcccaggttgtacccagggctccccactgccagcaaagaggctctgagcacagaacttccctaaacgcagtgcaaaggaggcccggatgg

SEQ ID NO: 75995 - DNA, 671 bp, Homo sapiens
ctgaccactggacacccctatgggctactcaaaaagaaaagggctaaactgagctcataggctgctacttccttagcccccaaatgctctagccacatgattttattaccctcaaatttcctgcattttgaaccaccccttctacttctgccattcaagttgaggccaactcagaatttctcatacgagacaaggaaacattcatggactgagaactgcccctcacatggtaygtaagctaagcagattccactggaaataccgtatacttttaataaaagaggtataacagcaaacaggaaatgtagaaagatgaaagaagaggaaagggtggactcgtgggaagctctggactggaccctgcaggctggtcccaagtctgccgtccctctctttgtgatttgaggccagctggtctgtggctcgggacctcagtttccatatcagtaaactgagctggttggacttaatgagggctgaggtcccttccagtgctaacagcctctgatttttcctggaagcacacttacatttcttgccacttattgattcgcttcaagtaccacaacagggagaggcaatcccaggttgtacccagggctccccactgccagcaaagaggctctgagcacagaacttccctaaacgcagtgcaaaggaggcccggatgg

SEQ ID NO: 75996 - DNA, 858 bp, Homo sapiens
catttcagataagggactatgggccaggcgcagtggctcatgcctataatcccagcactttgggagaccgaggtgggcagatcacttgaggtcaggagttcaagaccagcctggccaacatggcgaaaccccacctctactaaagatacaaaaattagctgggtatggtggtgcatgcctgtaatcccagctgctcgggaggctgaggcatgagaatagcttgaacccggagttggaggctgcagtgagcccagatggtgccactgcactccaacctgggtgacagcgtgagactctgtctcaaaaaaataagggactatggagctatgctattacggcattgtggctgggatcaaaagagacaacgtacatctagccttcggctttaggagcagaccgtcctagagggtgctcaggttcccatgtagaaagagagagagaaggaagcattcctttggggctgcctctctccttccccctccatgctcagtcttggaactcactgttcttcactcctctcttctgtctactcaaacttgactcatccttcagaattcagctgaagaacccttcttcccgaaatggtcctctctctctccaaacccctactgcaccaggtaaagagcatgtggctggggaggytggatgtgtcgcatctcctttccaccttcaggcggctggcagtgacagcttccatcactgagctaagacagactctcatgcagcaagtggccaccgtggcaaagggtggccatggagactgatgctgaactgtgagtgggcaagggggcaaggcagcccacctgataagctcaggccctgcctgctgggcattaacagggcttgacaaatgaatta

SEQ ID NO: 75997 - DNA, 608 bp, Homo sapiens
ggcagcctggacggggccagccttctcgcagcctctgccagtctccaggtgtctggggctgctgtgggacattgaatggggcagcaggaataggggggccacttttggggttccaaaaccagtcagggaggacctgggaagctgccagaggcacctcagtgggcaggagagcgcgagacaatggaatgactgggaaatggcaggtgagaggagggaggatatgggcaattgagcatggggacggcaaaggtggggccgtggagaggatgggccaggctattcacagcccagtcactgcagggaaggactgggtgcggagggggccgcaaatggccttgccacctcctggcagccaaagaccagcttggggtcaggggggtaatgaaatcagacttcgactttgtggcatcatgaaggtggcggcagaagggtggggcctggagcccgcagcctgggtgaggggcccaaccatgacctccctctcgggtggtcctgggcccagggacttcctggccctgggcttcaactataaaaaagaggccataacaacagtmcctctctcacaggggtgacaacctgcaactacatggcatcgtgcacgtggatcc

SEQ ID NO: 75998 - DNA, 892 bp, Homo sapiens
tggtagccgcctagaaaacttccattccattatccacaatggcctgcactgccatctgaacaaggtggggcctaagggacaccctgctgatgtggggaagcagggatggaggtgggagagtggggagggggagattcagaaccctaggagtttgcaggtggggtcgggtaggtttactaacgccttctcactcaaaatgtggtctgcacaccagcagtggcagcatcacctggagacctaagaaaatgcaaaatcttgggcacactctagaccttctgaatcagaacctgcattttaacaagatctctaggtgattcctgcactggttatagtttgaaaagcgtcgatttaaagatagttcccgaccttggctgcatatttagaatcactcggggagcttttaaaaatcccagatgccaggcctggcgcagtggctcacgcctgtaatcccaggactttgggaggctgagggagttccagaccagcctggccaacgtggtgaaaccccatccatactaaaaatacaaaaattagccgggcatggtggtgggtgcctgtaatcccagctactcgggaggctgaggcaggagaattgcttgaacctgggaggcagaggtggcagtgagctgagatcgtgccattgcactccagcctaggtgacagagtgagactccatctcaaaaattaaaaaataaaataaataaatrataaaaaatcccagatgcctggctgcatcccagaccaattaaatgagaatctccgagtggagcacaggcatcagttgctttaaaagctctccaggtgatcccactatgtagccaaccctagctccactgtgcgttccctggaccagcagcgtctgcatcacctggtagctcgctggaaatgcgaa

SEQ ID NO: 75999 - DNA, 617 bp, Homo sapiens
ttctcagatccagtgacctgtaaagaaacaaagcttgtcaggtttcatatttctgaatcaccgcttatggctcaagcagaaatatttcttgacctgtcaaggagggaaaggtggacagaatgatatgaaagtgatatctgcctgagttgtgaaaccaggtagcttgggaggtgcagaggctcagaatctgagttcaaatgaggcagactaggttccatccctgggggtaggctccagggccccacatggagatgaggcacaaggacaagcaggggcgaggaggttccttgcaatgaggagagtccagggctcacccccagcagcctcttggtgactcgtcacttctaaaacccaggcctgaggggcatttgttttgccatcctttgatggagttcacactctcacacaggcgggtacatattaaggccrtgaagacttggctccgactccagtggcctctcataaggcaggctggctggagggtgcagatgcctcggacataccacctccatgaacacattcccagatgtgcacgggctgcagctggaacacatttctggcctttttgtttggggcctgactgggagttacacagccaggagccagctgacggaaag

SEQ ID NO: 76000 - DNA, 715 bp, Homo sapiens
aggggcagtccaggagtctatggacaaatgtctcactcccagtctgttttgggcctgcagctttgcctttgtctagctgagcagatcagggtgggtttgtgtgacttctgggtttgtgtgtgtaggcagctgcattgctggttgcagctgttcctcggtagaaagtatgtacttgtgtgtttccctgtatgtaagtattcacatctgtrtaagcccatgtatgtgagtatctttgagggaaagtgtgggcctctactgcttgcatagttgaattggtctaccacctgcctacgtgtgtttgtgggggtactcatgaggttattttggtgtaaataatatgtcagtgagcctctgaaagcacatatgcctatttgtgcagaagcattcattcactcattcttgatttatgatttactaatttacttggacatttttaaagtacttgttctgtgattgtccccacactaggcactgggaatctgaagaggtgtctgtggccagagtaaagccagagtgtggccatctaaagggtgggcccaggacaagggcctcatggaaaggaactgtggaaagtagagaggtaagaacaatccggccgggagcggtggctcacgcctgtaatcccagcactttgggaggccgaggcgggcggatcacaaggtcaggagatcgagaccatcctggctaacacggtgaaaccccacctctactaaaa

SEQ ID NO: 76001 - DNA, 614 bp, Homo sapiens
gattaaataaaataatgtgtgtaaagtgttgagcatgggccaggtgtggcggttcatgcctgtaatcccagcatttcgggaggccaagtcaggagcatcacttgaggtcaggagttcgagaccagcctgggcaacatagccagacccctgtctctacaacaaatttttaaaaaattagcccagcttgatgacctgtgccgatagtcctggctactcaggaggctaaggctggaagactgcttgagcccaggaggtcgaggctrcagtgagctatgatcacaccactgcactccagcctgggcaacagagcgagaccctgtcttgggaaaaaaaaaattgttgagcatgatgccaggcacatagtagatgttcaataaatattagcttctgttcttatctacagactttccagctttcatatcttacaaatgttgggttcagtagacacgttgacaaattgaattcatgtaaaccacatgtttagggaattctggccctatggtggttgggggtggggacagtgggggagaaaatctggccctttcttcggtaccttctaagaagttgccaactgagatctgtgtgagccactcccttcaccccattctctgatg

SEQ ID NO: 76002 - DNA, 529 bp, Homo sapiens
tgtgcaattagcgccgcgctgcatggttgctcggctgtcaagtcatcgaactgtgtgcccgagtgtgtgcgagtgtgcgtgtgtcctcgcttcccgggcwcccagcatccaggacgcggggcctttcactactcttctgtgtagtgacacagcggggctgctgtggtcagcgtgggaggggatattttcatctggaaactggggaattcgcccctatcaactgggagcctggaatgggtctgagagggggaacaatggagagctggagttggggggcttgaggggtaggccagggatttcttttcttttccatttcttttcttttttttttttcgacagggtcttgctctgtcatcctggttgatcctggttggagtgcagcagcacgatcgcggcttgctgcagcctcaacctctggggcccaaacaatcctcccacctcagcctcccaagtacctgggactacaggcctgtaccaccacacccagctaaggtttttttttttattattattatttttagtagaaact

SEQ ID NO: 76003 - DNA, 529 bp, Homo sapiens
tgtgcaattagcgccgcgctgcatggttgctcggctgtcaagtcatcgaactgtgtgcccgagtgtgtgcgagtgtgcgtgtgtcctcgcttcccgggcacccagcatccaggacgcggggcctttcactactcttctgtgtagtgacacagcggggctgctgtggtcagcgtgggaggggatattttcatctggaaactggggaaytcgcccctatcaactgggagcctggaatgggtctgagagggggaacaatggagagctggagttggggggcttgaggggtaggccagggatttcttttcttttccatttcttttcttttttttttttcgacagggtcttgctctgtcatcctggttgatcctggttggagtgcagcagcacgatcgcggcttgctgcagcctcaacctctggggcccaaacaatcctcccacctcagcctcccaagtacctgggactacaggcctgtaccaccacacccagctaaggtttttttttttattattattatttttagtagaaact

SEQ ID NO: 76004 - DNA, 529 bp, Homo sapiens
tgtgcaattagcgccgcgctgcatggttgctcggctgtcaagtcatcgaactgtgtgcccgagtgtgtgcgagtgtgcgtgtgtcctcgcttcccgggcacccagcatccaggacgcggggcctttcactactcttctgtgtagtgacacagcggggctgctgtggtcagcgtgggaggggatattttcatctggaaactggggaattcgcccctatcaactgggagcctggaatgggtctgagagggggaacaatggagagctggagttggggggcttgaggggtaggccagggatttcttttcttttccatttcttttcttttttttttttcgacagggtcttgctctgtcatcctggttgatcctggttggagtgcagcagcacgatcgcggcttgctgcagcctcaacctctggggcccaaacaatcctcccacctcagcctcccaagtacctgggactacaggcctgtaccaccacacccagctaaggtttttttwtttattattattatttttagtagaaact

SEQ ID NO: 76005 - DNA, 723 bp, Homo sapiens
cttttgaagcactttctaccaaactactaacagtgggtattatttttgttctcaaagaaaagtgaaaaactttatgaaattggtttgactagaatcttttcacactatcatatttatttatttatttatttaattttttttttttttgagatggagtctcgctctcgctctgtcgcccaggctggagtgcaagcacaccaccacaccctgctcatttttgtatgtttagtagagacagggtttcaccatgttggccaggctgcaggctggtcttgagctcctgacctcaactgatccaaccgcctcggcctcccaaagtgttaggattacaggcatgagccaccatgcctggcctctatccctttttttttttttttttttttttttttgagacagggtctcactctgtcgcccargctggagtgcagtggtgtgacctcggctcactgcaacctctgcctcccagttcaagtgattctcctgcctcagcctcctgagtagtagctgggattacaggcatgcaccacaatacccggctaatttttgtattttttgtagagacagcgtttgccatgttggccgggctggtctcgaactcctggcctcaagtgatccacccaccttggccttccaaagtgctgggattacaggcatgagccaccgtgcctggactttctatcacctttctaaaagaaatttcaagagtggacccataattttgtg

SEQ ID NO: 76006 - DNA, 723 bp, Homo sapiens
cttttgaagcactttctaccaaactactaacagtgggtattatttttgttctcaaagaaaagtgaaaaactttatgaaattggtttgactagaatcttttcacactatcatatttatttatttatttatttaattttttttttttttgagatggagtctcgctctcgctctgtcgcccaggctggagtgcaagcacaccaccacaccctgctcatttttgtatgtttagtagagacagggtttcaccatgttggccaggctgcaggctggtcttgagctcctgacctcaactgatccaaccgcctcggcctcccaaagtgttaggattacaggcatgagccaccatgcctggcctctatccctttttttttttttttttttttttttttgagacagggtctcactctgtcgcccaggctggagtgcagtggtgtgacctcggctcactgcaacctytgcctcccagttcaagtgattctcctgcctcagcctcctgagtagtagctgggattacaggcatgcaccacaatacccggctaatttttgtattttttgtagagacagcgtttgccatgttggccgggctggtctcgaactcctggcctcaagtgatccacccaccttggccttccaaagtgctgggattacaggcatgagccaccgtgcctggactttctatcacctttctaaaagaaatttcaagagtggacccataattttgtg

SEQ ID NO: 76007 - DNA, 2151 bp, Homo sapiens
catctttgtaggaaggtctggcctggggtcgggtgaaggagggcccaggtcagttctggggtcccagtgacctgctttgccattctcctggtgccgctgctgctccctgtttctggagctggatgttccccagctggcagttgagctgcctgagccaatgtgtctgtctttggtaactgagtgaaccataataaaggggaacatttggccctgtgtgttctgctgtgtcatgtgtcttcctgtggacttgcgtggagcctcacagcgggctgtggggcaggggcatgaaagtatggggggtgggtggatctgtggtctgtcattccccgagacctagagctatacgaccctgtgtggctccttctctgaggcagccttcagtaggtgatgaaattgccacctaggccccctgccttgggaggaggaagtagaagaagcaggctggatcggccgggcgtggtggctcacacctgtaatcctagcactttgggaggctgaggcgggtggatcacgaggtcaggagatcgagaccatcctggctaacacggtgaaaccccatctctactaaaaatacaaaaaattaggcgggcgaggtggcaggcacctgtagtcccagctactcgggaggctgaggcgggagaatggcgtgaacacaggaggcggagcttgcagtgagccgagatcgcaccactgcactccagcctgggcgacacagcaagactccatctcaaaaaaaaaagacacggctggatccctgcgtaagggatggtttggcccagatggtccactgcggctaagggcgggggtagagcagaggccccacctcagctcagggcaggggacccgcagctggttcagccacctcaatgaatacagaggttcctggggcctgtgaaggctagaaaatgaagggggcagggaagcatgccagtgtgtgttcttctgccgccttccctttgcccatttgatgccttccacctggatcgctattgggatcctctatctaacctcctggctgtccttcaagattcatttcaagtcactccttcaagaaggctttcctgcctagaggtgttgcttcctcatggaggatcttaccctgtcattttctgtgtccctgtttgtctcaagaacagggacgcatctgatttatctctgtatcctgtgcacctaaaatagaagaggcttggtaaatattaagtgccacgagccctcttttactaaggacctgccaacatgggccccattcacactaataccatgaagatagcccttttctatacttcgtcataaaaaagtaatacacacacccgggcagcaacttccacacaaacaacacatgtgcaaggagatcaccattatttccagcaaaatgctccccagggccgagcgtggtggctcactcctgtagtcccagcactttgggaggccaaggtgggcggattgtttgagcctaggagtttgagaccagccygggcaatagagtgagaacccgtctctacaaaaaatacaaacattagtctggcatgatggtgcactcctgtagtcctggctactccataggctgagataggaggatggcttaagcccaaaaggtggaggttgcagtgagtggagatagcaccactgcgcactccagtctgggtgacagagccagaccctgtctcaaaaaaaaaaaaaaaaacaaaaaaaaaaacagctccccaacaagatagcaggctacaacatgcatgtgatgaagctgatttgaagcgctcagtgagaggtatctgcatcaagttgcaggaggagaagagagaaaggagagataatcatgttcctgaggtctcagccctggatcaggaaatcattgaagtattaacatatcctgacattaaggaaatgctgatgtttttggactttggcagtctgtccaacctgcaggtcactcagccaacagtggggatgaatttcaaaacgccacgtggaagctgtttgaatctttttgagatactgtaatattttcaataaacctgggacaacagcaaaaaaaaaaaaaaaaaaaaaaaggccccaagcaacaagcagtgtgtgtggggctgataggagtgaggaaaggaggtcggacagttatgccagcccctatcgagagtcccagcaatacaaagaaca

SEQ ID NO: 76008 - DNA, 1273 bp, Homo sapiens
tacaataatgaatcattattcatttattttgtttgttttaaagccctgagcttaattttctatattaattcattcaaaatattaattgtctgtatcacatgacaggcattgttgtgggtgctggggatatggcagtgaacagcacaaaagttgtttctgcttgtggaggtcacatttcagtgagacgaaaacaacaaagtgtgtgtgtgcatccctgccccccctcccccaccgtggcactgagtcacccggggagctgaactctcctttgcctctacagccagcacatgaaatgcagctcaaagccacttgaaagcactcacttggtaacaggcygctccctagtgtggcagacaccactggtgccctactcagcatccattctccttttcttccttactaatacaaccctgattttattggcagaggcaatgtgcccagctaaaaggtattttccagccttccatgccaaataggagtgactgtatgacagtttaggccaatgggagataaacagaaatggttggatagggctttttggagctaattaaatggggatgcagactcggctggcatgcccattgtccctttgcccttccttcttccagcttcttgcaatgcagccatgatggctggagttgagaagccctctcaaaactcttgagggcagctgggcacagtggctcacacctgtaatcccagtgctttgggaggccgtggcgagctgattgcttgagctcaggagtctgagaccatcctgggcaaaatggtgaaacccggtctctacaaaaaatacaaaaattagccgagcttgatggcatgagcatgtagtcccagctacttggggtgttgaggtggaagaatcgcttgatgcctgggaggtggaggttgcagtgagccgagatcacgccactgcactccagcctggatgacagagtgagactctgtctccccgcgcccccaccgcccccccaaaaaaaacttctcaggaaaaggccaagagaatttcagagacctctaccctgtatcttaaagtcactgagccaagtcacttatttggatttctcattatgtgagaacaagcagaggtatcttgtttaaggcattgctatttaatatttgcattttctgttatatgcagccaagcttaagccatacttgagatgcaaagaatcagccgtgtttgttacctgtggcagccatgagaatggcttctcaaatctctgactgcaggaagtataattaaccaaggactccagctgctgcctctgaa

SEQ ID NO: 76009 - DNA, 1273 bp, Homo sapiens
tacaataatgaatcattattcatttattttgtttgttttaaagccctgagcttaattttctatattaattcattcaaaatattaattgtctgtatcacatgacaggcattgttgtgggtgctggggatatggcagtgaacagcacaaaagttgtttctgcttgtggaggtcacatttcagtgagacgaaaacaacaaagtgtgtgtgtgcatccctgccccccctcccccaccgtggcactgagtcacccggggagctgaactctcctttgcctctacagccagcacatgaaatgcagctcaaagccacttgaaagcactcacttggtaacaggctgctccctagtgtggcagacaccactggtgccctactcagcatccattctccttttcttccttactaatacaaccctgattttattggcagaggcaatgtgcccagctaaaaggtattttccagccttccatgccaaataggagtgactgtatgacagtttaggccaatgggagataaacagaaatggttggatagggctttttggagctaattaaatggggatgcagactcggctggcatgcccattgtccctttgcccttccttcttccagcttcttgcaatgcagccatgatggctggagttgagaagccctctcaaaactcttgagggcagctgggcacagtggctcacacctgtaatcccagtgctttgggaggccgtggcgagctgattgcttgagctcaggagtctgagaccatcctgggcaaaatggtgaaacccggtctctacaaaaaatacaaaaattagccgagcttgrtggcatgagcatgtagtcccagctacttggggtgttgaggtggaagaatcgcttgatgcctgggaggtggaggttgcagtgagccgagatcacgccactgcactccagcctggatgacagagtgagactctgtctccccgcgcccccaccgcccccccaaaaaaaacttctcaggaaaaggccaagagaatttcagagacctctaccctgtatcttaaagtcactgagccaagtcacttatttggatttctcattatgtgagaacaagcagaggtatcttgtttaaggcattgctatttaatatttgcattttctgttatatgcagccaagcttaagccatacttgagatgcaaagaatcagccgtgtttgttacctgtggcagccatgagaatggcttctcaaatctctgactgcaggaagtataattaaccaaggactccagctgctgcctctgaa

SEQ ID NO: 76010 - DNA, 1548 bp, Homo sapiens
tgtctctcatctgagttcttcattacaatgctggctctttcttccctttggcttttcagggaatttgttcttctattttcttgggctgataggaagcctgatcatgtggcaattgactagtagttaattggcaattgcctagtaattaataccagagaaatgactcatcctcctgatttcacttagaaggatgctccctgattcccctctttcctccatatcccacccctgaggtggtgcccctggttgcattctctatcacatcaaacccttccttcattgcactgatcgcaaatgcaactttacttttatttgtgtgatctttatataatatgcgtctattttatcactctattccaccttctagctcctaacacactgcctggcacatagtaggtacttaatgttacatgtttatatgtatataatgtgcatatatcatatatataatttatatgatatatacacaggtgtctcatatataatgtgtacatacataatacacatatctattctgaaatgactgaatgaatatcttcagtcattgactagatttgtataaggcaataacagcagtgacaagaacacaatgacattttatttttttaaggaatggactcatgattttggggtctgacaagtacaaaatctgtagcatgctgtaaattcaggtaaatactgatcttacaacagtcttgagtctgaattctgcagggcagcctttagaaactcaggcacgctttccatgttacagtcttgagaatatgttcttcctctggaaacctgtctttactcgtgaggtcttcagaacagaccagagaatgggctctgtaaaatggtgaggatggaaagaagataccaatctgctgtgcacctgtgtatagagcatccggcaggtaagattacatttcctttctcacctaagaaagactccaggaagctggatccctctttctcagtgccaagagattctccaggcctccctctaaggataaccttaaaatatccaggggattttcaattagcaacacagagctttaaacactgaactaatcttcctttgagcttgcacctgtcctttgatggactttgatgcagatcccggaggtaagaagggagcacaatkccatggggtgggggtgaaggaggagcgtgggactcatgactgctcttgtcaggggctaagctgaaccagcctgaaggtgcacaaagcctgcttgacaactgtcctccactctcatcactgtaaattagctccctgtggataatgctgcttcctattatctacagatgccaggacgttttattattcctaccttctgggtctttctgtctgtcttcactaagtgcaagagacaggcataggatgccctttgggagccctgactctatttttgtatagtagtctgcactgtgagatgcacacatgaaatttgttcacaagatgaagagaaccaccgccagagtaagagggcacggtgttaggtccttgccccactttctgcagtgggctttcaagagatgaggagggccttccctgggtcttat

SEQ ID NO: 76011 - DNA, 840 bp, Homo sapiens
ttggtgtgctgcacccattaactcatcatttacattaggtatatctcctaatgctatccctccccactccctccaccccacaacaggccctggtgtgtgatgttccccttcctgtgtccaagtgttctcattgttcaattcccacctacgagtgagaacatgcagtgtttggttttttgtccttttgatagtttgctgagaatgatggtttccagcttcatccatgtccctacaaaggacatgaactcatcattatgcccactttttgaagtaacagcatgtgtggttttgctgtggggagcagggaacaccgtgccatcttcctccatgattaatgggcttgcattattaaacagctactggtggaaggggccacaggtacaacaccttttctactgaggcacccaacgtgtgaactttcatttgcagccaacatttgctggaggaaggctgagctcaccaccacattttacttactgaaattaatcatgtcaccacttcaatagtaacctctattacatatctaattaccaaccctgtgcacggactttttatgtaacttttaaaaatttctatttcagtcatgcttagattttttaatacttaaatgctctaccaggcaaaggacgataatctgtaactattgtggttatcagagtatacatttttatgggtttttccccacaatagrtagtcaaagaactaagaaattttactggaatatcaaaaataaatatgtaagatcctttatatatgaagcatacactttccaggtgatagatggatagacttgaagacttctgcagtcctctaacactgggatcctctctcctattattt

SEQ ID NO: 76012 - DNA, 840 bp, Homo sapiens
ttggtgtgctgcacccattaactcatcatttacattaggtatatctcctaatgctatccctccccactccctccaccccacaacaggccctggtgtgtgatgttccccttcctgtgtccaagtgttctcattgttcaattcccacctacgagtgagaacatgcagtgtttggttttttgtccttttgatagtttgctgagaatgatggtttccagcttcatccatgtccctacaaaggacatgaactcatcattatgcccactttttgaagtaacagcatgtgtggttttgctgtggggagcagggaacaccgtgccatcttcctccatgattaatgggcttgcattattaaacagctactggtggaaggggccacaggtacaacaccttttctactgaggcacccaacgtgtgaactttcatttgcagccaacatttgctggaggaaggctgagctcaccaccacattttacttactgaaattaatcatgtcaccacttcaatagtaacctctattacatatctaattaccaaccctgtgcacggactttttatgtaacttttaaaaatttctatttcagtcatgcttagattttttaatacttaaatgctctaccaggcaaaggacgataatctgtaactattgtggttatcagagtatacatttttatgggtttttccccacaataggtagtcaaagaactaagaaattttactggaatatcaaaaataaatatgtaagatcctttatatatgaagcatacactttmcaggtgatagatggatagacttgaagacttctgcagtcctctaacactgggatcctctctcctattattt

SEQ ID NO: 76013 - DNA, 643 bp, Homo sapiens
tgcatcaaaaagactcgggttctgaagtgaacagaaaacctcatcatgccatttcctacttaaaagggcttggcaacagtgcaaggcagaaccctggccacgattcacaggccctctcaagaccaggccggctccagcatctggcctcctcctaacctcctctggccttgctctctcatccagtccctcctatccaggacatccagtcattcactggcacaccacrcccttcctcgccttcgggttttgggtgtgctgttccctctctaggtgcacttgccacacccccttcccactcctgctctacctggtgagcaactgtgcagcctatagggctcgacttcaatgcttcttcctcagggggcttctccccacaacagaactagatatgagcccatagcctatgtattaatataatcccatcaatgtctggcctcacctttcctaacacagtgattcctccatccaagtggatcttcctcatcacactgtgaactctctgcaggtaagggccacatctgtcttgcccaccgtgctatccctcgtgcccagcacatcataggacccgattaatagtgactagaaatcaacactgatggttagtgtgatgtagctgccaaagaaatcaaaatggtcttgagat

SEQ ID NO: 76014 - DNA, 643 bp, Homo sapiens
tgcatcaaaaagactcgggttctgaagtgaacagaaaacctcatcatgccatttcctacttaaaagggcttggcaacagtgcaaggcagaaccctggccacgattcacaggccctctcaagaccaggccggctccagcatctggcctcctcctaacctcctctggccttgctctctcatccagtccctcctatccaggacatccagtcattcactggcacaccacgcccttcctcgccttcrggttttgggtgtgctgttccctctctaggtgcacttgccacacccccttcccactcctgctctacctggtgagcaactgtgcagcctatagggctcgacttcaatgcttcttcctcagggggcttctccccacaacagaactagatatgagcccatagcctatgtattaatataatcccatcaatgtctggcctcacctttcctaacacagtgattcctccatccaagtggatcttcctcatcacactgtgaactctctgcaggtaagggccacatctgtcttgcccaccgtgctatccctcgtgcccagcacatcataggacccgattaatagtgactagaaatcaacactgatggttagtgtgatgtagctgccaaagaaatcaaaatggtcttgagat

SEQ ID NO: 76015 - DNA, 758 bp, Homo sapiens
ttgcctcctccagctagaatgtaggcatcacaagggcagagccatttgtctaataatttcactcctggatcccaagtgcccagaacagagagcccagcaatgagcaggccctcattaggcgtgtgttgaatgaatgagtcaattaatgaaatgcacatgacwaattactgtccgtgccatcttataactctccatcctagcccctgatactgtttcttggtctttcagaatgttcccaactagaatggaaaaggcaggaatttgaccctggggatggcagccattccttctggagagtttgcttcaccagattcctattagcagtgtatatggtagcattgacagctaattttatgtgtcaacttgactgggctaagagatgcccagatagttgataaaaccttatttcaggatgcgcctgtgtgggtgtttctggaagagattggcatttgaatcagtagactgagcgaagacgatcaccttccccagggtggaagggcatcatccagtcctatgaggactcaaatagaagaaaaaagcagagaaagggcaaatttcctctctctccttgagccgggtcttccatcttttcatgactttggacattggctctcagacttttagacttggactcgggcttaccccatcagtctcctagttctcaggcgtctgagttggactggaaccacaccaccagctttcctgggcctccagctggcagacagcagatcgtgggacttcccagcctccataatcat

SEQ ID NO: 76016 - DNA, 1310 bp, Homo sapiens
cctgtgcacagaagcgggtccagggaaaagttaaccaaccactctgcatggttccctcagatgtactggctgcaaaaaacatcttccccatcacacacatccaagatcaggcagctgcagtatttcagagttcaggaagtaagctccaagaatgcaatcagtcaaagaagactgcttcacttcatcgtcccatcttttacttctttttcgtttgtttttaaatgttgtcaacaaaagttcaaagtgggaaaatctaacgtgtgtcctagacgatgctggtgggcagcctggtgcaggagcagtcagtgcctggcagcctaagaggagtcagcccagccctggagagctgcagctggatgaagccctgagtaatcaggaggaaaacaagagtatgcagggctggagaggacaaaggcggacaaagagaagccaccatgaggccacaggaatgttgttccagaggtggcagccagaggccttagaactttctgagttcttccctccaatacttccgtgcctctcaactccacaaaactgtctttgcccttcttccattcctgccaaagtgccccttaacatccactcaattgtttctttttacaaagttctatatatgtgctttgtattctccaaacatatttattctgcacacgatcaagtcctcagcaataataagtaatcacttaggactacgtaccttcctcagacctgtctcaatataatgatgtattataatgcagacccttccaatgggtctccacaccatataatttttgacaagactaactcctactcagctgttctccatcgagtaggctgcattataaagctgggcaattttgtaaatcaatcaatcgaaagggtttgaaaactcttttctaaagaaagargtagtaacatcccaaacctgctttctcatcacaggagtcgtacacgtgcaggctgccctcttaaaagtggggtccccaacacttctaacctaagctgcctactcatcagctggctgagctcacccaggctggagtgcattggcgggatctcacctcactgcaagctccacctcccaggttcaagcgattctcctgcctcagcctcccgagtagctgggattacaggcgcccaccaccatgcccagctaattttttgtatctttagtagagacgaggtttcaccatgttggccaagactggtcttgagctcctgacctgctggtccacccacctcggccttccaaagtgctggggattacaggcgttaagccacccgcacctgggctggcccccattctattcttatctggactacacttg

SEQ ID NO: 76017 - DNA, 1310 bp, Homo sapiens
cctgtgcacagaagcgggtccagggaaaagttaaccaaccactctgcatggttccctcagatgtactggctgcaaaaaacatcttccccatcacacacatccaagatcaggcagctgcagtatttcagagttcaggaagtaagctccaagaatgcaatcagtcaaagaagactgcttcacttcatcgtcccatcttttacttctttttcgtttgtttttaaatgttgtcaacaaaagttcaaagtgggaaaatctaacgtgtgtcctagacgatgctggtgggcagcctggtgcaggagcagtcagtgcctggcagcctaagaggagtcagcccagccctggagagctgcagctggatgaagccctgagtaatcaggaggaaaacaagagtatgcagggctggagaggacaaaggcggacaaagagaagccaccatgaggccacaggaatgttgttccagaggtggcagccagaggccttagaactttctgagttcttccctccaatacttccgtgcctctcaactccacaaaactgtctttgcccttcttccattcctgccaaagtgccccttaacatccactcaattgtttctttttacaaagttctatatatgtgctttgtattctccaaacatatttattctgcacacgatcaagtcctcagcaataataagtaatcacttaggactacgtaccttcctcagacctgtctcaatataatgatgtattataatgcagacccttccaatgggtctccacaccatataatttttgacaagactaactcctactcagctgttctccatcgagtaggctgcattataaagctgggcaattttgtaaatcaatcaatcgaaagggtttgaaaactcttttctaaagaaagaagtagtaacatcccaaacctgctttctcatcacaggagtcgtacacrtgcaggctgccctcttaaaagtggggtccccaacacttctaacctaagctgcctactcatcagctggctgagctcacccaggctggagtgcattggcgggatctcacctcactgcaagctccacctcccaggttcaagcgattctcctgcctcagcctcccgagtagctgggattacaggcgcccaccaccatgcccagctaattttttgtatctttagtagagacgaggtttcaccatgttggccaagactggtcttgagctcctgacctgctggtccacccacctcggccttccaaagtgctggggattacaggcgttaagccacccgcacctgggctggcccccattctattcttatctggactacacttg

SEQ ID NO: 76018 - DNA, 1026 bp, Homo sapiens
ctcggctcctccttcctgcrgacatagccctgccagctgctaggcatccctccttcatgcaggcagcccctccagtttatacttcccagtgggacagtaattttcagttcaggccaaaaggctttgtttaaatgtgacacttatgtggtaatagagcgtattgcaggggtctttttttctgagggtcaatgttgaatttactctcaaaataaacaactctatccttttccatcatctcaaagttgtgggtgggattgaaaaaggtggaagagactacagcatgaagaaaacggaaggaaaagaaaaagacagggaaggctccaaggaagtttagaaaagaaggagaagaataggaaccagtgtcctccacaaatgaagcaaatctacctcctatcttcctgaatgatttcacaaataacaacagcagatatttactgcaaatctgctgtgtgccaaacagtacactaaatgtgttactgacatggtctcatttaattaattagattttttaagagatggaatctcgctatgttgcccaggctggacttgaactcctgggctcaaaccattctcccacctcagcctcccaagtagccaggactacaggctcacaccaccacacccagctttatttattttcatctgaatccccctgcagtatatgtgattatgaccattttgcagatgaggacactgagaatcagagaggtgatataacctgccctaaattgcatagctagcaagtttgtccagctgaggtgagaacccaagtctctctggctctgctgaatgtgtgctgtctactgttccttggggcagcatttgaggactgttcagtaatggagttgatgaggggaaaatcatgggatcgtatgttctaaactaagaatcgatatagagctggacacacgttataacaaagccgtgtaacatttgatattgagtctgcctagaatatataaaataaatggttgccctacaagagggtaaggctgaggtagaaagcaacaggacaagcaagggatg

SEQ ID NO: 76019 - DNA, 1014 bp, Homo sapiens
gggacccgatatgcttcccctaagactgatctgaaggacagggtgacatttaggggagctggtggcagaggaattaccccagactgaaggtggggcatgtgcaaaggccctgaagcagtggggaacttggcatgtgaggggacctgaaaagaaggctgagcccagagccaggggagagagggcctcaacttggtaaggatcctggcttttattctcaaagcaatgggaagccattgagaggttttaagcaggggagtgacaagaccacatgtgtgtcttaaggtcactcgggctacagcgtggagaatggattggagctggggtgagcagggaatcagggagagtggctgggattatgaactcagggagcactaaaccctctgcctctcccaacagcccagcagagtgctagtgctagagctagagctgtctgaatcttggctccaccaccgacgagctgtttgatcttgggcgagtcccttaggcttcctgttttgcaagtctctgcgtctgcaaaatgaggggaggtctccttgcttaacaatttttttcccctcaattgaataagttgaacaccagtcaggagtcctttacaacactgggtgggaagacgctgacaaaaacagcgactataaggcctgttttgtttggcaggtgtagactcccaccatcttccttttgttgcatagacttactgggcaatctgcagatgtgtggttggtttctggagctcaaccctgaccatagagaaatagcagctgctggatctcccagtgctgatggcaccagctcctcctgcctccagcaacaggaatgaactctgtgaccatctgtccttaactgaacttctctgagcttcagttttcttatctgtaaaatgaacctatgtgcatttattcctgcagttaakgtttgttaagtgctgctatgggccaggccctgtgctaggctctggggatattagacaagcctatttcctatccttgggagttctcatgcctcattttacataaa

SEQ ID NO: 76020 - DNA, 584 bp, Homo sapiens
tcagacaaatagtcactttgaaaagtaaaacgctgcatatacaccatgtaatactatgcagccataaaaaatgatgagttcgtgtcctttgtagggacatggatgaagctggaaaccatcattctcagcaaactatcacaaggacaaaaaaccaaacatcgcatgttctcactcataggtgggaattgaacaatgagaacacttggacataggaaggggaacatcacacactggggcctgttgtggggtggtggagaagggagggatagcattaggagakatacctaatgtaaatgacgagttaatgggtgcagcacaccaatatagcacatgtatacatatgtaacaaacctgcgcgttgtgcacatgtaccctagaacttaaagtataataataataataataatagaaaaagaaaatgctgcataacaaaataaaataatgacttagcaaattaaaagaggagggagagggcgggcgcggtagcttatgcctgtaatcccagcactttgggaggccaaggcaggcggatcacgaggtcaggagatcaagaccatcctggctaacatggtgaaactctgtct

SEQ ID NO: 76021 - DNA, 1275 bp, Homo sapiens
cccttgcctaaaggtgacagtgcatctccttccccaccccacccctcataccactgaagcacctgtcagactggcccagtctgtgggcaaggagcctagagagggcttagtttcagcttgaaaggagctgggatttaccaagaagcaaatgagagacgaggattgcaacaactgtgccatttccccagcttcagctgactcctgtatattgactgtgccttcagactcatccgtaagtgaccccaggctggcctctcccacatcacagtaagaattccacacaccatacaacttggaaagaggctccagctgaaggaagccccacacttctttcaagtttttcttagtcttctcttcttggcaaagagtaccttttgtttcttctaattatgtaactattggtttagtaaatattcacccattcagtcaccctgtaagtggcaggcactgtttacagggacacaggaaggaataaaaacttgcaggcaccttggagcttgcattctattgaagaggtaatggaagttgggatagcagctaaactatgctggtattggccaggcgcagtggctcacacctgtaatcccagcactttggaggccaaggtgggcagatcatgaagtcaggagatcgagaccatcctggctaacatggtgaaaccccgtctctactaaaagtaaaaaaaaaaattagccaggtgtggtggcgggcgcctgtagtcccagctacttgggaggctgaggcaggagaatggtgtgaacccaggaggcgaagattgcagtgagccgagatggcaccactgcactccagcctgggtgacagagcgagactctgtctcagaaaaaaaaaatatgctggtagttttgattcaagatggcctttggagcccatgatttaggtctcgtacccaccaaggtctactggaaaacatcaggctctcctgctatagacccatagggagagctgcagccgagagggggagctgaagagaagtgccccttctgtgtcctgtcagcctcatccttccgcaaggaccagttgctgtgccactccattcacttgctgcaagactggaggtttttcctcaggtgttgagcacctggtttacaagatgtcagcatcttgatgcctgagaccatcaaggcaagtctctgaacagggcttaccttagagtaaggcttagaagaggccgtaaagtcagtctcagctccgtggctctgcagagctttgggacatgtgaattcttaaaaacaagactattgtacagttwctata

SEQ ID NO: 76022 - DNA, 762 bp, Homo sapiens
agagttgcttccacattttcaggtatctttatagcagtaccctactcttctagcatcaattttctgtattagtccattttcacactgctataaagaactacctgagactgggtaatttataaagtaaagaggtttaattgactcacagttccatattgctgaggaggcctcaggaaacttacaatcatggtggaaggggaagaggaggcaaggaacatcttacatggtggcaggagaagagagagagagcttgaagggggaactgccacacacttttaaaccatcagatctcgtgagaagttgctcactatcacaagaacagcttggaggaaagcaccaccatgattcaatcaccgcccaccaggyccctcccctgtaacatggggattacaattcaagatgagatttgagcggggacacagagatgaaccattttaggcctctccccagaaaactgcacccactcactccaccatctttaaatcctattatccatctgctctgagctaaaacgtcacttcttcaagggaaaactttcttgctgcctcaacttacattaggtcaactttatcaagcaatcacatcctgtcctgtaactgtcatctaggatactcaatcacagctaaattttatagttttattatcatttgattgataccattctccgaatgtaggatgtggtttagacaaaaatggatactctttttgttcatttttttattttccctgtctggcactagggcttgcattcctaggagttca

SEQ ID NO: 76023 - DNA, 661 bp, Homo sapiens
tgcctgctaatttcttagagcccagtgatgaaaagactgagataggaagtttcttctaacagaaccatgaatcccagcagtcacagtggacatggtagcaatgggaacagattttgtggggaaccagacattcctggaggagatgcttggtgctaggactatctggtccactgggctctgaagaggggacatagctccatgctccctttctggagaatagtagatgcctacatggggtgaggtaaggggttcacctctttctctacctttgagtagcagaatagtaaaccagaaagggacctagtaggcttgaaatcataccaagaaagtccaggcattcttttaaatccagaaggctttggatttaaagccctatggaaagggagcccatgtggaaaagtgccgcagcaggtgggtgtgttccaagaggagacagagtcgggtctgatataaggaaaggcattccctgctgtcagagctgtccagttaaggtaagctcccatggagacagygaaccccatcactgaagatgctcttacacaggccgcacgaagatgctcatacgcaggccgcacgactgcccccaaaaaggtgttgcagtgggaatccatgctttggaaaagtgatgggtgttctttaccttaaaattctctccccattg

SEQ ID NO: 76024 - DNA, 661 bp, Homo sapiens
tgcctgctaatttcttagagcccagtgatgaaaagactgagataggaagtttcttctaacagaaccatgaatcccagcagtcacagtggacatggtagcaatgggaacagattttgtggggaaccagacattcctggaggagatgcttggtgctaggactatctggtccactgggctctgaagaggggacatagctccatgctccctttctggagaatagtagatgcctacatggggtgaggtaaggggttcacctctttctctacctttgagtagcagaatagtaaaccagaaagggacctagtaggcttgaaatcataccaagaaagtccaggcattcttttaaatccagaaggctttggatttaaagccctatggaaagggagcccatgtggaaaagtgccgcagcaggtgggtgtgttccaagaggagacagagtcgggtctgatataaggaaaggcattccctgctgtcagagctgtccagttaaggtaagctcccatggagacagcgaaccccatcactgaagatgctcttacacaggccrcacgaagatgctcatacgcaggccgcacgactgcccccaaaaaggtgttgcagtgggaatccatgctttggaaaagtgatgggtgttctttaccttaaaattctctccccattg

SEQ ID NO: 76025 - DNA, 1175 bp, Homo sapiens
cctacaaagcatgttgggcactgtatctcctggaatactttcaacaacctgtgagacaggttttcgtgtctccattttctggataagcaactgaagctcagagctgggaagttgcagagctactctgcagtggcggcatgcctgggcaagaagggatacatggcagagcttggtggccggatatgtgggagataaagctgagcatggatgcccggggctgttccagtgctagggccagggaaagtgagagaatcatgggtccaggccccaaactctgtgccttgggtgcccctcttgaaggacagacagggccacttatcttccctggcagaaggctgctgcctccccaaatccacaatggcttcggtggttgagccagggcattcaaggtgacactgaggttataattcaatgacaaagcaggtcatctctttcttactaattggtcatctttcttactaattgctatgcaaggccatggactgctctttagtctgagcttctctttgcctttgctcagtgcagtagctattcacaggtacaatcatagygcactacagcctcgaactcctgggctcaagtgaccctcccagtagctgagactataggcatgcaccaccacactggcctctttgccttttgaaaattctgtaaacccactcccttcccccattcccacaatgcatttctcaccacagaatttttataccatgatgatgaaggctaggtttggtgagaagtctccttgcttccagagatcaatgatctctttctctctctctctctctctctctctctctgtctccctggaaaaatgccatccctttactcactgggcctggggagcccgacatgatgtaaaccaaaataaaatgaaatggcttcattatctgccagagaaagatgattaaactggtctactttgtgtgctgatgagctatctctgaactatgtgtccattatcgctttctgtctggattagaatgacagtatgaacagtctgtgggttaattagtttcttggaaagtttattcatttctccctttccctgttctgtagtcatagagcaattcatactgagtcaaaatgctcagcttctgttccacatgatcagaaccaaacatgcatcaacttgacgtccatcacagccgatgaacagccaggtggtgtccctc

SEQ ID NO: 76026 - DNA, 1175 bp, Homo sapiens
cctacaaagcatgttgggcactgtatctcctggaatactttcaacaacctgtgagacaggttttcgtgtctccattttctggataagcaactgaagctcagagctgggaagttgcagagctactctgcagtggcggcatgcctgggcaagaagggatacatggcagagcttggtggccggatatgtgggagataaagctgagcatggatgcccggggctgttccagtgctagggccagggaaagtgagagaatcatgggtccaggccccaaactctgtgccttgggtgcccctcttgaaggacagacagggccacttatcttccctggcagaaggctgctgcctccccaaatccacaatggcttcggtggttgagccagggcattcaaggtgacactgaggttataattcaatgacaaagcaggtcatctctttcttactaattggtcatctttcttactaattgctatgcaaggccatggactgctctttagtctgagcttctctttgcctttgctcagtgcagtagctattcacaggtacaatcatagtgcactacagcctcgaactcctgggctcaagtgaycctcccagtagctgagactataggcatgcaccaccacactggcctctttgccttttgaaaattctgtaaacccactcccttcccccattcccacaatgcatttctcaccacagaatttttataccatgatgatgaaggctaggtttggtgagaagtctccttgcttccagagatcaatgatctctttctctctctctctctctctctctctctctgtctccctggaaaaatgccatccctttactcactgggcctggggagcccgacatgatgtaaaccaaaataaaatgaaatggcttcattatctgccagagaaagatgattaaactggtctactttgtgtgctgatgagctatctctgaactatgtgtccattatcgctttctgtctggattagaatgacagtatgaacagtctgtgggttaattagtttcttggaaagtttattcatttctccctttccctgttctgtagtcatagagcaattcatactgagtcaaaatgctcagcttctgttccacatgatcagaaccaaacatgcatcaacttgacgtccatcacagccgatgaacagccaggtggtgtccctc

SEQ ID NO: 76027 - DNA, 1175 bp, Homo sapiens
cctacaaagcatgttgggcactgtatctcctggaatactttcaacaacctgtgagacaggttttcgtgtctccattttctggataagcaactgaagctcagagctgggaagttgcagagctactctgcagtggcggcatgcctgggcaagaagggatacatggcagagcttggtggccggatatgtgggagataaagctgagcatggatgcccggggctgttccagtgctagggccagggaaagtgagagaatcatgggtccaggccccaaactctgtgccttgggtgcccctcttgaaggacagacagggccacttatcttccctggcagaaggctgctgcctccccaaatccacaatggcttcggtggttgagccagggcattcaaggtgacactgaggttataattcaatgacaaagcaggtcatctctttcttactaattggtcatctttcttactaattgctatgcaaggccatggactgctctttagtctgagcttctctttgcctttgctcagtgcagtagctattcacaggtacaatcatagtgcactacagcctcgaactcctgggctcaagtgaccctcccagtagctgagactataggcatgcaccaccacacyggcctctttgccttttgaaaattctgtaaacccactcccttcccccattcccacaatgcatttctcaccacagaatttttataccatgatgatgaaggctaggtttggtgagaagtctccttgcttccagagatcaatgatctctttctctctctctctctctctctctctctctgtctccctggaaaaatgccatccctttactcactgggcctggggagcccgacatgatgtaaaccaaaataaaatgaaatggcttcattatctgccagagaaagatgattaaactggtctactttgtgtgctgatgagctatctctgaactatgtgtccattatcgctttctgtctggattagaatgacagtatgaacagtctgtgggttaattagtttcttggaaagtttattcatttctccctttccctgttctgtagtcatagagcaattcatactgagtcaaaatgctcagcttctgttccacatgatcagaaccaaacatgcatcaacttgacgtccatcacagccgatgaacagccaggtggtgtccctc

SEQ ID NO: 76028 - DNA, 672 bp, Homo sapiens
agaagcccaggttcctctgtgagtaggttgtccaggacatggaccctgcttcactctccaacaccagtgcatactgtattgtgatgtgcatgagaaatgatcttttactatgttaaaacaccaggattctggaattgtttgttatagaatttgtcttccctgatatactcacaaaatggaggtgacctagaaagttcacaagatatgacatatctgtcattctctggctactaatagatcctatcagtgcatgtaagaaaagggtctagtagaaaaggaaacacgttcgtagctgtacatactgcttattgtaattgtccacttattcatgcatttaacaaatatttattatgtacttactatgtgccaagctctgtgtaagtattgggggtgcacaagtaagcaaagtagacatgggccctgcccttgtatagctgacagtctggtgggataccaaacatgaaacaaattattcttatatgaacagctattatgaaagaagacattatagaccactgttgggaacaggggtstcacctagacaccaaggagatctattttttttttcctatttagcacatcaaaaaaccaggaaatgggagcaggagagcctgtgttgctaggaattagacggaatcatgaacatcactctgtccactgacttgctccagt

SEQ ID NO: 76029 - DNA, 743 bp, Homo sapiens
caaggggcccagcagtgccttagagttaaactcttcccgttttcaacctatcactcactgttagctcgtcctcctttcctcacatttctcccaccctccaccacacattcctcttgtcagaggcctagagaaagaatatcccaatggggagtacctgggttaaagaaatttggcatcttgctcaggagtcaattctgatatccacaagactccatccagtttgagaggccaagatggtgtccaggccatgttgaacaggactacytggtcatatcctgggacctgctctaggaactgcagttgagggactctggaatgggccaaggtctagaatcagatctgtctactgaggtgtggaagacttcaaaggaacaaaatgagaggattgatgtcctgccaagtagattcaatgttgatgtctacagtgagatagagtccgcttagggaaatggggtcttttgcatctcagcctccaccatgtctgcacatctcatcctgggtggaggttcatgctgggagcagaacacccccaggagacagagctaaggcttcaccaacaaaggctggtatgggcagctgagtttctgtccacagaactgaaagtgaggtccagtaatcagcatccatcccacacctggtccctctgcttgggaagaatgacctgcatgctcagggtccactggtggcacaggagactgagagcaagatggcactgaccaagggacaacctggtttgcaagggg

SEQ ID NO: 76030 - DNA, 743 bp, Homo sapiens
caaggggcccagcagtgccttagagttaaactcttcccgttttcaacctatcactcactgttagctcgtcctcctttcctcacatttctcccaccctccaccacacattcctcttgtcagaggcctagagaaagaatatcccaatggggagtacctgggttaaagaaatttggcatcttgctcaggagtcaattctgatatccacaagactccatccagtttgagaggccaagatggtgtccaggccatgttgaacaggactacctggtcatatcctgggacctgctctaggaactgcagttgagggactctggaatgggccaaggtctagaatcagatctgtctactgaggtgtggaagacttcaaaggaacaaaatgagaggattgatgtcctgccaagtagattcaatgttgatgtctacagtgagatagagtccgcttagggaaatggggtcttttgcrtctcagcctccaccatgtctgcacatctcatcctgggtggaggttcatgctgggagcagaacacccccaggagacagagctaaggcttcaccaacaaaggctggtatgggcagctgagtttctgtccacagaactgaaagtgaggtccagtaatcagcatccatcccacacctggtccctctgcttgggaagaatgacctgcatgctcagggtccactggtggcacaggagactgagagcaagatggcactgaccaagggacaacctggtttgcaagggg

SEQ ID NO: 76031 - DNA, 535 bp, Homo sapiens
cagtggtmggagtaattggttaattgccagagttgttaacaagaattaagaattcaggggaattggctaagaatgcagatctgttgcaatatgcttagaacaaatgtgtttgaaatatgcacacctaagtcaaaacaaataggtcttgagtcctttttaacaatgtttgagactggctaggtcagtgttccctttttttaacggtgtcccatggtttttgtttgtttgtttttttttttttaaaggaacgtagtttctttcactgaatcttccagttgccaagtcctaagaaactttgcattctctccctctgctctcaatactcaccgaggcatctctccatgcataaccctctctgcacatcccacttttcttttgaaacaatcatcccttctcacatgttttgatttgttctgtcaagtgaatggatgaaaaattttcataaaggatgagacaaatcctaacacaccgctgtccataacagtataagcccacagatttgtgcccacagggatacaagtttgcagatattata

SEQ ID NO: 76032 - DNA, 535 bp, Homo sapiens
cagtggtaggagtaattggttaattgccagagttgttaacaagaattaagaattcaggggaattggctaagaatgcagatctgttgcaatatgcttagaacaaatgtgtttgaaatatgcacacctaagtcaaaacaaataggtcttgagtcctttttaacaatgtttgagactggctaggtcagtgttccctttttttaacggtgtcccatggtttttgtttgtttgtttttttttttttaaaggaacgtagtttctttcactgaatcttccagttgccaagtcctaagaaactttgcattctctccctctgctctcaatactcaccgaggcatctctmcatgcataaccctctctgcacatcccacttttcttttgaaacaatcatcccttctcacatgttttgatttgttctgtcaagtgaatggatgaaaaattttcataaaggatgagacaaatcctaacacaccgctgtccataacagtataagcccacagatttgtgcccacagggatacaagtttgcagatattata

SEQ ID NO: 76033 - DNA, 915 bp, Homo sapiens
ctaaagcaaaagaatagtagcaatacttcttagggctaatatcataagcagaaataaaatatatgacaatagcacaaagtgtagaaatggatgaaaagtgtattgatttgrttagtattcattataattgaagtgatgtaatattaatgcaagatggatggtgataaattaaagatgaatgttatagtctccagaacaaccaataaaatatgttgcaaaaaattattagtaaaatgggaatagagaagatagaataaatatataaaaatatttaattaataaaggcagccaaggaaaaaagaagtttcaaccagaaaacaaataacaaaatggttgacttaaatccaagtatatcaaaactacaacgaatattaggtagatgcaaatgtaatcacagtttttgccattaaaaggaatggcaaactgtgattacttttgcaccaatccagtataaataaattaaaagtatgaatgtagagattggagactggggaaaaataagcataatataacaataatatgctgtttataaggacacattaaaaatgtattcaattaatatttcatgatcatcattttacttgacatatatgtattttaagaaacagttttctcacatggatcactgccagccacctaagtaattgttacaataggtattcagtagtggtagttggagtaatagtaatagctaaaacttacagaaaccttaccatgtactgctagctgttagagttggtttataaaaataatcttgtttaataattacagcaaattaatatgtagtagtaattatatcatcctcattttactgatgattcaacagatacagaagaaacaagtgacttacttaacgccctgcatttagtaattgaatttaactataactccaaagctttctacggtctctcaatt

SEQ ID NO: 76034 - DNA, 915 bp, Homo sapiens
ctaaagcaaaagaatagtagcaatacttcttagggctaatatcataagcagaaataaaatatatgacaatagcacaaagtgtagaaatggatgaaaagtgtattgatttggttagtattcattataattgaagtgatgtaatattaatgcaagatggatggtgataaattaaagatgaatgttatagtctccagaacaaccaataaaatatgttgcaaaaaattattagtaaaatgggaatagagaagatagaataaatatataaaaatatttaattaataaaggcagccaaggaaaaaagaagtttcaaccagaaaacaaataacaaaatggttgacttaaatccaagtatatcaaaactacaacgaatattaggtagatgcaaatgtaatcacagtttttgccattaaaaggaatggcaaactgtgattacttttgcaccaatccagtataaataaattaaaagtatgaatgtagagattggagactggggaaaaataagcataatataacaataatatgctgtttataaggacacattaaaaatgtattcaattaatatttcatgatcatcattttacttgacatatatgtattttaagaaacagttttctcacatggatcactgccagccacctaagtaattgttacaatagrtattcagtagtggtagttggagtaatagtaatagctaaaacttacagaaaccttaccatgtactgctagctgttagagttggtttataaaaataatcttgtttaataattacagcaaattaatatgtagtagtaattatatcatcctcattttactgatgattcaacagatacagaagaaacaagtgacttacttaacgccctgcatttagtaattgaatttaactataactccaaagctttctacggtctctcaatt

SEQ ID NO: 76035 - DNA, 613 bp, Homo sapiens
aatatataagtatattatacacacacacatacactaggcatatggtaggtagctgacaaatatttgttaaataaaggaaaaatctcatagaaaattctgtatctcatgtactatttcatatataggactaatatcatatttgtttggttgcttttttacctttgaaaatatttgaaacttgcaactacaatttcaaggatacaaaagtaaagagaatagtatagtgaactctcatacaccctttactcaacctcgacaactaccaactcactcatgactattctatttgatctctaaatacctgaacaactacctcatcctcactggattattttaaagtaaatcccagatgtgtttgattgcctttaaagaaggactgaaaataatttttactaagcaaaattctaacaaaatgaaatgataggattcaatctcttctcatgtgctttttcaatgcagctgggcttcggtcrgattactcgtcaaccataggatctggtaaattctttcatgtggttccccctccccccatgttaatattgtttttggctgtaattttcattttctaattgatggtatttgttagtgctcttttaattgcaagtgacagaaa

SEQ ID NO: 76036 - DNA, 1339 bp, Homo sapiens
tgcataaagacatgacattcctccctgctccttggcaggaacacaaaacagccatcaaaagacaaaaaacaaaaacaaaaaacaaaaaaaaamcacacacaaaaaaacacaaagtgttcatttcggtctatgtcaatactatatatatatttcaagttatggaaaatccactgcagtagagagccttagaaatcatctaacacctttatttttcagataagaaaatgagactgagaaaggttgagtgatttattccaggaacacacggctccttaaggaggagtattgtctgatgccaagcgcagggctcctgcaccacggtatcacagacctccggcatgaaaatatgaagcttaccctggattcgagcagccgcgtcttttctgcatgagcctgcttcaaaagtctctccatttcttctattctagcaatatttgaagtgctggcactgaatgaaacaccaaagccttttgagaatattggtttagactgagaagtctctctaatacatacacacacacacacacacacaccccagacacacacacacacacacacatggggtcaagggaggtgcataacaaaatccaagcatatataatttaaagaatgttacttacgagtcattggaccgaagaggcaaatcaattcaactctgagaattgtaggtgacactgacttacctcagtttagaagacaaaatataggcaagcaaaataatgctaatgctttactcataggtaaataaaccaaaaccaaatcttacaaagtgtgacttctaaatgcttcctccaaagtctaaaaataatgacccatgagagtccttcccattagtttaatgacttaaagatatcagaccaacaagactatcaccaacgttctatataaatgacacctaatgtttggagtcactttattcagttgtggaatatgtattatgagctactttttgttgtccctttatatgtgtggacactttatttattaaatcatgatgccaattaaaacatgacttctcctataggtgcaatggatggatagtggccagttttgtgaagagtaccccctcatgataccaatgagaaaactgtataaagagatttaagagcttcaaaagaaatgatggaaaagacatcactcaagtgaaagatgaaaccaaagggagtgaaaggtgcaagaacagtcagggtaactaacagacaaagtgaaaacttgaaaatgtttaacacaaaacaggaaattttattttccaccgcttacattctatttgactgttctggaaaagagagactataacctaggtcaaaacttatttactttgctgtttcagctatggaaa

SEQ ID NO: 76037 - DNA, 645 bp, Homo sapiens
ccaccacactgggctaattttttttattttttgtagagaaaaggtctcactatgttgcccaagctggtctcaaactcctgggctcaagtgatcctcctacctcagcctcccaaagtaatgggattacaagcatgagtgcataacattcttaaaatgacaatattatagacagagaaagcagatgactgattgctggagtgaggattggaagtaggcatacgtgcgatgataaagcagtagcataagggtgtcttgtgataatagaacaatccatatcttgattgtgatgggtggtggttacacaaatctatgtgctaaaattgcacagaactatacacacaggtatacacacaaatgagtgtatgtaaaagtaatgacatttgaacaagctctgtggattttatcaatgtcaactttctggttttgatattgtactgtagctgtgcaagatggtaccattagagaaaatgggtcttccttgtacatttttttcctttctttcttttttttctttttttgcaattttctgtgaatctataataattaatcaaaaaacagatttttaaaaattctaaattcttawgttaaaaatactcttatttctaatcacatttatttattattatcaaggtataatttggatcc

SEQ ID NO: 76038 - DNA, 689 bp, Homo sapiens
ataggtagctgctcgtagattttaatttaaaacctctagtagaatagctttattcttttgaaatagaaatagcaatggctrtagatgactcataaaaagatatacccctctgttatgcaattatgcagccacagagggtttgcaagtttggggaacagggaggacaccccaccccattcccaaggcccaaaccttactatgcaattgctgggcttgcaaaaggagtgtctggttctgccccctaggcctgaggcaatggattcctggcacaggaactttaactgccacagaaacagtgttctagcttgtagttatgtatggtgaaaatagtactaccatatagtagttttatacgtgtgtgtgtgtgtgtgtctgtatgtatacacatgtatattggtagttttatgtatatattatatatagcacatatatattagacacatataaaataagtgtaattgttgagcttctatgaatgtctaatcataatttttgcaccatcatttctatgaataaatgtatcccatgtagttttactagtaaacttcctgagcagaatttattcatgagctggggactttctttgcctatatttgtacttagatcgaatatgatttgtgggatgagtaaattaacacaggctacgtctgcatttaacaccagagaggaaagataattaatattgaaaa

SEQ ID NO: 76039 - DNA, 689 bp, Homo sapiens
ataggtagctgctcgtagattttaatttaaaacctctagtagaatagctttattcttttgaaatagaaatagcaatggctatagatgactcataaaaagatatacccctctgttatgcaattatgcagccacagagggtttgcaagtttggggaacagggaggacaccccaccccattcccaaggcccaaaccttactatgcaattgctgggcttgcaaaaggagtgtctggttctgccccctaggcctgaggcaatggattcctggcacaggaactttaactgccacagaaacagtgttctagcttgtagttatgtatggtgaaaatagtactaccatatagtagttttatacrtgtgtgtgtgtgtgtgtctgtatgtatacacatgtatattggtagttttatgtatatattatatatagcacatatatattagacacatataaaataagtgtaattgttgagcttctatgaatgtctaatcataatttttgcaccatcatttctatgaataaatgtatcccatgtagttttactagtaaacttcctgagcagaatttattcatgagctggggactttctttgcctatatttgtacttagatcgaatatgatttgtgggatgagtaaattaacacaggctacgtctgcatttaacaccagagaggaaagataattaatattgaaaa

SEQ ID NO: 76040 - DNA, 598 bp, Homo sapiens
gaagatttctcatatccagaaaagcttcctgcactcagcttaccataacttcacttaagcagtttgagcactattcactgcaacaytttttctgtttgtttgttttgttttgttttgttttgtttgagacaggatgttgctctgttatcaggctggagtacagtgacgcatctcggttcactgcaacccctgcctcctgggttcaagcgattctcatgcctcagcctccgagtagctgggaatacaggcgtgcaccaccacgcctggctaatttttgtatttttagtagagacacggtttcactatgttggccaagctggtctcgaactcctaagctctagtgatctgcccgcctcagcctcccaaggtgcttggattacaggtatgtgccactgcacctggctacaccacaactctaaaattggcttttcttatgagattgtttttctactcgtacaaaacctattctctccaactaagatttattctgaaaactaaatattattatgcacctgtaaataagtttcttagacttcctctttaaaatattgcactcattaatggcagatctaactgctttgaagctttcattttgtcc

SEQ ID NO: 76041 - DNA, 598 bp, Homo sapiens
gaagatttctcatatccagaaaagcttcctgcactcagcttaccataacttcacttaagcagtttgagcactattcactgcaacactttttctgtttgtttgttttgttttgttttgttttgtttgagacaggatgttgctctgttatcaggctggagtacagtgacgcatctcggttcactgcaacccctgcctcctgggttcaagcgattctcatgcctcagcctccgagtagctgggaatacaggcgtgcaccaccacgcctggctaatttttgtatttttagtagagacacggtttcactatgttggccaagctggtctcgaactcctaagctctagtgatctgcccgcctcagcctcccaaggtgcttggattacaggtatgtgccactgcacctggctacaccacaactctaaaattggcttttcttatgagattgtttttctactcgtacaaaacctattctctccaactaagatttattctgaaaactaaatattattatgcacctgtaaataagtttcttagacttcctctttaaaatattgcactcattaatggcagatctaactrctttgaagctttcattttgtcc

SEQ ID NO: 76042 - DNA, 598 bp, Homo sapiens
gaagatttctcatatccagaaaagcttcctgcactcagcttaccataacttcacttaagcagtttgagcactattcactgcaacactttttctgtttgtttgttttgttttgttttgttttgtttgagacaggatgttgctctgttatcaggctggagtacagtgacgcatctcggttcactgcaacccctgcctcctgggttcaagcgattctcatgcctcagcctccgagtagctgggaatacaggcgtgcaccaccacgcctggctaatttttgtatttttagtagagacacggtttcactatgttggccaagctggtctcgaactcctaagctctagtgatctgcccgcctcagcctcccaaggtgcttggattacaggtatgtgccactgcacctggctacaccacaactctaaaattggcttttcttatgagattgtttttctactcgtacaaaacctattctctccaactaagatttattctgaaaactaaatattattatgcacctgtaaataagtttcttagacttcctctttaaaatattgcactcattaatggcagatctaactgytttgaagctttcattttgtcc

SEQ ID NO: 76043 - DNA, 729 bp, Homo sapiens
cgaagggaawggacaacatactctcttttgttctctgtttttttttctttaaacaatcataagtttttaaaggtaggggctatgtttttgtattctttcaacaaatatttatttgttgcaaggtgctcttaggggttgggagcacagtgtgagcaaagcagatatggtccttgccctcagaggttagactgtggtggattatgtccatttgtctttgagtttctcctttagccctatccttagccttatcaagaaccttctcaatatgtgtttggtaagtgtttagaatagtttcttcctttccagtccagtctcttaatatatgtttcttccaatgatctattaatactatttgtgaacaaccaacacaaaagtaaatgaaagcttaattgacataagtgcagcccttccattgatccatgtccttcttttccttcatagtttagccaagttctacctctgctgtgatgccatccaagccaacagcaatgtctttctggctatttttttactcagttgatgtgacatattttgttctgttttttaaaaatgttattattggccaggcgtggtggctcacacctgtaatcccagcactttgggagaccgaggcgggcagatcatgaggtcaggagatcgagaccatcctggctaacacagtgaaaccctgtctctacaaaaaattagctgggcgtggtggcacgcgcctgtaatcccagctacttggga

SEQ ID NO: 76044 - DNA, 720 bp, Homo sapiens
attttcaattcctgagaggaaaaatcggattgactcagcccattttttgcccagcaaaggtgggaggtagagcagccaggctcatctgatgccaaaatggcagtgccagatctcatccttgaattggaagtattgggggacagagaagggggtcttggcagatgcccccaacaaattgaaaatccccacttcaaattacccagatttctaaagaggtgtttgccatttgttgaataactgttttgaaatttcattgtggcataatgaggaattacatttattctttccatttaatcaatttaatcatwttaaaaacaatttagatctgtagtgttttcctgaagctaatgttttgctgctcacctttgtacttctttttttttttttttcatttttaattttttattgatcattcttgggtgtttctcgcagagggggatttggcagggtcacaggacaatattggagggaaggtcagcagttaaacaagtgaacaaaggtctctggttttcctaggcagaggaccctgcggccttccgcagtgtttgtgtccctgggtacttgagattagggagtggtgatgactcttaaggagcatgctgccttcaagcatctgtttaacaaagcacatcttgcaccgcccttaatccattcaaccctgagtggatacagcacatgtttcagatagcacagggttgggggtaaggtcacagttcaaca

SEQ ID NO: 76045 - DNA, 720 bp, Homo sapiens
attttcaattcctgagaggaaaaatcggattgactcagcccattttttgcccagcaaaggtgggaggtagagcagccaggctcatctgatgccaaaatggcagtgccagatctcatccttgaattggaagtattgggggacagagaagggggtcttggcagatgcccccaacaaattgaaaatccccacttcaaattacccagatttctaaagaggtgtttgccatttgttgaataactgttttgaaatttcattgtggcataatgaggaattacatttattctttccatttaatcaatttaatcattttaaaaacaatttagatctgtagtgttttcctgaagctaatgttttgctgctcacctttgtacttctttttttttttttttcatttttaattttttattgatcattcttgggtgtttctcgcagagggggatttggcagggtcacaggacaatattggagggaaggtcagcagwtaaacaagtgaacaaaggtctctggttttcctaggcagaggaccctgcggccttccgcagtgtttgtgtccctgggtacttgagattagggagtggtgatgactcttaaggagcatgctgccttcaagcatctgtttaacaaagcacatcttgcaccgcccttaatccattcaaccctgagtggatacagcacatgtttcagatagcacagggttgggggtaaggtcacagttcaaca

SEQ ID NO: 76046 - DNA, 1320 bp, Homo sapiens
tatgtatgtattttttcctttatcaataacttctaatttatattaccttgctatatttcatgtagctatgaggttgccacaaatctttttttaaacatagcaattataactggaaaaatyatatgtatataaatgcactgagaataggttggatccataccaagaattttcaaagcacagtatctcccacagaaactcaataacttctggctgaaagaacgaatgaaagaataaggaaggatagttaatagtaatcttagacaaaatgccccagagcaggagagatctttggttctggtttattatgatggacaaggaaaaaagacattggtgaatctagactcttttagttttgatttgggatgcccataaaagcctgcatagtaaatcagaaaaggagcacagacattctgaattaggatacttggactggacttctaccttccccaattacagctgtgtgacactgggcaattcattgcatcttatttacagggcataatgagataatgcacatttagagacaccataaagataaaatgagataaattagtttaaagctttataaagtgctataaaaattccagttggcataattagtataaaaatagtctcaagaataaatataataagaaaactaaggaaacatatcttaacttttgaaaaaactcgtatctctatacgaattccattttgtaatgtaatgaatacaattttaaacctgcagaattatcaatgtgcatagattaatcataactggaaatatgagatatctcctaagcactttattagaaacaataataactaaaattccaggcactgttgtaagcactctctaaatattaattcatttaatcctataaggtaggtacaattattgttccccaacaagaaaaaggggtttactagtttgatgaaggtcacatagcaaaaaatactaagtaggaaatcacaacaaggggatctatttcaagagtctaatcatttcaacactacactataggatcagcatgtagtggtttttcaatctcagattcatagtcaaggttaaaataaaggtgaaaaatagccggttgctactactgatcattcataaatgtaaaaaatttaaaactattttgttcaaattgcaaatatcaaaattaaaaaaactactacaatcaatgaatattctgttcgctctaattgaaaagtttcagctctttaacaggaagacataaaatgtatctgaataattataccatttctgaggacacgtttttacatagtaaaagctttttgttttaaacatttgttgcttgaatccaatttaaaatttta

SEQ ID NO: 76047 - DNA, 683 bp, Homo sapiens
atgccatgtaacctggatgtgtcacagctaagaaattccaattccgcaaaatagagccccaaggctaaaaaataaaaaaattaaaagagattagtatctagagaatatcaaatattttgattacatactgaaccatatttaatacacttaacattatcttggatattttaaaagttaatctgaccttatgtggtttaggtcaacctttgttacttaacagcagacgttcaagtctattgttctttacagaaatatgattaggcagaaaacagatttttcaggaagagaatacagagaacaaaaaagaaaaccacaaaatctcttctctacacagcctattctcgctacggcacttgtgaccattgtaaaamacaaatgaaataattcttttgttcaaagccttctaactttgaataaaagtcaaagtcctcatatatcacttagaaggactttacaaggtttgatccccagcagttcccttttttgtctccatctgctataactctcccactttctgcatcttctccagcctgctattgtcttgaacaaaaaagccctcttccccctcagagactttgtatttgccgatgcctttacttgaattttcttcccccaaatatccatctcattcctgtctccaaatgtcacttcctcaatgaagccttctctgaccagtgtattta

SEQ ID NO: 76048 - DNA, 594 bp, Homo sapiens
ttgaattcatttatatattcccctatagtagaacagccttcctttatccttactccacagtgggagagtatcccatctctaataccctccataccaaccatctaaaaaaagtaagcaacattatatttatcagttcctcttcttcactgcatggtaacttccatacccaccaccayagtagttgctgtttgagaggtcaggcccttaccatcacttatccaaacaatagcccatggccacctattggttccactgcttccaatctatcacctttaacacattttccatactctgccaccatcatctttctaaagcacaggtcagatcacttcatttacctcctgaaataaatgccaatggtaccctaatttttataaagttcgcatttctgagcatgacattcattctctccaggccaaacgagaaaatcccagccacatttcttattacatctctcctcaaaacatatggcccccaattttttttttttttttttgagagggagtctcaccctgtcacccaggctgggatgcccagtggcatgatctcagctcactgcaacctctgccttccaggttcaagcgattcctgtgc

SEQ ID NO: 76049 - DNA, 681 bp, Homo sapiens
tttcttaaagattctacttttcctcaaaaaactgtgatatggccggacacagtgactcacacctgtaatcccagcatttctggaggccaagatgggaggatcacctgagcccaggcgttcgtgaacaggttgggcaacatgtccagacctcgtaggtagagatattctgcattaccagtgatattattgcactaactagcaatataatcttgaaaagaatcctgagaatctggtatgtgtccagtgagcccttttaacagttcaatacatagtcttatttgtgaagtaaaatcctatgttcagagaaacacatataatttaatggaaaaacatmatttcatcatagttggatataatcatacatttttatatacattttataattatatatgtaattatatatggcacaaaacataatgagaatttatttttaaaagtccttatttgctttaaagaaaaaaaagcaaaacaaaactgagatccttctcaagactatactgtgagtttgtgcaaaggttattcggaataacttcttttgaagtagaatcgtatatatcagcatagagctggaaaggaccttagacatactgtggtgtaactccatgaattattagataagtaaaggaactcagaggacttgcatgatacaactagttggaaatagaatcaagactagaattg

SEQ ID NO: 76050 - DNA, 681 bp, Homo sapiens
tttcttaaagattctacttttcctcaaaaaactgtgatatggccggacacagtgactcacacctgtaatcccagcatttctggaggccaagatgggaggatcacctgagcccaggcgttcgtgaacaggttgggcaacatgtccagacctcgtaggtagagatattctgcattaccagtgatattattgcactaactagcaatataatcttgaaaagaatcctgagaatctggtatgtgtccagtgagcccttttaacagttcaatacatagtcttatttgtgaagtaaaatcctatgttcagagaaacacatataatttaatggaaaaacataatttcatcatagttggatataatcatacatttttatatacattttataattatatatgtaattatatatggcacaaaacataatgagaatttatttttaaaagtccttatttgctttaaagaaaaaaaagcaaaacaaaactgagatccttctcaagactatactgtgagtttgtgcaaaggttattcggaataacttcttttgaagtagaatcgtatatatcagcatagagctggaaaggaccttagacatactgtggtgtaactccatgaattattagataagtaaaggaactcagaggacttgcatgayacaactagttggaaatagaatcaagactagaattg

SEQ ID NO: 76051 - DNA, 718 bp, Homo sapiens
ttttttatccgtcagaaataatgtgaggggagttaggaacaagaggtttttcaccctttgaaaaagtcaggaatgtggattggctcattgaagatcttggctacatataaggagtggacagcattgctctaggagttgtgatgatgtaacttttgccataaaaggatatggattttttttttttttttactatacacagtactgagtttttaggatggagaaaaatagtgaatagtcccatgggggtsctgcccagaatgtagtaaaacaaacctttgcttgtttcagcctctatctcttgagacattggagaaactaaggtagtttcaaagattattcaaaaagaggcagagccttccttcattccttctaggcaaagtagtctagacatctttaggaaatatgtccaggtctcctggaagcatttcctacctggtggtgtagaagattcctagggctgtctacgtggtgtttctctatttccctgacgtccaggaaagctgccccctcactccctaaagtgccccagggacatgggcagccctcctactgtgaatgagctgggaaccgccgccattttctcctctaactcagagtcacttgatgcagtggaactgagttcccccaagagtttgctaatcactctatcttttcctccctacatatgaaggaaatgtatacagggctgacagatgtgtatggagaaaggtttcccagc

SEQ ID NO: 76052 - DNA, 705 bp, Homo sapiens
cccatagtcgtggttctttagtgaagtaaatctttcagtttacagctctayaggtgcacacgcacacacacacacacacagtgcccaaataactgggtcagaggcaatctagtgtaagtggcatcttggagtggagtaaatttaaaggatgatttaaatgtatttttgcttctaattctttttcttctatatattttaaaagataactgaaataattatttttaaaaatataaactgcattgatacattatatatatataatgtaatttgtatatcagtaacaacatgaagtagaggagacggtgtagagttatattggagcaaacttctttaaattactgaaattaagttggtattagtccaagctagatttttataagttaagatgttgactgtaatttccagcgtagccattaagaaaatatatactaaactaaaatatatagtaaaagaactaaaaatatgtgtttaaagaaacaatggaaattgaaactgtattctataaaatagagatttaatgttaacaaagaaataatgaaggaatagaggaacaaaaaatatacataagagaaaacaacaaaatgacagatgtaaactgaccatatcataattacattaagtgcaaataaacagtccaatcatgaggcagaaattggcaggatagattttttaacccaactatacgctgtctatgagacatatttt

SEQ ID NO: 76053 - DNA, 705 bp, Homo sapiens
cccatagtcgtggttctttagtgaagtaaatctttcagtttacagctctataggtgcacacgcacacacacacacacacagtgcccaaataactgggtcagaggcaatctagtgtaagtggcatcttggagtggagtaaatttaaaggatgatttaaatgtatttttgcttctaattctttttcttctatatattttaaaagataactgaaataattatttttaaaaatataaactgcattgatacattatatatatataatgtaatttgtatatcartaacaacatgaagtagaggagacggtgtagagttatattggagcaaacttctttaaattactgaaattaagttggtattagtccaagctagatttttataagttaagatgttgactgtaatttccagcgtagccattaagaaaatatatactaaactaaaatatatagtaaaagaactaaaaatatgtgtttaaagaaacaatggaaattgaaactgtattctataaaatagagatttaatgttaacaaagaaataatgaaggaatagaggaacaaaaaatatacataagagaaaacaacaaaatgacagatgtaaactgaccatatcataattacattaagtgcaaataaacagtccaatcatgaggcagaaattggcaggatagattttttaacccaactatacgctgtctatgagacatatttt

SEQ ID NO: 76054 - DNA, 593 bp, Homo sapiens
tttgctaagaagcccaacctgttggtctgtattaaaggtaaacagccctacaaaaaactgccaagtaagagtattaacaggtttaccaaagaagaggagaggaggcggaaacgaaagaaaaatgtaattcttaagttgaaagagtatggaacctaagagtcagaagatgtagaccctatgctgggagtggtcactcacgcctgtaatcccaatactttgggaggctgaagcaggcagattacttgaggccaggggttccagaccaggctggtcaacatagtgaaatctcatctctactaaaactacaaaacttagccgagtgtggtggcacgcgcctgtaatcccagatattcgggtggctgaggcacgagaatcgcttgaacctgggaggtgtaggctgcagtgagccatgatggcaccactgcactcaggtgaagagtacaccaacacctccaaaatcaccactaaagaactaacccattaaccaaacaccacctgtgcccccaaaactactgaaattttaaaaataaatagaaatttaaaatttttttaaaatccrcaaaaacttcttgagttctagtcctagttttgcc

SEQ ID NO: 76055 - DNA, 1871 bp, Homo sapiens
tgcataggctttgaagacaaatagaccagtattaaatcccagcgctgtgtgactttggacagcatgaacctcagtgaagtttatctggaataaactttacctgaagttcattagaaacttcaatgtctttatctggaaaatgcagccaataatacttgcctggcaaacttgttttgagaattaaattagttgaccagctgaaagtgcctaggttagtaagctgtcacgtaggaggtgccagatcaatggyagtgattattacttgtgcaaggtacaagaggtggcatcaatttgagattcataaatatgctaggtatgtagtgggaccatcacccttattagaattatagctggaatatcccattgggttaagctgcactctgaatacagggttccttctcagattgagaaaccctttgtgagccttctcttcaccactgtacatgcggaggtaggaacaagtgctggccttccaccactgcttcctctcaccccgtggggagggtggctgagtcatgctgacttgcacccagtgcagcttgcactcgtgtcattacagtgcagaggtctgcaggcgccaccaaagtgagttctggctttttatcctccttgttacaaaggccagaatcacacatagaacagaatgtaaacaaattttccaagcctctatttgttctcaaattggtcaatgtttcctgtcccactgcccccggatccccaccctccactctaaacctcaaagactaaaaatgcaaataagtgaaatcttcaacagttattgatttgaagagaagctttgagcttgaaaccctgattttttttttagattatttgtagcactttaagtacaaacttggacaatttattttctgcatagttttgaaaatgtttatagaataactgaacccagaaatatgaaggactaaaacctagaaacccaataaataaaaagtggaaacaatcttaatgataaataagaggaaaatgatcaactaaaactgtgaaattgtgacacacttatatattgaaatactatccctaaaacaatgttagttttagtgacattagaaaaatgtttaaaatataatgtgtataaacagagatagaaaactcggcatacagcaggattccaattgttaaatatgtttaaaatgtaccaagacgacttctatatatgattataatgattattatttttacctgttctttatgcatatccacctttatacaacaaatgcttaaaatcattatactcaaaaatgttttaaaaatgtaattgtataactaattttcaatcgtctttgcccttgaaagggagttctaagaccaatcacttcagtaagaacttaactagtaaacacttgtctctcatgaggttatagtcattctcattgacatgaacaggttaaagacagcaagaaatgtgtttgtgaaaagtcaagtgccgtctgagttgccaaatttctggagaacagtgttgtatggaataaaacgaaaataaaatcctagattgtgagttaggaaatcaaaatgttaatactagctgtgccactaaatggttgtagagctggactagcttacttcccctctttgtttttgacttgtttcatttgtaaaatgagaaaaaaatcactccttcactcgttcatttattcacttctttaagaaatgtttctcaaggttatattgtgggttgagtactattgtagacactgaggacagatcagtggaaaaacacaaatgtggctcttgccttcagagaacttatggtccagtggggaagaaaaagcatggactactaactaagtaaatatgtgtaatagtatcaggtgctgtgaaggaaaatgaagccaggtaaggagaaagagagc

SEQ ID NO: 76056 - DNA, 1871 bp, Homo sapiens
tgcataggctttgaagacaaatagaccagtattaaatcccagcgctgtgtgactttggacagcatgaacctcagtgaagtttatctggaataaactttacctgaagttcattagaaacttcaatgtctttatctggaaaatgcagccaataatacttgcctggcaaacttgttttgagaattaaattagttgaccagctgaaagtgcctaggttagtaagctgtcacgtaggaggtgccagatcaatggcagtgattattacttgtgcaaggtacaagaggtggcatcaatttgagattcataaatatgctaggtatgtagtgggaccatcacccttattagaattatagctggaatatcccattgggttaagctgcactctgaatacagggttccttctcagattgagaaaccctttgtgagccttctcttcaccactgtacatgcggaggtaggaacaagtgctggccttccaccactgcttcctctcaccccgtggggagggtggctgagtcatgctgacttgcacccagtgcagcttgcactcgtgtcattacagtgcagaggtctgcaggcgccaccaaagtragttctggctttttatcctccttgttacaaaggccagaatcacacatagaacagaatgtaaacaaattttccaagcctctatttgttctcaaattggtcaatgtttcctgtcccactgcccccggatccccaccctccactctaaacctcaaagactaaaaatgcaaataagtgaaatcttcaacagttattgatttgaagagaagctttgagcttgaaaccctgattttttttttagattatttgtagcactttaagtacaaacttggacaatttattttctgcatagttttgaaaatgtttatagaataactgaacccagaaatatgaaggactaaaacctagaaacccaataaataaaaagtggaaacaatcttaatgataaataagaggaaaatgatcaactaaaactgtgaaattgtgacacacttatatattgaaatactatccctaaaacaatgttagttttagtgacattagaaaaatgtttaaaatataatgtgtataaacagagatagaaaactcggcatacagcaggattccaattgttaaatatgtttaaaatgtaccaagacgacttctatatatgattataatgattattatttttacctgttctttatgcatatccacctttatacaacaaatgcttaaaatcattatactcaaaaatgttttaaaaatgtaattgtataactaattttcaatcgtctttgcccttgaaagggagttctaagaccaatcacttcagtaagaacttaactagtaaacacttgtctctcatgaggttatagtcattctcattgacatgaacaggttaaagacagcaagaaatgtgtttgtgaaaagtcaagtgccgtctgagttgccaaatttctggagaacagtgttgtatggaataaaacgaaaataaaatcctagattgtgagttaggaaatcaaaatgttaatactagctgtgccactaaatggttgtagagctggactagcttacttcccctctttgtttttgacttgtttcatttgtaaaatgagaaaaaaatcactccttcactcgttcatttattcacttctttaagaaatgtttctcaaggttatattgtgggttgagtactattgtagacactgaggacagatcagtggaaaaacacaaatgtggctcttgccttcagagaacttatggtccagtggggaagaaaaagcatggactactaactaagtaaatatgtgtaatagtatcaggtgctgtgaaggaaaatgaagccaggtaaggagaaagagagc

SEQ ID NO: 76057 - DNA, 1871 bp, Homo sapiens
tgcataggctttgaagacaaatagaccagtattaaatcccagcgctgtgtgactttggacagcatgaacctcagtgaagtttatctggaataaactttacctgaagttcattagaaacttcaatgtctttatctggaaaatgcagccaataatacttgcctggcaaacttgttttgagaattaaattagttgaccagctgaaagtgcctaggttagtaagctgtcacgtaggaggtgccagatcaatggcagtgattattacttgtgcaaggtacaagaggtggcatcaatttgagattcataaatatgctaggtatgtagtgggaccatcacccttattagaattatagctggaatatcccattgggttaagctgcactctgaatacagggttccttctcagattgagaaaccctttgtgagccttctcttcaccactgtacatgcggaggtaggaacaagtgctggccttccaccactgcttcctctcaccccgtggggagggtggctgagtcatgctgacttgcacccagtgcagcttgcactcgtgtcattacagtgcagaggtctgcaggcgccaccaaagtgagttctggctttttatcctccttgttacaaaggccagaatcacacatagaacagaatgtaaacaaattttccaagcctctatttgttctcaaattggtcaatgtttcctgtcccactgcccccggatccccaccctccactctaaacctcaaagactamaaatgcaaataagtgaaatcttcaacagttattgatttgaagagaagctttgagcttgaaaccctgattttttttttagattatttgtagcactttaagtacaaacttggacaatttattttctgcatagttttgaaaatgtttatagaataactgaacccagaaatatgaaggactaaaacctagaaacccaataaataaaaagtggaaacaatcttaatgataaataagaggaaaatgatcaactaaaactgtgaaattgtgacacacttatatattgaaatactatccctaaaacaatgttagttttagtgacattagaaaaatgtttaaaatataatgtgtataaacagagatagaaaactcggcatacagcaggattccaattgttaaatatgtttaaaatgtaccaagacgacttctatatatgattataatgattattatttttacctgttctttatgcatatccacctttatacaacaaatgcttaaaatcattatactcaaaaatgttttaaaaatgtaattgtataactaattttcaatcgtctttgcccttgaaagggagttctaagaccaatcacttcagtaagaacttaactagtaaacacttgtctctcatgaggttatagtcattctcattgacatgaacaggttaaagacagcaagaaatgtgtttgtgaaaagtcaagtgccgtctgagttgccaaatttctggagaacagtgttgtatggaataaaacgaaaataaaatcctagattgtgagttaggaaatcaaaatgttaatactagctgtgccactaaatggttgtagagctggactagcttacttcccctctttgtttttgacttgtttcatttgtaaaatgagaaaaaaatcactccttcactcgttcatttattcacttctttaagaaatgtttctcaaggttatattgtgggttgagtactattgtagacactgaggacagatcagtggaaaaacacaaatgtggctcttgccttcagagaacttatggtccagtggggaagaaaaagcatggactactaactaagtaaatatgtgtaatagtatcaggtgctgtgaaggaaaatgaagccaggtaaggagaaagagagc

SEQ ID NO: 76058 - DNA, 1871 bp, Homo sapiens
tgcataggctttgaagacaaatagaccagtattaaatcccagcgctgtgtgactttggacagcatgaacctcagtgaagtttatctggaataaactttacctgaagttcattagaaacttcaatgtctttatctggaaaatgcagccaataatacttgcctggcaaacttgttttgagaattaaattagttgaccagctgaaagtgcctaggttagtaagctgtcacgtaggaggtgccagatcaatggcagtgattattacttgtgcaaggtacaagaggtggcatcaatttgagattcataaatatgctaggtatgtagtgggaccatcacccttattagaattatagctggaatatcccattgggttaagctgcactctgaatacagggttccttctcagattgagaaaccctttgtgagccttctcttcaccactgtacatgcggaggtaggaacaagtgctggccttccaccactgcttcctctcaccccgtggggagggtggctgagtcatgctgacttgcacccagtgcagcttgcactcgtgtcattacagtgcagaggtctgcaggcgccaccaaagtgagttctggctttttatcctccttgttacaaaggccagaatcacacatagaacagaatgtaaacaaattttccaagcctctatttgttctcaaattggtcaatgtttcctgtcccactgcccccggatccccaccctccactctaaacctcaaagactaaaaatgcaaataagtgaaatcttcaacagttattgatttgaagagaagctttgagcttgaaaccctgattttttttttagattatttgtagcactttaagtacaaacttggacaatttattttctgcatagttttgaaaatgtttatagaataactgaacccagaaatatgaaggactaaaacctagaaacccaataaataaaaagtggaaacaatcttaatgataaataagaggaaaatgatcaactaaaactgtgaaattgtgacacacttatatattgaaatactatccctaaaacaatgttagttttagtgacattagaaaaatgtttaaaatataatgtgtataaacagagatagaaaactcggcatacagcaggattccaattgttaaatatgtttaaaatgtaccaagacgacttctatatatgattataatgattattatttttacctgttctttatgcatatccacctttatacaacaaatgcttaaaatcattatactcaaaaatgttttaaaaatgtaattgtataactaattttcaatcgtctttgcccttgaaagggagttctaagaccaatcacttcagtaagaacttaactagtaaacacttgtctctcatgaggttatagtcattctcattgacatgaacaggttaaagacagcaagaaatgtgtttgtgaaaagtcaagtgccgtctgagttgccaaatttctggagaacagtgttgtatggaataaaacgaaaataaaatcctagattgtgagttaggaaatcaaaatgttaatactarctgtgccactaaatggttgtagagctggactagcttacttcccctctttgtttttgacttgtttcatttgtaaaatgagaaaaaaatcactccttcactcgttcatttattcacttctttaagaaatgtttctcaaggttatattgtgggttgagtactattgtagacactgaggacagatcagtggaaaaacacaaatgtggctcttgccttcagagaacttatggtccagtggggaagaaaaagcatggactactaactaagtaaatatgtgtaatagtatcaggtgctgtgaaggaaaatgaagccaggtaaggagaaagagagc

SEQ ID NO: 76059 - DNA, 1871 bp, Homo sapiens
tgcataggctttgaagacaaatagaccagtattaaatcccagcgctgtgtgactttggacagcatgaacctcagtgaagtttatctggaataaactttacctgaagttcattagaaacttcaatgtctttatctggaaaatgcagccaataatacttgcctggcaaacttgttttgagaattaaattagttgaccagctgaaagtgcctaggttagtaagctgtcacgtaggaggtgccagatcaatggcagtgattattacttgtgcaaggtacaagaggtggcatcaatttgagattcataaatatgctaggtatgtagtgggaccatcacccttattagaattatagctggaatatcccattgggttaagctgcactctgaatacagggttccttctcagattgagaaaccctttgtgagccttctcttcaccactgtacatgcggaggtaggaacaagtgctggccttccaccactgcttcctctcaccccgtggggagggtggctgagtcatgctgacttgcacccagtgcagcttgcactcgtgtcattacagtgcagaggtctgcaggcgccaccaaagtgagttctggctttttatcctccttgttacaaaggccagaatcacacatagaacagaatgtaaacaaattttccaagcctctatttgttctcaaattggtcaatgtttcctgtcccactgcccccggatccccaccctccactctaaacctcaaagactaaaaatgcaaataagtgaaatcttcaacagttattgatttgaagagaagctttgagcttgaaaccctgattttttttttagattatttgtagcactttaagtacaaacttggacaatttattttctgcatagttttgaaaatgtttatagaataactgaacccagaaatatgaaggactaaaacctagaaacccaataaataaaaagtggaaacaatcttaatgataaataagaggaaaatgatcaactaaaactgtgaaattgtgacacacttatatattgaaatactatccctaaaacaatgttagttttagtgacattagaaaaatgtttaaaatataatgtgtataaacagagatagaaaactcggcatacagcaggattccaattgttaaatatgtttaaaatgtaccaagacgacttctatatatgattataatgattattatttttacctgttctttatgcatatccacctttatacaacaaatgcttaaaatcattatactcaaaaatgttttaaaaatgtaattgtataactaattttcaatcgtctttgcccttgaaagggagttctaagaccaatcacttcagtaagaacttaactagtaaacacttgtctctcatgaggttatagtcattctcattgacatgaacaggttaaagacagcaagaaatgtgtttgtgaaaagtcaagtgccgtctgagttgccaaatttctggagaacagtgttgtatggaataaaacgaaaataaaatcctagattgtgagttaggaaatcaaaatgttaatactagctgtgccactaaatggytgtagagctggactagcttacttcccctctttgtttttgacttgtttcatttgtaaaatgagaaaaaaatcactccttcactcgttcatttattcacttctttaagaaatgtttctcaaggttatattgtgggttgagtactattgtagacactgaggacagatcagtggaaaaacacaaatgtggctcttgccttcagagaacttatggtccagtggggaagaaaaagcatggactactaactaagtaaatatgtgtaatagtatcaggtgctgtgaaggaaaatgaagccaggtaaggagaaagagagc

SEQ ID NO: 76060 - DNA, 716 bp, Homo sapiens
gcattacaggaacttcatcagttctgccgtgatgctttgaaggcccgctgtgcaactattagctgatcccacttaacaracagtgacgcagtcaccaggcatgtttgtgcccaagcaggtgatgattttctctccactgactccagtcaaggacttttcccttccaggtttcaggctccaggtgacattgggcacagagggtcaggtggaaagtgaacaggtcacgcgccgggcaggtgacacgatcggtgctctgctcacatttcaaagagcccacttttcctcctatgtgtcaagcacacagttactttgaatgctgcagagtaagatgattcatcaatttccgaacgcttgagaaaggaatcactgtttagatattttaaatgttttcctaacccttacagaggtagctatagctcaggaagataaactgaaatgaaggtaagaacaaaaaaagaagcaattgctctcatctataattataagctttatcatttattgtgcactgatagttgcatttccaagcagacattattaattagtgaaataatgaggcaatttgcattcatcctgattcagaaaaattcaaactacttcaacagaccaagcataggtaactcagcctaattactttttgcttttttattagatgaggaaaccgaggcatataaatggaatggatcatgaaatgaagtaaagttaaagaagttttagtc

SEQ ID NO: 76061 - DNA, 1208 bp, Homo sapiens
taatttttaaaatcacatggttggtcactttctcttgtagtaaattatatctaaagactttccccatgcagaattatttgtaaatcaaatgactaagttgtctaagtccaattgaaattaaaaataaaaatatattatagtttagatggaatatatatttaatttctacttcttgtaatccttgttatatatacagccagtaactgaagaaaatcattatcayagatgaatactaaaaggcaaattttcttgagtactaatcaacatataaaacctactatagtattgtatgtatttggggtaatccataaacctatattccatttgcatacaattataattccatcattaaaaaaaattcacattgtgtagctaaataactagaatgaatgctttccaacactttggagtttccttttggaacaatatttgcaaatgtcatataatctcctattgcaagtgtgaacttttgccaagccaaaaaataaaatgctataaaaaatgagatccaactgtgttttaaaatattttcaaagaaaagggaaatattaatccaatcattccttaaatggtattggatttgtaaaaatagggtcgggggggggtagattttatgtcagcggttgctatgttgataataatagtaagttgtgttcattttctcattaaggtatcagtacttcacttcattagttttctaataaactcaatactgcatatgaaatatttaaaaagtcaaagatttggatccctggcatcatataaagtctttgaacatctacctgaaaaatgtttatatagaacagattcacagaattccttcttatacaaacagcccacatccatgttacatacccattctcccctagaattcattggtgaggcttgcacaagtcaggaggaggaaagaaaaaggatgaatgaaaggaagaaatattgttttgttttgctttgttttttatactatcataatactgaaaatacctctggacttaatttgggcaaggaaattattttggggctagtcggtaagtcgaatatttatctggagtatgtaatcgcccatatttttatttttatattttattcttggcacagttagcaccttgccagcatctcttgatacagtcacagagtaagcactttcataatctcatttttgcaattactatctctccttcctaggtaagtggtttaaaaaaaatgca

SEQ ID NO: 76062 - DNA, 1208 bp, Homo sapiens
taatttttaaaatcacatggttggtcactttctcttgtagtaaattatatctaaagactttccccatgcagaattatttgtaaatcaaatgactaagttgtctaagtccaattgaaattaaaaataaaaatatattatagtttagatggaatatatatttaatttctacttcttgtaatccttgttatatatacagccagtaactgaagaaaatcattatcacagatgaatactaaaaggcaaattttcttgagtactaatcaacatataaaacctactatagtattgtatgtatttggggtaatccataaacctatattccatttgcatacaattataattccatcattaaaaaaaattcacattgtgtagctaaataactagaatgaatgctttccaacactttggagtttccttttggaacaatatttgcaaatgtcatataatctcctattgcaagtgtgaacttttgccaagccaaaaaataaaatgctataaaaaatgagatccaactgtgttttaaaatattttcaaagaaaagggaaatattaatccaatcattccttaaatggtattggatttgtaaaaatagggtcggggggggrtagattttatgtcagcggttgctatgttgataataatagtaagttgtgttcattttctcattaaggtatcagtacttcacttcattagttttctaataaactcaatactgcatatgaaatatttaaaaagtcaaagatttggatccctggcatcatataaagtctttgaacatctacctgaaaaatgtttatatagaacagattcacagaattccttcttatacaaacagcccacatccatgttacatacccattctcccctagaattcattggtgaggcttgcacaagtcaggaggaggaaagaaaaaggatgaatgaaaggaagaaatattgttttgttttgctttgttttttatactatcataatactgaaaatacctctggacttaatttgggcaaggaaattattttggggctagtcggtaagtcgaatatttatctggagtatgtaatcgcccatatttttatttttatattttattcttggcacagttagcaccttgccagcatctcttgatacagtcacagagtaagcactttcataatctcatttttgcaattactatctctccttcctaggtaagtggtttaaaaaaaatgca

SEQ ID NO: 76063 - DNA, 1208 bp, Homo sapiens
taatttttaaaatcacatggttggtcactttctcttgtagtaaattatatctaaagactttccccatgcagaattatttgtaaatcaaatgactaagttgtctaagtccaattgaaattaaaaataaaaatatattatagtttagatggaatatatatttaatttctacttcttgtaatccttgttatatatacagccagtaactgaagaaaatcattatcacagatgaatactaaaaggcaaattttcttgagtactaatcaacatataaaacctactatagtattgtatgtatttggggtaatccataaacctatattccatttgcatacaattataattccatcattaaaaaaaattcacattgtgtagctaaataactagaatgaatgctttccaacactttggagtttccttttggaacaatatttgcaaatgtcatataatctcctattgcaagtgtgaacttttgccaagccaaaaaataaaatgctataaaaaatgagatccaactgtgttttaaaatattttcaaagaaaagggaaatattaatccaatcattccttaaatggtattggatttgtaaaaatagggtcgggggggggtagattttatgtcagcggttgctatgttgataataatagtaagttgtgttcattttctcattaaggtatcagtacttcacttcattagttttctaataaactcaatactgcatatgaaatatttaaaaagtcaaagatttggatccctggcatcatataaagtctttgaacatctacctgaaaaatgtttatatagaacagattcacagaattccttcttatacaaacagcccacatccatgttacatacccattctcycctagaattcattggtgaggcttgcacaagtcaggaggaggaaagaaaaaggatgaatgaaaggaagaaatattgttttgttttgctttgttttttatactatcataatactgaaaatacctctggacttaatttgggcaaggaaattattttggggctagtcggtaagtcgaatatttatctggagtatgtaatcgcccatatttttatttttatattttattcttggcacagttagcaccttgccagcatctcttgatacagtcacagagtaagcactttcataatctcatttttgcaattactatctctccttcctaggtaagtggtttaaaaaaaatgca

SEQ ID NO: 76064 - DNA, 677 bp, Homo sapiens
gcatttcattaagcattaaaatgcttacattttatttatcaataaaaatgtaaagaaatttttaaaagtaggcataggacttgaatagaaaatgcacaagagaagaaacacaaaagtttgatgaagaaactctaaagtatttgatatcatttttcatgagggaaataggaaatcatgctgarataccactcgcaccttccagaagaaggctaaaattaaaatgactgaaaacaacaggaattggcaggaagagggaacaaccaaagctgccattttctgtcagagagaaagcaaacaagtaccatcactttagcaaaggacaaggcaaaacaaaatatcttctttgaccggtggaactaaaggttggaggtaacagctggagagaaatgtgggtacctgcctcccaagtgagtggattaacctgtcctggcctcttctgagaaccacagcactgcaaatccagtggttaagaaagcaacgtcgcctcttctgtctgagcttcagttttcatatcagtacactgggccttcagccttgcatggccagagccctcctccttgggtgtgtgggtttccctttatgtccccccaagtgtatcaggagcatgtggcttttccactgtggttttaagcgctatttacaggaaccatctgcagagtctgcagagttcactgtgc

SEQ ID NO: 76065 - DNA, 677 bp, Homo sapiens
gcatttcattaagcattaaaatgcttacattttatttatcaataaaaatgtaaagaaatttttaaaagtaggcataggacttgaatagaaaatgcacaagagaagaaacacaaaagtttgatgaagaaactctaaagtatttgatatcatttttcatgagggaaataggaaatcatgctgagataccactcgcaccttccagaagaaggctaaaattaaaatgactgaaaacaacaggaattggcaggaagagggaacaaccaaagctgccattttctgtcagagagaaagcaaacaagtaccatcactttagcaaaggacaaggcaaaacaaaatatcttctttgaccggtggaactaaaggttggaggtaacagctggagagaaatgtgggtacctgcctcccaagygagtggattaacctgtcctggcctcttctgagaaccacagcactgcaaatccagtggttaagaaagcaacgtcgcctcttctgtctgagcttcagttttcatatcagtacactgggccttcagccttgcatggccagagccctcctccttgggtgtgtgggtttccctttatgtccccccaagtgtatcaggagcatgtggcttttccactgtggttttaagcgctatttacaggaaccatctgcagagtctgcagagttcactgtgc

SEQ ID NO: 76066 - DNA, 670 bp, Homo sapiens
ttaacttcttcctaaagaataattcatcaacttattaagtgacttttaatgcttagctatataagtaagtgttataatgatgaagtaaacagtattgttcctattcatttatatttatgtgctcattcatttcctttaacaaatatctacatttgctatgtattgcattagataaaagacaggattattttaactgagaactgagactggtaaacaaactgggaaaccaacaatattagacaagtttgacagttgacctgcaagaagaatctgcatgatataattgcagaaaataacatggaggatgatagcaaatttgtcaagacctcatgaacaagaggtgattgtgcatcctttattatggaaacctcatggcaggccacartttcattaaaagctggttacttgccagggggctgttagtaggttgttcttatgccgaaagaatgatacacgcccaccttctgtgctccccagtttcttcctctctgtacatgagaaatgtttcagttggattagctttgcacttggctgtctgatttagaaaggttgtgaggagatcacacggagccaattcaaaggctgctgtacttcctgaaatatatggttctcataagcaacacactttgagtctaagagatgtttgaagtgagtcaagataagcctttgt

SEQ ID NO: 76067 - DNA, 756 bp, Homo sapiens
tcgatcatgccctgccatagtttcatccaacctccccatctttatattcttgttcagcagcaccctaatatagtgcccagtgctgttccttcatcctgtttcttatgagaggatgaggagggttcagggatgccagttctcttcctattgcctcttggcaaggaaaaaccccaaagctgccctcgggccagacaggggctttataggcctgaacctcataagtyatagatcatcctcatcttatacatctatgcacatccgcatatttccccaataccagtgaatagacacacatacatacacaaccacctgcaaacacttggacatgcttcacacagacaggaatacacagggcaagcacagacatgcaagaatcatagagacataaatagacctacccctgatgtataaagaagcacaagtatgcaccactctgtgacacttggtgagggcaaagcatatctgtattttcactactcccattggaattaacttctactaagttggggctgggtagaggtcagtctcagcaatttatgcatgctttttttttttttttttttttttttttctggagacaaagtctcgctctgtcgcccaggctggaatgcagtgggcgatgtttgcttattgccacttctgcctcccggggttttaagcgattctcctgcctcagcctccctagtaactgggactacagacacccaccaccatgtccagctaatttttttgtatttttagtagagatagggtttc

SEQ ID NO: 76068 - DNA, 756 bp, Homo sapiens
tcgatcatgccctgccatagtttcatccaacctccccatctttatattcttgttcagcagcaccctaatatagtgcccagtgctgttccttcatcctgtttcttatgagaggatgaggagggttcagggatgccagttctcttcctattgcctcttggcaaggaaaaaccccaaagctgccctcgggccagacaggggctttataggcctgaacctcataagtcatagatcatcctcatcttatacatctatgcacatccgcatatttccccaataccagtgaatagacacacatacatacacaaccacctgcaaacacttggacatgcttcacacagacaggaatacacagggcaagcacagacatgcaagaatcatagagacataaatagacctacmcctgatgtataaagaagcacaagtatgcaccactctgtgacacttggtgagggcaaagcatatctgtattttcactactcccattggaattaacttctactaagttggggctgggtagaggtcagtctcagcaatttatgcatgctttttttttttttttttttttttttttctggagacaaagtctcgctctgtcgcccaggctggaatgcagtgggcgatgtttgcttattgccacttctgcctcccggggttttaagcgattctcctgcctcagcctccctagtaactgggactacagacacccaccaccatgtccagctaatttttttgtatttttagtagagatagggtttc

SEQ ID NO: 76069 - DNA, 1918 bp, Homo sapiens
ccagatttcagacttatcattcaaagacaatggtcttttatatcttgccagattccttgaaaaaaattgggagaacctatccggcctgatcttttatttagactgtggaatcttatgagtagtatactgagcattttagacatgtttcattatttggcatttcctcaccccagttgaaagcttaatccagatctgatatttatttcccttttttgtaccagcaacagtattctatttgtttttgatgctcaaggaaaatttgttaattaagatggttctaatgctatagaaagagctggaaatttaatgtctccaaggaatgttattgtgttgtatgaactcactagccaaagttgaacatcttacatccatatttcaaaaacacttaaagcatctattagcttcttctggattttgctcctggagaacataaagaagaaaccttgtctgtaaatactatgcaataatcttaactgtatttatttctgtaatgtcttggcaccctgaacatggaagtgagtttacaacacactgcactgtgctcccccagtgaagcatgagtttgaaccaaacagaatagtggtgatgattcttattttggttcttctcactagggtaagatctcctttagctttagaatcatgtttccttcatacacctgcacttaggaaatgttctcggtgaatagcacaaatatagtgttcaataaatgttgaatgaatgaattaaatacactgaaagagattgtggcctcagttaaagtcattgtatctaaaacacatgattgaattccaaatggccacactacttggttgtcagaataaaaaaataataaattatctgctgattccagacacattcaatagaagggcatttaaaaggaagcactggagtgtttaatctatgaacacaatttttgggttgtagaattattaaccaaagatatcatgcatgtttctgtttttctaagtagaataatgaaacatattaaawaaacatatgcaattttaatggctcagaactcaactacaaatgctaattaatatgctagaatagggattagcagaacatatttgtaacatgccaaacggtaaataatttaattttttaggaccatatggtctctgtcacaattacttaactctgatgccatagcacaaaagccaacagggtgaaaagcaacaacagggtgaaaaataggcatagcagtgtttcaataaaactttatttacaaaaatagatgccagaccagatttgctccatagattctcatctctggttccataatataataatgatataattgtgtattactgagattcaaagtaagtcttgcaccgcctctaaatgtccaatgcctggctttcagcatctgtggtcctaaattttatgtttacagtcttgtttttatttttgtgcttagagcttcctagtattacaaatatatccatatatttctacaaatatatttatttctatgcacaattttatgtgaatattattaaatacttattacagtaataatcacaggtacaaaaatatattttagatttaaaaattcaggttatgtgattatcaagaaaatagcgtactcctttacgccagagcaaaaggggttcccagtgcctcaataagtttaatttagggaaaagtagctcctatcatactcaataactgctcctttccactcaaaatctagtttagctatcacagtgttctcacacataaatcagaatgacatgacaaaatggttaatctatttgccaatagccaatcatcaagcaatgggtaaattcaaaaatgctgatctcatatggtcatcaaagtcaaattaatggaagcatatgatgagtatcatttataaaatcacatcaacacttctcaatttaattacatgagattcaactaaaataatgct

SEQ ID NO: 76070 - DNA, 1918 bp, Homo sapiens
ccagatttcagacttatcattcaaagacaatggtcttttatatcttgccagattccttgaaaaaaattgggagaacctatccggcctgatcttttatttagactgtggaatcttatgagtagtatactgagcattttagacatgtttcattatttggcatttcctcaccccagttgaaagcttaatccagatctgatatttatttcccttttttgtaccagcaacagtattctatttgtttttgatgctcaaggaaaatttgttaattaagatggttctaatgctatagaaagagctggaaatttaatgtctccaaggaatgttattgtgttgtatgaactcactagccaaagttgaacatcttacatccatatttcaaaaacacttaaagcatctattagcttcttctggattttgctcctggagaacataaagaagaaaccttgtctgtaaatactatgcaataatcttaactgtatttatttctgtaatgtcttggcaccctgaacatggaagtgagtttacaacacactgcactgtgctcccccagtgaagcatgagtttgaaccaaacagaatagtggtgatgattcttattttggttcttctcactagggtaagatctcctttagctttagaatcatgtttccttcatacacctgcacttaggaaatgttctcggtgaatagcacaaatatagtgttcaataaatgttgaatgaatgaattaaatacactgaaagagattgtggcctcagttaaagtcattgtatctaaaacacatgattgaattccaaatggccacactacttggttgtcagaataaaaaaataataaattatctgctgattccagacacattcaatagaagggcatttaaaaggaagcactggagtgtttaatctatgaacacaatttttgggttgtagaattattaaccaaagatatcatgcatgtttctgtttttctaagtagaataatgaaacatattaaataaacatatgcaattttaatggctcagaactcaactacaaatgctaattaatatgctagaatagggattagcagaacatatttgtaacatgccaaacggtaaataatttaattttttaggaccatatggtctctgtcacaattacttaactctgatgccatagcacaaaagccaacagggtgaaaagcaacaacagggtgaaaaataggcatagcagtgtttcaataaaactttatttacaaaaatagatgccagaccagatttgctccatagattctcatctctggttccataatataataatgatataattgtgtattactgagattcaaagtaagtcttgcaccgcctctaaatgtccaatgcctggctttcagcatctgtggtcctaaattttatgtttacagtcttgtttttatttttgtgcttagagcttcctagtattacaaatatatccatatatttctacaaatatatttatttctatgcacaattttatgtgaatattattaaatacttattacagtaataatcacaggtacaaaaatatattttagatttaaaaattcaggttatgtgattatcaagaaaatagygtactcctttacgccagagcaaaaggggttcccagtgcctcaataagtttaatttagggaaaagtagctcctatcatactcaataactgctcctttccactcaaaatctagtttagctatcacagtgttctcacacataaatcagaatgacatgacaaaatggttaatctatttgccaatagccaatcatcaagcaatgggtaaattcaaaaatgctgatctcatatggtcatcaaagtcaaattaatggaagcatatgatgagtatcatttataaaatcacatcaacacttctcaatttaattacatgagattcaactaaaataatgct

SEQ ID NO: 76071 - DNA, 1918 bp, Homo sapiens
ccagatttcagacttatcattcaaagacaatggtcttttatatcttgccagattccttgaaaaaaattgggagaacctatccggcctgatcttttatttagactgtggaatcttatgagtagtatactgagcattttagacatgtttcattatttggcatttcctcaccccagttgaaagcttaatccagatctgatatttatttcccttttttgtaccagcaacagtattctatttgtttttgatgctcaaggaaaatttgttaattaagatggttctaatgctatagaaagagctggaaatttaatgtctccaaggaatgttattgtgttgtatgaactcactagccaaagttgaacatcttacatccatatttcaaaaacacttaaagcatctattagcttcttctggattttgctcctggagaacataaagaagaaaccttgtctgtaaatactatgcaataatcttaactgtatttatttctgtaatgtcttggcaccctgaacatggaagtgagtttacaacacactgcactgtgctcccccagtgaagcatgagtttgaaccaaacagaatagtggtgatgattcttattttggttcttctcactagggtaagatctcctttagctttagaatcatgtttccttcatacacctgcacttaggaaatgttctcggtgaatagcacaaatatagtgttcaataaatgttgaatgaatgaattaaatacactgaaagagattgtggcctcagttaaagtcattgtatctaaaacacatgattgaattccaaatggccacactacttggttgtcagaataaaaaaataataaattatctgctgattccagacacattcaatagaagggcatttaaaaggaagcactggagtgtttaatctatgaacacaatttttgggttgtagaattattaaccaaagatatcatgcatgtttctgtttttctaagtagaataatgaaacatattaaataaacatatgcaattttaatggctcagaactcaactacaaatgctaattaatatgctagaatagggattagcagaacatatttgtaacatgccaaacggtaaataatttaattttttaggaccatatggtctctgtcacaattacttaactctgatgccatagcacaaaagccaacagggtgaaaagcaacaacagggtgaaaaataggcatagcagtgtttcaataaaactttatttacaaaaatagatgccagaccagatttgctccatagattctcatctctggttccataatataataatgatataattgtgtattactgagattcaaagtaagtcttgcaccgcctctaaatgtccaatgcctggctttcagcatctgtggtcctaaattttatgtttacagtcttgtttttatttttgtgcttagagcttcctagtattacaaatatatccatatatttctacaaatatatttatttctatgcacaattttatgtgaatattattaaatacttattacagtaataatcacaggtacaaaaatatattttagatttaaaaattcaggttatgtgattatcaagaaaatagcgtactcctttacgccagagcaaaaggggttcccagtgcctcaataagtttaatttagggaaaagtagctcctrtcatactcaataactgctcctttccactcaaaatctagtttagctatcacagtgttctcacacataaatcagaatgacatgacaaaatggttaatctatttgccaatagccaatcatcaagcaatgggtaaattcaaaaatgctgatctcatatggtcatcaaagtcaaattaatggaagcatatgatgagtatcatttataaaatcacatcaacacttctcaatttaattacatgagattcaactaaaataatgct

SEQ ID NO: 76072 - DNA, 664 bp, Homo sapiens
gcatgaatttctcagcatatggattttatattaaagttttactataattttatttaactaaattaaaaacatgtgtagtaaacaactttaattttccagggcataattatgtgttaagaaacatatctgtagtttatttactacagaatccttttatgtaactgtagcctttaacaatgataaagctaggttaacatcaatgccatcttgtatatacaagatacagataaattctctggtgatatttmaaccttaaagatgtagtagtcaaatgtaaaacaatttatcatttggcttagcttattttcagtaggaagtacttacttatacaacacaaaattaataaaaaataaaattgacttcggtaaaaataaatgatattatccagatttatgcagagaaaaaaagctaattaaatgaatgactttctaaataacacttagcatcaataaaatgaaaagaatcaaagtagtaacttctatttcatgtctattttaaattaacattaaaattttaggctgggtgcagtggctcacgcctgtaatcccagcactttggaaggccgaggctggcagatcacgaggccaggagatcgaaacacggtgaaaccccatctctactaaagataacaaaaaattagccagtcgtggtggctcgcgcctgt

SEQ ID NO: 76073 - DNA, 621 bp, Homo sapiens
aggatgcagagattgcagtgagccaagattgtgccactgtaccccagcttgggcaacagagtaagacttcatttaaaaaaaaacaacaaaaacaaaaaacaaatccttaggggtggaaggaatgagaagtgactgctaatgagtatagtgtttcttcttgaaaatgttctggaatttgtagtagagattcagcctgtgaatataccaaaactactgagttgtatactttacagggtaaattttatggtatgtgaattatatctcaattttttaaaacacatgagtcaggtagtggcatgtacctgtaatcacagctacttgggaggctaagggaggaggatcacttgagcccaggagtgtgaggctgcagtaagctatgattgcaccactgcaccccagcctgggtgacagagcaagaccttgtctctaaaaaaataatgataatagaatgagcattctgtcctcctggaatattctactagatcttcctcctaagggcaactgggcttgtccyccggggtgtcacatccattacaggggaggttgctttactcccctgtcatcaccctatttccaggctggtattaggagttccccaagcttcccattgccacttctgag

SEQ ID NO: 76074 - DNA, 811 bp, Homo sapiens
tctcaccttggcttcctgagtaatttcatttacaggtgcctgccatcatgccaggcttaaccattgctctttttgaaaagttttccaggtggtttgaatgtgcagtcaggatgagagcctctggggacatttggcaatgtctaaatacattttaggttgtcataactgggggtgctcctggcatctagtgggtggaggacatgaatgctgctaaacatcctacaacacacaggacagccgccctcaccaacccccaaagaatgatccagctccaagcgttgatggggccactgttgagagccctgggctaaggagcaccccggaggctggagacagatgccagctcaaaggcagaacctgatagtccaggaagggggttagaagatgttccacggaggcaggattgagtgggcagagaagagatgtgttgaaaacaaaagcagtcagactgagcaacatatcaagacccatctctataagaaaatttaaaaattagctgggggccaggagtggtggctcacrcctttatcccagcactttgggaggccaaggtgggtggatcacttgagcccaggtgttcgagactagcctgggcaacatggtgaaaccctgtctctaccaaaaatacacacacacacacacaaatgagctgggcatgctggcaggcacctctagccccagctactagggaggctgaggtgtgagaatcacttgaacccaggaggcagaggttgcagtgagccgagattgtgccactgcactccagcctgggcgacagagccagactctgtctcaaaaaaaaaaaaaaaaa

SEQ ID NO: 76075 - DNA, 731 bp, Homo sapiens
ttggctcactacaacctccaccgcccgggttcaagcgattcttctgcctcagcctctagagtagctgggactacaggtgccccccaccacgcctggctaatttttttgtatttttagtagagatggggtttcaccttattggccaggctggtctcaaactcctgacctcatgatccaccggccttggtttcccaaagtgctgggattacaggcatgagccattgtgcccagccttatttttacttttttgagactgagtctcactctgttgaccaggctggcgtgcagtggcttgatatcgtctcagtgcaacctctgcctcccgggttcaagcgattctcctgcctcagctcctgagtagctgggattgtagcctgccaccactcctggctattttttttttttttwatatatttttaatagagatgaggtttgccatgttggccaggctggtctcgaactcctgaccttgagtgatctgcccatctcagcctcccaaattgctgggattacaggtgtgagccagtgcacctggactcatttcacctctttaaagaccttatcttcaaaagcagtcacagtctgaggtactggggttaggacttcaatgtacgaatttgtagggggacgcagttcagcccatagagctagagttctgtggtttcctggggagactgaggagacgcctcagaggaatttgtacggggaaaggtctgaggaaaaaggatcgg

SEQ ID NO: 76076 - DNA, 731 bp, Homo sapiens
ttggctcactacaacctccaccgcccgggttcaagcgattcttctgcctcagcctctagagtagctgggactacaggtgccccccaccacgcctggctaatttttttgtatttttagtagagatggggtttcaccttattggccaggctggtctcaaactcctgacctcatgatccaccggccttggtttcccaaagtgctgggattacaggcatgagccattgtgcccagccttatttttacttttttgagactgagtctcactctgttgaccaggctggcgtgcagtggcttgatatcgtctcagtgcaacctctgcctcccgggttcaagcgattctcctgcctcagctcctgagtagctgggattgtagcctgccaccactcctggctattttttttttttttaatatatttttaatagagatgaggtttgccatgttggccaggctggtctcgaactcctgaccttgagtgatctgcccatctcagcctcccaaattgctgggattacaggtgtgagccagtgcacctggactcatttcacctctttaaagaccttatcttcaaaagcagtcacagtctgaggtactggggttaggacttcaatgtacgaatttgtagggggacgcagttcagcccatagagctagagttctgtggtttcctggggagactgaggagacgcctcagaggaatttgtrcggggaaaggtctgaggaaaaaggatcgg

SEQ ID NO: 76077 - DNA, 492 bp, Homo sapiens
tggaacctgaatgtcctgaccccccatccagtgccccccttcctactctatgctgcctctcgggtgacacacacagcagcaagtgagccctgcagacagagacattctagaacccaggcctgggaccagtgctcaggagccatactctcagctagattgccttcagcctgccaggaggaggagcagcccagtccagactgaaagcctccaargaggaagttctaccggcttctccatgcctccaaacccactgtaccttgtgcattccatctggaattttcttctgttgaaaggaaggtgctgggtgggaggaggagggagaggatcaggaaaaataactaataaatactaggcttaatatctgacacaagtttacgtatataacaaacctgcacatgtacccctgaacttaaaagaaaagttaaacaaaaaataaaggtgctgttgccatggcccaagccacagcgtctagagctgtgccatccaatacgc

SEQ ID NO: 76078 - DNA, 1473 bp, Homo sapiens
gggtatggggccgtgcctgctggcagaaccgttgtgcacctggggtagccactgtgctcacgagggacaggctgcctaacgctgaagaaccgggtttcagcctctgagcgcaggaccttctctccagcccccatggcccactgagacctgagcaacagaaaaggagcaaacctgcaggcaggccctcccaggcagcagcaggacagggtgcccgaaggagagcgtggagttgcctctcagaagattctagaaactctggctgggtgcggtggctcacgcctataatcccagcactttgggaggccgaggcgggtggattacctgaggtcgggagttcgagaccagcctggccaacatggtgaaacccccatctctactaaaaaattcaaatattagccaggcatcctggtgcgcacctgtaatcccagctactcgggaggctgaggcaggagaattgcttgaactcgggaggcagaagttgcagtgagccaagattgtgccactgcactccagcctgggcgacagagcaaggctctgtttcaagaaaaaaagaaagaaagaaagaaactcaactctgcccaggtgccttagctattccgctgcccagaagcagggaggagacccagtgctccttcccagaaggcccgttttccagcccgtcgccatccagtctcccttggagaagtcccgggagatgggatccagcttccttcctcttttcccaccttctccactcccagaagctattcctgcaatcctggcctagcctctcactgagagcagggaattccctctctggcagcgggataaagaaggaccctgcttagagccgggacagccaaagggacagggagggcctggatggggaggaggcagaagtctggcccctgctgcctccccacacatacctccacccccctayccccgccccaagaatgtaattaagcagcagcttctgccaggagccaagctttctgccttccgactataaatcaccttctgaatcatctctcagctcctagagaagcaacttctgctcaggctgctctgggcggccctggtgccactccccctgggaagcctgcctcccccaccccttctgtgcccagccccctggctctaggtcccagcaagagtctggcagactctgggggtcggggaatgattaggggacactccagcaaccttctctaccctgccctccccttcctgagcaggtaaagagctgaagtgagattagcctggcccagcaccctcaacttaagaataaagctaaagcactgtggggcaaacaggcaaaaagaagaaaaggggaaaacagagccaggtggggcaaatctgggagggcttcttggaagaggcaagtttggctccagggcttcagtgagccaatagcttgcagataggaggtgaaaatagctaacatcgatatgcttcctgtatgcaaggtatcattctaagaagtattcactc

SEQ ID NO: 76079 - DNA, 1488 bp, Homo sapiens
tgaataatattccattgcagtagcataccacattttgtttgtccatacctcacttgctggatatataggttgtttttattttttagttagtattgacaatgctgctatgaacatttgtgtaaaagctttttgtggacatgtgwttttatttgtctttgatgtataccagtaagtggaattgctaggtcatatgaaaactttgtgtttaccattttaaggaactacaaaatgttttttaaattgcaacattttttattcctcctagcaataaaggagggcgcaatctatttttgaataatattctttaaattttccttctaacataaagatgacttaaatacaatattgtaattttaaggcacttaagcatataatgaaaccagtaacattatatattgtgttttcaaggcaaaaaattaaaaactagtgaaaatgtgtcatcaagatatgatactggtgattattttatcacagaaaattggtaaatagtttcaaaattgattttcaagtgaacatttgatattgaaaagttaccagaaaattatactgatgtaaatgcagcattttgtaaagataaacttgaaacaaagtggaagctgaatccagtccccccttaaaacaatggaggatttatttatttatttattttttactctgtaagcaatgataacagttctttcacaatactttgtactgaggaaaaaataatgctagtgacatggagaggcagagagaaacagaataggattctgaccaaggatgcatttttatactttcctggcaaatggaacagacgcccaacatggctgacacgtgaaaagcaggttacctgagattctgaatacagcagtcaagtcagccacaccctgttccaaatagtgttgttgcctggccttttttgccagctgaccatattgtgctttgattgccagatccccgaatcttataaaactcagtagaaaaaaaatgcttgtaacaaagtcaacattctaaggtacaaaactgcagggaagaaggtaaaaaagaagtgactttaataagatgaggtaaaataataaagatgccaaagacagaaaaggtcaaatgcgctaaagttaactgaagcagcagtcaccgtaaagaaaaagcctttcaaattttcaggtttcagtcagcaattctgaaatagcacacttggcattgatgtgtcaatactgcatatatgtgccaaacatggaaaggatttttcttctgcccattcatgtcattgtgacattccaaattgtcatttgaaaaacagtcttttaatctttatgaaagagaatgattatgaacttctattttacttgatgatgaatatttggagaacatagggcttgtttttatttattaaagctctttaaaattaaattttcagttataagtaattttttagggagggttttggaataacttggcttgattaaactggaaactatttcctgaaaactatcagaaaaatgtaataac

SEQ ID NO: 76080 - DNA, 1488 bp, Homo sapiens
tgaataatattccattgcagtagcataccacattttgtttgtccatacctcacttgctggatatataggttgtttttattttttagttagtattgacaatgctgctatgaacatttgtgtaaaagctttttgtggacatgtgtttttatttgtctttgatgtataccagtaagtggaattgctaggtcatatgaaaactttgtgtttaccattttaaggaactacaaaatgttttttaaattgcaacattttttattcctcctagcaataaaggagggcgcaatctatttttgaataatattctttaaattttccttctaacataaagatgacttaaatacaatattgtaattttaaggcacttaagcatataatgaaaccagtaacattrtatattgtgttttcaaggcaaaaaattaaaaactagtgaaaatgtgtcatcaagatatgatactggtgattattttatcacagaaaattggtaaatagtttcaaaattgattttcaagtgaacatttgatattgaaaagttaccagaaaattatactgatgtaaatgcagcattttgtaaagataaacttgaaacaaagtggaagctgaatccagtccccccttaaaacaatggaggatttatttatttatttattttttactctgtaagcaatgataacagttctttcacaatactttgtactgaggaaaaaataatgctagtgacatggagaggcagagagaaacagaataggattctgaccaaggatgcatttttatactttcctggcaaatggaacagacgcccaacatggctgacacgtgaaaagcaggttacctgagattctgaatacagcagtcaagtcagccacaccctgttccaaatagtgttgttgcctggccttttttgccagctgaccatattgtgctttgattgccagatccccgaatcttataaaactcagtagaaaaaaaatgcttgtaacaaagtcaacattctaaggtacaaaactgcagggaagaaggtaaaaaagaagtgactttaataagatgaggtaaaataataaagatgccaaagacagaaaaggtcaaatgcgctaaagttaactgaagcagcagtcaccgtaaagaaaaagcctttcaaattttcaggtttcagtcagcaattctgaaatagcacacttggcattgatgtgtcaatactgcatatatgtgccaaacatggaaaggatttttcttctgcccattcatgtcattgtgacattccaaattgtcatttgaaaaacagtcttttaatctttatgaaagagaatgattatgaacttctattttacttgatgatgaatatttggagaacatagggcttgtttttatttattaaagctctttaaaattaaattttcagttataagtaattttttagggagggttttggaataacttggcttgattaaactggaaactatttcctgaaaactatcagaaaaatgtaataac

SEQ ID NO: 76081 - DNA, 1509 bp, Homo sapiens
tggcatatacagttagaagcagccaggtcacatcttgaacaatttgctgcttagaagtttcttctgccagatacccttgaggaagttctaggaagttccaaactttccctcatgtttctgtcttcttctgagccctccaaactgtttcaactctgcccatcacctagttccaaagacacttccacattttcaggtacttttataacaatggcccacttctctggtaccagttttctgtattaatttgtttttgcactgctttaaagacatacttgagactggataatttacaaagaaaggtggtgtaattgactcacagttcttcctggctggggaggcctcaggaatcttacaaccatggtagaaggtgaatgggaagcaagacatgtattcacatggtcagagcatgaggaagagggtaaaggggaaagtgctacacacttttaaacaaacagatcttgtgagaactcactcactatcatgagaacagcaagaggaaaatccaaccccatgattcaatgaccttccaccaggtccctccataacattaggaattacaattcaacatgacagttaggtggggacacagagccaaaccatatgaataggctaaccttaagtctgattattcatataacaaggatttctaaaagctgtgtgactcatgagagctaagagcaaagctgtttcccacagaaggggtagattttatgattgatttgtctaatataagccattgcaaacactctttataaagatgttaccttccactaattcttaaaccctctgcaacctaatatccatcctcacctttcaayttttttttttttggaggtcaacaaacatggcctgtggacagattattctaacttttgccagtcttctccttgtctgatctgtgtatagcattggtcctatgattgagaatctcctccttgaagatcttttctgagaatttcatagcaaatatcaaagagcagagaattaatgaaggtaataaaatttgtattttaagatataactttggcacaaaacagtttgagtggcaagccttgaggaaaaaatgtaagtgaaaaagctattgaggaaattcttttttcctactaaaattgagaaagatattgaagttaagtccttctcttctatgaaaaaataagataaacatggaattaattaaaatcatacttttccctgaggctagcagaaaaggatggctgccataaagatgttttttattataatccagagagaaaggacatttcatagatgagcatatagacatggcagcttccatatctgggtatagatgtacaatgggacttcatggaaaatacatattataaaaaaaggctatgcatgaatttcaaaggtttttgcactaaataaacttgtactaacttgttataacatgcctcaacaagactgagtttgtgacactgataagactaaaacatcagctttaaaaagagtccctatgagaacaacatgaattctgctaaaattgaagca

SEQ ID NO: 76082 - DNA, 1509 bp, Homo sapiens
tggcatatacagttagaagcagccaggtcacatcttgaacaatttgctgcttagaagtttcttctgccagatacccttgaggaagttctaggaagttccaaactttccctcatgtttctgtcttcttctgagccctccaaactgtttcaactctgcccatcacctagttccaaagacacttccacattttcaggtacttttataacaatggcccacttctctggtaccagttttctgtattaatttgtttttgcactgctttaaagacatacttgagactggataatttacaaagaaaggtggtgtaattgactcacagttcttcctggctggggaggcctcaggaatcttacaaccatggtagaaggtgaatgggaagcaagacatgtattcacatggtcagagcatgaggaagagggtaaaggggaaagtgctacacacttttaaacaaacagatcttgtgagaactcactcactatcatgagaacagcaagaggaaaatccaaccccatgattcaatgaccttccaccaggtccctccataacattaggaattacaattcaacatgacagttaggtggggacacagagccaaaccatatgaataggctaaccttaagtctgattattcatataacaaggatttctaaaagctgtgtgactcatgagagctaagagcaaagctgtttcccacagaaggggtagattttatgattgatttgtctaatataagccattgcaaacactctttataaagatgttaccttccactaattcttaaaccctctgcaacctaatatccatcctcacctttcaacttttttttttttggaggtcaacaaacatggcctgtggacagattattctaacttttgccagtcttctccttgtctgatctgtgtatagcattggtcctatgattgagaayctcctccttgaagatcttttctgagaatttcatagcaaatatcaaagagcagagaattaatgaaggtaataaaatttgtattttaagatataactttggcacaaaacagtttgagtggcaagccttgaggaaaaaatgtaagtgaaaaagctattgaggaaattcttttttcctactaaaattgagaaagatattgaagttaagtccttctcttctatgaaaaaataagataaacatggaattaattaaaatcatacttttccctgaggctagcagaaaaggatggctgccataaagatgttttttattataatccagagagaaaggacatttcatagatgagcatatagacatggcagcttccatatctgggtatagatgtacaatgggacttcatggaaaatacatattataaaaaaaggctatgcatgaatttcaaaggtttttgcactaaataaacttgtactaacttgttataacatgcctcaacaagactgagtttgtgacactgataagactaaaacatcagctttaaaaagagtccctatgagaacaacatgaattctgctaaaattgaagca

SEQ ID NO: 76083 - DNA, 563 bp, Homo sapiens
ccctgctccaacacggatctctgaatttggaaggatttttgccaaatcacactgttgcatggctctcaattatttcttctgattccagtaggttttaacatagttattttggttgcatccctctatgggactgcacaggctgtgggttgtggrgagactgaatatgagggacaggtcagtgaactgtcaagaaatgtttttaattcctcattcccaggacgtacttaatcttaaccagtgaaaccaatttttaaagccagagtcagtgacctgcacatgcaatgtcctttttaacatgttatttattttggggagggcccatgtggcaaagaaaaaaaaagaaaaaaacaatttaggttaaaaaaaataaaactacaggctggggcgaggtggctcatgcctgtaatcccaccattctgcgaggccaaggaggggggattgcttaaagccaggaggtggagaccagcctgggtaacaattggagactctgtttctacaaaaaaataaaataaatgagctgggcatggaggtgtgtgcctatatagtcccagctacttgggagg

SEQ ID NO: 76084 - DNA, 2464 bp, Homo sapiens
ttctctatttcagttaattaatgcttatataaggcaaagcagtttcagaggttgtttatcatagtttagattttagaacctcagttctaaacggaatagcaaacacacacatgcaaaaaaaaaaaaaaagaaagaaaaagaaataacagtatcacagtcggcataaaaacaacctatttagaataagtagttcagttcaagatgtagatgctttatcaatggctttaattggaagaaaggaggttttcaaccactcaaagtaaaatatgatagcttgtgtcagagtgttataaaacatattcctcttaagagcagaaggggagaaagagaaatgaaaaacatgatggaccttgaataacggctcaacagtaatgctgtataattgcttttcatcatttctatcagcagtgaagctgtaaaacattgatcaaagatgatgactatcacaaagtgcttaaagtgcagcacattgttaaatttcctcagcgtctgatataattatagcatgagcaagcataaagatgatttccccacctccacctgccttcctcaaatgatttcccagccaaggtagatgggattaaagaaatctgacatgaattagctatatgagaatgtcaatgtcaaatgatatatcacaggcacttgcctcaaaaaggataaaaataccatgaacatttcacattaatgcacaccggaattcagtcactctctttactgacaaacatgctactcaaataaaggattcaaagcatacccaatgaatgagacagtgcaacatggagaaagaagtgtttactgatggtttaaaagagatagctcttggctgctaaggctttacagctgaagaaatgattgagggagaaaagctttttatcaattcttggaagtaataggtaaaggatttctttcaataattttgtagcttatgctaaattaatattttaagcatatggtttcattagaattcaactatattaatgtatcaatcatttgataaattaaaaattattaaaattctactgtttgtctacaggtgctgtgcggttacggtacttgcatgttaggctccttgccacatcctttcagcccatctgatttcaccgcagcagrgatgaataatcatacacctctgccggtttcctacatcaagtactcactctgctgtctctctgatatggaacaccactcgattaaaattagaggaattaggaagtgaggggaatttaatgcattgggactgagttttaaccaatgatagaagcggttagatgtttccttccccatatgctctggaaggataattgtgagatgcactctacatagtttgattccctgagagtgggttgaggtcctattgctcacagcagtgaccagtgcattagtgctcagtcactagcttttactttatctttgtctcattttcccacttcttccattttattactccaccccaaaaacctacgtgattctaagttcttgtttcagtatcagctttcagggaggaactgaaaccaagatagctgatactgaaagtagtgatggaaagtttacccttaaagatgggattctgaaattaattctctcataggtcaaatggcaacaagaacttcattgctggtaataaatgaggtgttgattatccccggtgtgctttacttccacgtttttaaagacacaacggtggaaagttaaatgagaatcagatgtaaagaaatacagatttatgtaatagctctatcacttgaaagctatgggggcaaggtatttataaggcgtgtggaggtggctcacctgttttaactataccagaagtcttaaagtaaaagaacggcaggctcagttcagccaactattattagctcaggacatgccggaaagtcaagaaggtctttcttgcagttttagttacctgtaactgtaggaaagatagcactaagaagaaggcctatgatttaatcactggacttaagcaaatgcaaacaataatgaaggctctgcttttggaggttccctgacattagagatacgctattgaatgagtgggaacctgacaagttgcataaatcacttggaaatattgacctgagaatatggcacttccgacgttcccgatctttttgaactttgagaaggagcattgccactgttgctagacaccaacttctctttgtatgaggacaacgtaaagaaattatctaaggtgagtgccttacagtatgatatctgtctcttttaaaataaatcacatcttcagtatttgactcaaatatataaatatgatcaactcttagcaaagtctaagaagacaaatatggtctcttctacaggtgagatatctcatgaaacaagtttcagaactggggctactaaggtaatatgtactagcagaaacagaaggatgtatataaatggatattggtgtttcatgaaaacacacacaatacaaggttagagaactaac

SEQ ID NO: 76085 - DNA, 624 bp, Homo sapiens
tgatgcaataatctgtacaatcaaccccaataatgcacgtttacttatgtaacaaacctgcatatcttacacatgcaccccaatctaaaaatagaagtttaaaaaagaacaaaatgagttaaattattggaaaattatttcaaatcaaattacacatagcaacgtgttaagatctactcactgtaaagagctcttttactcatctgacaagcatttagtgtaagtgttctattcgctaggccataggaactagaggctggaaaaagaatggtgaagaaaatgcccatgccattaagaaatttgtgtgtgtgtgtgtgtgtgtgtgtgtgtrtatatatacaaattaagacattattgaacaaaggtgcaaacagcaattaacaataacaaaaggctaaaatacaaaattattaaaataataataacccaacaatttttaaattgggaggcaatataaaaagatattgaagagatccaaatgtcaacgtgtgtgtgtgttggcggggatagagttacggggtaataaatgtttatagctttttgtttctctcttttttgttctttgcaatcaaacttaagttttcttcagtttgaaatcacttgttacaatgatattctttagcc

SEQ ID NO: 76086 - DNA, 624 bp, Homo sapiens
tgatgcaataatctgtacaatcaaccccaataatgcacgtttacttatgtaacaaacctgcatatcttacacatgcaccccaatctaaaaatagaagtttaaaaaagaacaaaatgagttaaattattggaaaattatttcaaatcaaattacacatagcaacgtgttaagatctactcactgtaaagagctcttttactcatctgacaagcatttagtgtaagtgttctattcgctaggccataggaactagaggctggaaaaagaatggtgaagaaaatgcccatgccattaagaaatttgtgtgtgtgtgtgtgtgtgtgtgtgtgtatrtatatacaaattaagacattattgaacaaaggtgcaaacagcaattaacaataacaaaaggctaaaatacaaaattattaaaataataataacccaacaatttttaaattgggaggcaatataaaaagatattgaagagatccaaatgtcaacgtgtgtgtgtgttggcggggatagagttacggggtaataaatgtttatagctttttgtttctctcttttttgttctttgcaatcaaacttaagttttcttcagtttgaaatcacttgttacaatgatattctttagcc

SEQ ID NO: 76087 - DNA, 624 bp, Homo sapiens
tgatgcaataatctgtacaatcaaccccaataatgcacgtttacttatgtaacaaacctgcatatcttacacatgcaccccaatctaaaaatagaagtttaaaaaagaacaaaatgagttaaattattggaaaattatttcaaatcaaattacacatagcaacgtgttaagatctactcactgtaaagagctcttttactcatctgacaagcatttagtgtaagtgttctattcgctaggccataggaactagaggctggaaaaagaatggtgaagaaaatgcccatgccattaagaaatttgtgtgtgtgtgtgtgtgtgtgtgtgtgtatatatatacaaattaagacattattgaacaaaggtgcaaacagcaattaacaataacaaaaggctaaaatacaaaattattaaaataataataacccaacaatttttaaattgggaggcaatataaaaagatattgaagagatccaaatgtcaacgtgtgtgtgtgttggsggggatagagttacggggtaataaatgtttatagctttttgtttctctcttttttgttctttgcaatcaaacttaagttttcttcagtttgaaatcacttgttacaatgatattctttagcc

SEQ ID NO: 76088 - DNA, 642 bp, Homo sapiens
catgaaagcatagctattcaagtaaccaaataattaygcaatcaatgtttttcctcatctctaaagcatagtaatggactgattattttaagaatacaactcggtgacaagtagtttatgtttaactcagttttggtttgttgtttgttaaggccattgcttaggataatgaaaacaagaggaggagaaacaagaatataaacaagaaacagaagcagcagcataagaaaatgaagaggaacaagaagatgatgattagaagaagaaaaaacagactgaaagaaaggaagaacaggtgcgggaattacaaagcctattatgataccttatttcccctcctgatttatgaaatttgaaaaaaattcaagacttttcacaacaaagccaagctaaaagatacaccaatagtcacccgctaaattttgctaagaataagacaatgttgccactcacacctggcccaggcaccagcaggaggagggcacttccagattctgcaggagaaggaggaggactcctccttgccatggctgggcctccactgctgccacctaggcccacagtacagcacccgcagctgcctccccacttcaggccaggctgggcccggtgggctccacagcattcccactcccacttctc

SEQ ID NO: 76089 - DNA, 642 bp, Homo sapiens
catgaaagcatagctattcaagtaaccaaataattacgcaatcaatgtttttcctcatctctaaagcatagtaatggactgattattttaagaatacaactcggtgacaagtagtttatgtttaactcagttttggtttgttgtttgttaaggccattgcttaggataatgaaaacaagaggaggagaaacaagaatataaacaagaaacagaagcagcagcataagaaaatgaagaggaacaagaagatgatgattagaagaagaaaaaacagactgaaagmaaggaagaacaggtgcgggaattacaaagcctattatgataccttatttcccctcctgatttatgaaatttgaaaaaaattcaagacttttcacaacaaagccaagctaaaagatacaccaatagtcacccgctaaattttgctaagaataagacaatgttgccactcacacctggcccaggcaccagcaggaggagggcacttccagattctgcaggagaaggaggaggactcctccttgccatggctgggcctccactgctgccacctaggcccacagtacagcacccgcagctgcctccccacttcaggccaggctgggcccggtgggctccacagcattcccactcccacttctc

SEQ ID NO: 76090 - DNA, 583 bp, Homo sapiens
cttttacatggccatgcaagttactagaagactttactcactgtatctatttgaagatccatgtggaaaaaagctttcaaggtcataactaacaagacaacatggagaattgagtcccagtttgtcacacttcacaratcactgctgcttacatttagaagcaagtcccaaggctaaacctgttgtcaaaacaacaacaacaacaatgcgaccgtgtgtcaagaagtgaaaaataagagacactatagaagaggtgctgcactgcccaagtgtacagaaacgtgggcagggaagtatcactatgagcagcgggcttcctcttgaattggtgccttctatgagcatctactctgcttatgtcttggccacattgtcacttagcacagctttcattgctgcctcttgcgttctttgtggaccttagggaatcactaaaggaatgaagacaaagaggtggaggtgagacaagacaaagaggaagacaacaggagggggcctctgatcagcctgcctttttatgttgatgattgcttcttattaataaaactgtgtgagacattggagctgaagaaaggataaaatt

SEQ ID NO: 76091 - DNA, 530 bp, Homo sapiens
attggttcccggaagggtgtttggcaaggggcagtgtatggagctacgtgtagaaggagagaaatttgtgtgtggctyttgtaaattttgaccgattgcagcaattaaatagttgattactgtgttgatttaaatacttatgaaagctttcagacaaaaataaactttcacgttaccatgatgaaactggggttgtttctgttcctccaactgaaagatgggacgctgagctcggggactcggcccccgtggtgcacctcgcaggcgctgtgcgtgtggccactgagaaccaggcgcggctggagccaccacagcagctgacagtggccgagaagacagcaaagcaggctgttagctcatcctcaaccaggctctcaccgctcagcagacggccgctggccatcgcttctttccttaaattacatactaaatccttattttgaaggactggtttatttttttccttaaaaatcctttggtttatttacactaaatcaaaggtaaggtcagccctttgttctcatcccaga

SEQ ID NO: 76092 - DNA, 530 bp, Homo sapiens
attggttcccggaagggtgtttggcaaggggcagtgtatggagctacgtgtagaaggagagaaatttgtgtgtggcttttgtaaattttgaccgattgcagcaattaaatagttgattactgtgttgatttaaatacttatgaaagctttcagacaaaaataaactttcacgttaccatgatgaaactggggttgtttctgttcctccaactgaaagatgggacgctgagctcggggactcggcccccgtggtgcacctcgcaggcgctgtgcgtgtggccactgagaaccaggcgcggctggagccaccacagcagctgacagtggccgagaagacagcaaagcaggctgttagctcatcctcaaccaggctctcaccgctcagcagacggccgctggccatcgcttctttcmttaaattacatactaaatccttattttgaaggactggtttatttttttccttaaaaatcctttggtttatttacactaaatcaaaggtaaggtcagccctttgttctcatcccaga

SEQ ID NO: 76093 - DNA, 573 bp, Homo sapiens
tgggacattgcttcacactgtcacccaggctgcctggagtgcagtggcaagatcgtagctcactgcagcctccaactcctgggctcaagcaaccctcctgcctcagcctcctgagtagctgggactacaggcacacaccaccgcacccggctaatttttaaattttatagagatacagccttgctatgttggccaggctggtctcgaactcctcgcctcaagtgatcctcctgcctccacctcccaaagtgctgggattacaggtgtgagccactgcacccagccaaaagcctatttttcatccattcactacacacttactgtgtatgtgccaaatacctcacctggtgctttgggattaaaaagatatataactggttggaggagkggggagggatagcattaggagatacacctaatgtaaatgacgagttaatgggtgcagcacaccaacatggcacatgtatacatatgtaacaaacctgcacgttgtgcacatgtatcctagaacttacagtataataaaatatatatatattaaaaatatatatatataacctactcattttagtg

SEQ ID NO: 76094 - DNA, 632 bp, Homo sapiens
tttgtgtttttagtagagatggggtttcaccatgttggtcaggctggtcttgaactcctgacctcgtgatccgcccacctcagcctcccgaagtgctgggattacaggcatgagccaccatgcccgacctgcaagtttttaatgagaaaagagaactgggtaactgatgtattatttctggagtattttctttgctatatatgttttatataggtctggatgttttatgagtatataagtgttttgtaaatgtttcttcatttaaacagtttcatgtacatttcttcatttaaatattactcgttaatttttttttttttttttttttttttttgagacggagttttgctctgtcacccaggctggagtgcagtggcatgatctcggctcactgcaacctccgcctcctgggttcaagcrattctcctgcctcagcctcccgagtagctgggattacaggcatgtgccaccacacctggctaattttgtatttttagtagagatgggatttccccatgttggtcaggctggtctcgaactcccaacctcaggtgatccacccacctcggccttccaaagttctgggattgtaggcatgagccactgcgcctggccacttgttaatgtttatg

SEQ ID NO: 76095 - DNA, 632 bp, Homo sapiens
tttgtgtttttagtagagatggggtttcaccatgttggtcaggctggtcttgaactcctgacctcgtgatccgcccacctcagcctcccgaagtgctgggattacaggcatgagccaccatgcccgacctgcaagtttttaatgagaaaagagaactgggtaactgatgtattatttctggagtattttctttgctatatatgttttatataggtctggatgttttatgagtatataagtgttttgtaaatgtttcttcatttaaacagtttcatgtacatttcttcatttaaatattactcgttaatttttttttttttttttttttttttttgagacggagttttgctctgtcacccaggctggagtgcagtggcatgatctcggctcactgcaacctccgcctcctgggttcaagcaattctcctgcctcagcctcccgagtagctgggattacaggcatgtgccaccacacctggctaattttgtatttttagtagagatgggatttccccatgttggtcaggctggtctcgaactcccaacctcaggtgatccacccacctcggccttccaaagttctgggattgyaggcatgagccactgcgcctggccacttgttaatgtttatg

SEQ ID NO: 76096 - DNA, 860 bp, Homo sapiens
tgcataatactagcaacctttatttaaaaaaakatttatttatttacttattttttgagacagtctcactctgttgcccaggctggagtgcaatggcatcatcttggctcactacaacctctgcctcctgggttcaagcaattttcctgcctcagccttccgagtaggtgggattacaggtgtccgccaccacacgtggctaaattttgtatttttagcagagacagggttttgccatgttggccaggctggtctcaaactcctgacctcaggtgatctacccacctcagcctcccaaagtgcagggattacaggcgtgagctaccgctcctggcctgaaacaagatttaaaaacaattttggaaatacatccttaggacgaatcacttagatgtggacttgggagccaaaggataggaatagatttttctgcttttgttactaaaggttggattatcctgaagatagagaaaaccagctcacagagatcctccatgcactcacttctggtctgaaataggaaagaaatacagaagcaatgccaatgagatgacaaggcactctttgcagagccaggcagcatttgctggaaggggctggacttttcttttccatgggaacgttctcagctgatatcccagtcctctggctgtcagtttattcagggctactccacccccgcctcaactgcctttgcaggaattgcacagtggtagttgacacagagccggacgcactctagaacctcccatgaattccagagagtcaaatgcctgtggtgggcaggaataaatgttctacttgaacaaggtgacatggcctgggagagggagaaccacaccgaccaggcagggccccgc

SEQ ID NO: 76097 - DNA, 412 bp, Homo sapiens
ccaacatacactagtagagttctcaatttgaagaaactctggagagccatactmtaatctgaaccccatggtctcatttatacactgtttagagtcgggcgggtatacagcagccctgtctatattccaaacgttcatgtggtcccagagaattcaacaaacaacatgtcttcattccaaataacagaagtcaacagattgttcattccccaataactggtgaaatgaaaatatctcttcatacaccctccaccgttgccttatagccataaacctgcctagccagagccctaaacacagaggcagccattcagctataaatctacacagtccccaaaaggcctttaaaacacctttttttaaaaaaggatgagaaattccaggtcccagacaatgcaccaaagtgtccaag

SEQ ID NO: 76098 - DNA, 627 bp, Homo sapiens
tttctctgcacatgactggatgtttggagatcgcaaatattttcttacgaaataaaagtaagttagctgggtatctactattaacagacaggaagcaagttctgaaaaacagaggtttttgttcagtgtggtttttatttttttaaagaataaataaattgagacttttgttttgggcaaaaatcctgtgccatggaggaagaaagtcagcaatgctaaaaaggaaaaagaaaaaaaaaatgaataaataaataacccagccatctctgagcaacacatccgggttagcagagcagaaaaggacacacaggccmgaagaaatcctattgtttctgtttttaggacaagactcaatcccaaaagggagcttgggatcacaggaaaaggagctggaggtctttcccactaaacattcaggacccaaccctaggcttcccgaatgtcatctgggggagctgggttgctttcttcttgcagcgatgtccaagctggagaggggaaagggggcatcctggaggtgatggttattgtatgggtggaaaacgggcttaaacacaagcccattagagaagcagaaccttaatttatcaattagacaccatctgtggattgtgttccttgaaataa

SEQ ID NO: 76099 - DNA, 2108 bp, Homo sapiens
taggtgagttgcatggagttattctggaatattccacaactacagttgggactcagctgctgggatcagtggtgaagaaagtcccacattttgcacagaattgggtgatctgtaaatgaaggaagtttatktttaacagcattatgattttgtttaaaaacgaaaagacatactagaaaaaattaaatacataagtaaacagagaactaacaaatcctctcatctcatcaccatgagataacccacagtaacattttggtgtaggcttccagaggtctgtctgcacatatataaactacggttgtgtacacttttatataaatgagatcatatgtggtgtttgccagatggccttttctggtcagtagtatgtcagaggcatttttccatgtgattgtaccctacatggtcatatttgttgccttcattgtttctgtgatatcgatgcactatgattgacttacgcaaacccttagttaggatcatttaggttgtttgcagtatcattatgatcattgtttggtattatagccagttctggcaggaccgcccttgtgcatgcatttctctcctgctcctgcaatacttttgacctagcaattccacttctaggaatttacaataaggagataataatacgttttacaatttgctatttattgccaaactgccccacagggaggttgtactaatttacatttctaccagttaaggcagcataagagtgagcttgagcttttggtcttaggatttttgtgcccaagtctttctaaaatttacattcctctgaaatttgtcatatggaacatttttttttaatattgaagagtgaggaatctgttataccttgacttttaaatacttgttacattgcctctctgttctctgataatccatgaagttgtaaatggttttgactgagtgagatacatgcaggagagtttcaggatagaccgggggttgtgtttctgtttcagattgtcatcttgaaacaaaaatggtggcaaataaaatgttttcaagtggatgtgtttagtcgtgatttttaatgggtttttgatcattgttcctagctgcataccggttttgtcctagacaggatatagctgaagacaaatactgactttttccttcatctaatacatttggcaattacgtcttgccttgtgaaagcattaccattgttatttaaattttgcattgctcttttaagataacgttcagcttgttgcctgtttatctcttccctcctgctgctcttgtgtgcgtcctcacggcacatggggcagtgccctacactcagtagtcacccagtacccattttgggatttttctccaattataaagttttagcattaggaggtctctgagagtcaacttttccccaattgtagacatgtttttgatcttacatacattttaatttatttttttcattcagtagtaaatggttgttgagtgcttttgatgtaccaggtgctgaggtgactgtgccgtgacagtgtccccatcctcgtgcaggtgatgaatgggtgtccatacagccttggaaatgcacaggcctggggcacaggcctttttcctctcctgttgttaccttttacatctgcatttgataaaaaccttctccagagaaaggcttagagttcacagaacctttatttcaatggaggtctgcagtgttcagcgttagagtgaagattttcatgaagcatggcctgacagagaagtgtttgaggaagagattaaatggaagcaaactctttccatctcttggggaaatgggagatgcgggtgtccactggagccagggcttctaaattttaaaatcacttcttcaccaggctgaagccggggtgcccccacggaaggtactgttgaattgcttcgaaggtttctcattgagagaagctctctgtttctcctagttgggactggcatgaataaaagcagaggccaggcgtggtggctcacatctgtaatcccagcactttgggaggcagaggtgggtgggtcagctgaggtctggtgttcaagaccagcctggccaacatggtgaaaccctgtctctaataaaaatacaaaaattagctgagttgtggtgatgc

SEQ ID NO: 76100 - DNA, 2108 bp, Homo sapiens
taggtgagttgcatggagttattctggaatattccacaactacagttgggactcagctgctgggatcagtggtgaagaaagtcccacattttgcacagaattgggtgatctgtaaatgaaggaagtttatttttaacagcattatgattttgtttaaaaacgaaaagacatactagaaaaaattaaatacataagtaaacagagaactaacaaatcctctcatctcatcaccatgagataacccacagtaacattttggtgtaggcttccagaggtctgtctgcacatatataaactacggttgtgtacacttttatataaatgagatcatatgtggtgtttgccagatggccttttctggtcagtagtatgtcagaggcatttttccatgtgattgtaccctacatggtcatatttgttgccttcattgtttctgtgatatcgatgcactatgattgacttacgcaaacccttagttaggatcatttaggttgtttgcagtatcattatgatcattgtttggtattatagccagttctggcaggaccgcccttgtgcatgcatttctytcctgctcctgcaatacttttgacctagcaattccacttctaggaatttacaataaggagataataatacgttttacaatttgctatttattgccaaactgccccacagggaggttgtactaatttacatttctaccagttaaggcagcataagagtgagcttgagcttttggtcttaggatttttgtgcccaagtctttctaaaatttacattcctctgaaatttgtcatatggaacatttttttttaatattgaagagtgaggaatctgttataccttgacttttaaatacttgttacattgcctctctgttctctgataatccatgaagttgtaaatggttttgactgagtgagatacatgcaggagagtttcaggatagaccgggggttgtgtttctgtttcagattgtcatcttgaaacaaaaatggtggcaaataaaatgttttcaagtggatgtgtttagtcgtgatttttaatgggtttttgatcattgttcctagctgcataccggttttgtcctagacaggatatagctgaagacaaatactgactttttccttcatctaatacatttggcaattacgtcttgccttgtgaaagcattaccattgttatttaaattttgcattgctcttttaagataacgttcagcttgttgcctgtttatctcttccctcctgctgctcttgtgtgcgtcctcacggcacatggggcagtgccctacactcagtagtcacccagtacccattttgggatttttctccaattataaagttttagcattaggaggtctctgagagtcaacttttccccaattgtagacatgtttttgatcttacatacattttaatttatttttttcattcagtagtaaatggttgttgagtgcttttgatgtaccaggtgctgaggtgactgtgccgtgacagtgtccccatcctcgtgcaggtgatgaatgggtgtccatacagccttggaaatgcacaggcctggggcacaggcctttttcctctcctgttgttaccttttacatctgcatttgataaaaaccttctccagagaaaggcttagagttcacagaacctttatttcaatggaggtctgcagtgttcagcgttagagtgaagattttcatgaagcatggcctgacagagaagtgtttgaggaagagattaaatggaagcaaactctttccatctcttggggaaatgggagatgcgggtgtccactggagccagggcttctaaattttaaaatcacttcttcaccaggctgaagccggggtgcccccacggaaggtactgttgaattgcttcgaaggtttctcattgagagaagctctctgtttctcctagttgggactggcatgaataaaagcagaggccaggcgtggtggctcacatctgtaatcccagcactttgggaggcagaggtgggtgggtcagctgaggtctggtgttcaagaccagcctggccaacatggtgaaaccctgtctctaataaaaatacaaaaattagctgagttgtggtgatgc

SEQ ID NO: 76101 - DNA, 838 bp, Homo sapiens
gcattttccaaacaggcacagaagggagaagcccagcaccaacctgcaggcctctagcagcttccatgggagctcctgccctgcgagtcacagccccacatccctccccagctgccgtcaccaccagctcccagcccaggccccgtgtggccagcaaatgcccgcaaaactgcactaaaaggccactctgtctgctcctgccagcacgtgggacatcacaccaaatgcaagccagactcttccatctcagcttctgctgaatttcacttaaatcatgatggccaggttcaaggacaaggttcttgaggacacagctgtagcaggggcgggggccacggtagcctcttcttaggactgatgaggctacttctggcatgtgccatccaaccccatccagcgcttaccttgccaaactgctcgaaatattgctttacatcttccactactgtgttcgcagataacccgcctacaaatattttctttgttcttgtgaccatctgcaagaaatgacaagagaaaggcatgggttaaccaggttatctaaagcagggctcaagaggctgctgaaacaatctgctctccacatttctctaggaaggcaattttagatatattcaagctgcatggcgcgggcgtttagatgtctaaggatgctagagacagtcactctgcatatctcaggcattcagatggcaacctaaaagcttgagtttcatacagacacagagacttcagaacctcattrgccacaacacgcaacttcattctgatggactagcaaaaagagaaaaatcacatgtcaagctattttaaagctaagagacgtgaacaaaacaga

SEQ ID NO: 76102 - DNA, 646 bp, Homo sapiens
cattgctggtttggtactcatctcccagttagcagctcaggcctgcctctgagtagccgtccacagctcttgctgatcgatttgtcttctgacacgggttggaatgtgagctagagcacagaggcaagccctggaagttagggtcactgatttgattctacctttttttttttttttttgagacgcagtctcgctctgtcgcccaggctggagtgcagtggagcgatctgggctcaccgcaatctccgcctcccgggttcmtgccattctcctgcctcagcctcccgagtagctgggactacaggggcccgtcaccacccctggctaattttttgtattattagtagagacggggtttcaccgtgttagccatgatggtctcgatctcctgacctcgtgatccacccgcgtcagcctcccaaagtgctgggattacaggcgtgagccaccgcacccggccctgattctacgttttaaaatattcctaccttttgttgggaaggtgttgtaatgtgcacacacatttgagaaaacaggctttgtgcacagctggggtcggggttgaacaaaccccttggggatcttcctttttcctgacagtgatcagggttccagggctccagctcgtcccgttgtgaactaggtg

SEQ ID NO: 76103 - DNA, 646 bp, Homo sapiens
cattgctggtttggtactcatctcccagttagcagctcaggcctgcctctgagtagccgtccacagctcttgctgatcgatttgtcttctgacacgggttggaatgtgagctagagcacagaggcaagccctggaagttagggtcactgatttgattctacctttttttttttttttttgagacgcagtctcgctctgtcgcccaggctggagtgcagtggagcgatctgggctcaccgcaatctccgcctcccgggttccwgccattctcctgcctcagcctcccgagtagctgggactacaggggcccgtcaccacccctggctaattttttgtattattagtagagacggggtttcaccgtgttagccatgatggtctcgatctcctgacctcgtgatccacccgcgtcagcctcccaaagtgctgggattacaggcgtgagccaccgcacccggccctgattctacgttttaaaatattcctaccttttgttgggaaggtgttgtaatgtgcacacacatttgagaaaacaggctttgtgcacagctggggtcggggttgaacaaaccccttggggatcttcctttttcctgacagtgatcagggttccagggctccagctcgtcccgttgtgaactaggtg

SEQ ID NO: 76104 - DNA, 1155 bp, Homo sapiens
ttcctttgtgccaggtcccaggcccatgccaggagtgggaatacagagggctcacactccagacagcagagagaagccactattctaccatgaagctgcagaggactatggaggcagcaaagggagaagtgctacctcatcctaggcaggctggagagcgcctcccaagaatgacatcacaggggaggggaggaggaagggcatgcacagaggtgcagaggcagggagcagggaaccctctgcaaagcccaggggggtggagggagaggaagggcccagctgaggcatgggagccaggcatgccaggcattgctaccctgggactttggattttatccttcagaccaggcactttttaaaatttttttaaattttttgagacagtctcactcttgtcacccagactggaatgcaatggcacgatctcggctcactgcatctgcctcctgggctcaagcaattctcctgcctcagcctcccgagtagctgggattataggcatctgccaccacgcttgagtaatttttgtattcttagtggagacaaggttgcaccatattggccaggctggtctcaaactccagacctcaggtgatctgcctgcctcagcctcccaaagtactgggattacaggcgtgagccactgcgcccagtgctttagactgtttttgttgtgttttttttttttttttttttttaagtcagtggaactttgttttaggtgaaacatgaacacaagcccaatgtgtgaactggaggccaaggggctcagttggaaagaaaggtgggggtcctcagccttcctcttccccattcacctttccaaaggtttgagggtctcctctgctctgcagagcatggtctggaaacgcacaagaccatgcttcccctagtggtcagtggcawgtttgactgcggtcggagcctcagcttctcctgccccgttgcccagtcaccatgcctggtctcacctcttctccccaggcctcatccagctcaactactcatggagatgcagatgctgctagctcactcccattctcccctcatcttcaccatcagaagtggagggggtgatgcctggctcatgatggtcctgtgcgaaaggagggagaacaagcccacagtaggccttcacccagaggtggctactat

SEQ ID NO: 76105 - DNA, 1155 bp, Homo sapiens
ttcctttgtgccaggtcccaggcccatgccaggagtgggaatacagagggctcacactccagacagcagagagaagccactattctaccatgaagctgcagaggactatggaggcagcaaagggagaagtgctacctcatcctaggcaggctggagagcgcctcccaagaatgacatcacaggggaggggaggaggaagggcatgcacagaggtgcagaggcagggagcagggaaccctctgcaaagcccaggggggtggagggagaggaagggcccagctgaggcatgggagccaggcatgccaggcattgctaccctgggactttggattttatccttcagaccaggcactttttaaaatttttttaaattttttgagacagtctcactcttgtcacccagactggaatgcaatggcacgatctcggctcactgcatctgcctcctgggctcaagcaattctcctgcctcagcctcccgagtagctgggattataggcatctgccaccacgcttgagtaatttttgtattcttagtggagacaaggttgcaccatattggccaggctggtctcaaactccagacctcaggtgatctgcctgcctcagcctcccaaagtactgggattacaggcgtgagccactgcgcccagtgctttagactgtttttgttgtgttttttttttttttttttttttaagtcagtggaactttgttttaggtgaaacatgaacacaagcccaatgtgtgaactggaggccaaggggctcagttggaaagaaaggtgggggtcctcagccttcctcttccccattcacctttccaaaggtttgagggtctcctctgctctgcagagcatggtctggaaacgcacaagaccatgcttcccctagtggtcagtggcatgtytgactgcggtcggagcctcagcttctcctgccccgttgcccagtcaccatgcctggtctcacctcttctccccaggcctcatccagctcaactactcatggagatgcagatgctgctagctcactcccattctcccctcatcttcaccatcagaagtggagggggtgatgcctggctcatgatggtcctgtgcgaaaggagggagaacaagcccacagtaggccttcacccagaggtggctactat

SEQ ID NO: 76106 - DNA, 1155 bp, Homo sapiens
ttcctttgtgccaggtcccaggcccatgccaggagtgggaatacagagggctcacactccagacagcagagagaagccactattctaccatgaagctgcagaggactatggaggcagcaaagggagaagtgctacctcatcctaggcaggctggagagcgcctcccaagaatgacatcacaggggaggggaggaggaagggcatgcacagaggtgcagaggcagggagcagggaaccctctgcaaagcccaggggggtggagggagaggaagggcccagctgaggcatgggagccaggcatgccaggcattgctaccctgggactttggattttatccttcagaccaggcactttttaaaatttttttaaattttttgagacagtctcactcttgtcacccagactggaatgcaatggcacgatctcggctcactgcatctgcctcctgggctcaagcaattctcctgcctcagcctcccgagtagctgggattataggcatctgccaccacgcttgagtaatttttgtattcttagtggagacaaggttgcaccatattggccaggctggtctcaaactccagacctcaggtgatctgcctgcctcagcctcccaaagtactgggattacaggcgtgagccactgcgcccagtgctttagactgtttttgttgtgttttttttttttttttttttttaagtcagtggaactttgttttaggtgaaacatgaacacaagcccaatgtgtgaactggaggccaaggggctcagttggaaagaaaggtgggggtcctcagccttcctcttccccattcacctttccaaaggtttgagggtctcctctgctctgcagagcatggtctggaaacgcacaagaccatgcttcccctagtggtcagtggcatgtttgactgcggtcggagcctcagcttctcctgcccygttgcccagtcaccatgcctggtctcacctcttctccccaggcctcatccagctcaactactcatggagatgcagatgctgctagctcactcccattctcccctcatcttcaccatcagaagtggagggggtgatgcctggctcatgatggtcctgtgcgaaaggagggagaacaagcccacagtaggccttcacccagaggtggctactat

SEQ ID NO: 76107 - DNA, 810 bp, Homo sapiens
ttagcagttctggatttcctagtgccagccttatacaacctgtcattcaaatccttaacgatgggtttatgtgaaagtggtttctctacagtttcctctgcttcatcttaaatggaaatgtagttcctcctttgaaatggagcactaaatgcaatggttccttcaggcatatagcacgtttcagttaccatttcaaatgaaatgtatttagacaaaagctactaacagcacactgagtagcagtggtaacgtatagccagatatgctgtggcatgtatgtaaaaatcasgcattcagccctggccaaatgttggacacgtcagataaggaagctaaaaatctcctgcctaaatgaggactgtgtaatttcactctgcctttccaacatgccaaagctagcttctcaaagtctgcatgattcatgaatgccttataaagaatcatagaattctgtggctcacacctgtaatccaagcactttgggaggtcgaggtgggtggatcaacaggagttcgacaccagcctgaccaacatgatgaagccccatctctactaaaaatacaaaaaattagccaggcatggtggcacatgcctgtaatcccagctactcttatgctgacacacaagaattgtttgagtgtgggaggtgaagattgcagtgagccgagattgcatcactgcaatccagcctgggtgactgagagggaccgtgtctcaaatcaaacaaacaaaaaaagaatcacagaatgtaagaaatggaggaatctgggacgtcacttgtcacatcttgtgacctccaggtaggttcct

SEQ ID NO: 76108 - DNA, 810 bp, Homo sapiens
ttagcagttctggatttcctagtgccagccttatacaacctgtcattcaaatccttaacgatgggtttatgtgaaagtggtttctctacagtttcctctgcttcatcttaaatggaaatgtagttcctcctttgaaatggagcactaaatgcaatggttccttcaggcatatagcacgtttcagttaccatttcaaatgaaatgtatttagacaaaagctactaacagcacactgagtagcagtggtaacgtatagccagatatgctgtggcatgtatgtaaaaatcaggcattcagccctggccaaatgttggacacgtcagataaggaagctaaaaatctcctgcctaaatgaggactgtgtaatttcactctgcctttccaacatgccaaagctagcttctcaaagtctgcatgattcatgaatgccttataaagaatcatagaattctgtggctcacacctgtaatccaagcactttgggaggtcgaggtgggtggatcaacaggagttcgacaccagcctgaccaacatgatgaagccccatctctactaaaaatacaaaaaattagccaggcatggtggcacatgcctgtaatcccagctactcttatgctgacacacaagaattgtttgagtgtgggaggtgaagattgcagtgagccgagattgcaycactgcaatccagcctgggtgactgagagggaccgtgtctcaaatcaaacaaacaaaaaaagaatcacagaatgtaagaaatggaggaatctgggacgtcacttgtcacatcttgtgacctccaggtaggttcct

SEQ ID NO: 76109 - DNA, 606 bp, Homo sapiens
gatccatccagaataatgtttaccaatctgggcattggagtccggctaaattaataggtaaaattaaccatcacaagatcaggtgcagtggctcacatctgtaatcctagtgacttgaaaggctgaggcaagaggatcacttgaggtcaggagtttgataccagactggccaacataacaagacccaatctctaacacctgtaatcccagctatcaaggaggctgaggcaggaggttggcttgggcccaggagtttaaggctgtagtgattgcaccactatgattgcaccactgcactccagcctaggcaacacagcaagaccccatcttcaataatgttaataactcttacaccacaccatgcagagctacacaaggaagcaccagagtaggttaggaagcagagggagtrggggaggaaatgtgagcaggaacccttattatcatttctgtgggaaggaacaggtgagagagatcctgaaaatctagagctctgatgcctctgtaaggattgaggtgtttctgggcacattaggaataagcatgaggtaaagtttacacagtagtaagaaaaatggcccaaaagaaaatgaaaagagtaactat

SEQ ID NO: 76110 - DNA, 1273 bp, Homo sapiens
catagcttcaaagaaaattaaagagcagagataattattttagtaatctagaattacagttaataatgtattgcatttttgaaaatttctaggagtgtaaactttaagtgttctcaacaaaaaaaaatgataagtatatggagaaatgcaaattttaatttgcttgatttagccattccacaaggtatacatatttcaaaacaacatgcacatgatgaataatagtattcttcaattaaaacaaacttattttgaaaatgagcaaaaagatgtatagatttgtaagtattaaactgaatgtatacaagacatgattaaactgaatgtatactagacatgtacatactattgaaatatgttgatacactaagaggtacaatttagtaatgtttaatatatttaaaattttttaagaagggtagatgtagaaaatgaggcacgcacttggctagaagttggcagagctctctaaccccaaagcccatgcttttaaaccaccagaacatacagcctttgaaaagtaatttcagaatacctgtcatttcagagcaattgtgcatgacaaaggaaaataaatcaatattgaatttttagctggaaagagagtcccaaattaattgtaattagcygagaaagtaattttcatttgtagttcctaagtaaaatagttagaaacgaaataagaaatgattataagagatagggcgaccaacaagattagatcaagcctccctgaaatttctgtggaaaatgtaacgattaataattcaatttagtacctaaatacagcaagcaaatccttttgcagagaaaatacagaaaataattgaatgtggcagatatttataaaaaaataccaaattttttagtacacataaaaaagttaattaaaatttttacttctaggtaatttattatacatattcttttcaaaaacactacttggacttctttactttgacttattttatcattctcaacctttttggagcatcttagccgcacatttctcataacaaacacttggtaatgtttgttttttatattgatattattgtaagttaaaaaaaaaagaagaaatccaagacttgtccctgaagcccaaaggctgagtagtttatagactctgtcactgcactgtcctgatttctctcccagctctgcccataaatgctgcactaacttggaactttcttagtcttactttccttgtgtaaaatggtgagaaaaaattctatcttataggattattataaagattaaattagttgat

SEQ ID NO: 76111 - DNA, 1273 bp, Homo sapiens
catagcttcaaagaaaattaaagagcagagataattattttagtaatctagaattacagttaataatgtattgcatttttgaaaatttctaggagtgtaaactttaagtgttctcaacaaaaaaaaatgataagtatatggagaaatgcaaattttaatttgcttgatttagccattccacaaggtatacatatttcaaaacaacatgcacatgatgaataatagtattcttcaattaaaacaaacttattttgaaaatgagcaaaaagatgtatagatttgtaagtattaaactgaatgtatacaagacatgattaaactgaatgtatactagacatgtacatactattgaaatatgttgatacactaagaggtacaatttagtaatgtttaatatatttaaaattttttaagaagggtagatgtagaaaatgaggcacgcacttggctagaagttggcagagctctctaaccccaaagcccatgcttttaaaccaccagaacatacagcctttgaaaagtaatttcagaatacctgtcatttcagagcaattgtgcatgacaaaggaaaataaatcaatattgaatttttagctggaaagagagtcccaaattaattgtaattagctgagaaagtaattttcatttgtagttcctaagtaaaatagttagaaacgaaataagaaatgattataagagatagggcgaccaacaagattagatcaagcctccctgaaatttctgtggaaaatgtaacgattaataattcaatttagtacctaaatacagcaagcaaatccttttgcagagaaaatacagaaaataattgaatgtggcagatatttataaaaaaataccaaattttttagtacacataaaaaagttaattaaaatttttacttctaggtaatttattatacatattcttttcaaaaacactacttggacttctttactttgacttattttatcattctcaacctttttggagcatcttagccgcacatttctcataacaaacacttggtaatgtttgttttttatattgatattattgtaagttaaaaaaaaaagaagaaatccaagacttgtccctgaagcccaaaggctgagtagtttatagactctgtmactgcactgtcctgatttctctcccagctctgcccataaatgctgcactaacttggaactttcttagtcttactttccttgtgtaaaatggtgagaaaaaattctatcttataggattattataaagattaaattagttgat

SEQ ID NO: 76112 - DNA, 1091 bp, Homo sapiens
tttggagacagagtctcactcagtccccagtctggagtgcagtggcgggatctcagctcactgcaaccaccgcctcccaggttcaagcgattcttctgtctcaacctcctgattagctgggactacacacgccaacatgcccagctaatttttgtatttttagtagagacggggtttcacaatgttggccagtatgggctcgatctcttgacctcctaatccgtctgccttggcctcccaaagtgctgggattacaggcatgagccaccgtgcttggccatgaatatttttacatgcctattttatcctttccatatgtagctgtatctgctttatgaaagggctattgtgatgttatatgatatataatttttctaacagattatcatcattcagtgtatgtcatcttctttattttgtgaaactttaaattaattttctatcactgaaaacattttattcatgattttcctgtaggagattttggtggtggtttcaaaaattcaagctgtaatttcttcaagatttagtgaattgaactaagaattttattatttgtgaatgctacattgtaggctgtacacttgaggttactaacttttgacaattcctgtgcctattttttttccaaactgtaactcaaagaattctgcatttatcactcagatccacttatttcacaggctggattaaagatgataaatcaatggccaaaactgcattctctaagttttcaacaatctggatttgaaagtataattctattttcttcaaatatattgaaagttaaaattcctgttaaaaaatattcctagamtattgtacgggtatccatgctgactttctttgacctttgcatgtatcttgggatgcgtataatgctttttgaggttttgttttttgaggtaatatggaaaccaattctgtacttagtaatgtgtacagttatttcttaatcaagtccataaatggctttccctttttaaaataatgttaaggagttgctgaagaaatatttgttcttacatgtatttattagtttggtggagttttttttttctcacaatatctaccatatccaaaccattcca

SEQ ID NO: 76113 - DNA, 1069 bp, Homo sapiens
catcataatcaagaatacttgcaatattaaaattatgtcatcaatataatgtaccaggatgatgttctatccataaagactatgaaggtttctaaggaccatattatgacaggaggtcaacagagctaacataactctgcagcaagactattaatgtgtatcgctatacctctcacataaaatggactttgatcattttaattgatgagaattgaaaacaatgcatgccaagagccagaggctgtgcaattctactccagtaaagatatcatacttgccaaagccgctgcaactggaaataccacttgactaagtggtatttcatttaggtcacattttatatagggggggcactgatggcaaacgtgaaataaaagggatatagtgggacccacaaacctctgcatcatttaatgtcacatgttacattgaaaattttaacagtttctcacaggtgggaggtacaacttatgattaactaacttggtgtggggagaggagaaatactttgggggagcttcacctcagccttttctaacatcttaggtcagaaaaacactgtgaggattctgctaccatctaagtgcattcatcctacttatggatcatagtaccaagtaaatagcacaaattggtctgtggaactattggatccaatgtgagatgtttgtgccaaaattgtgtgtactacctggccttcataggccccctataaccaagaagccagaatagcactttaggatatctggtatcagtgccakttcaaattctgcatataacagaattcaaaatgtctcaatattctgcttttttctaatataccattgatgtcctttgttgaaagactgggaggcattgcagtgttcttcctcaaggaacctagtctgcacctgagtcagtgtgttttggatctgataacaagatcagatctaacaagtggatgagtgattataacttttccattgtggtgtattttcatcagatctatttttaatgtttttaatcacacaaattaagtgacatcctaaattacagtctacttcatcctcagttctattatttcttttct

SEQ ID NO: 76114 - DNA, 740 bp, Homo sapiens
gatagagaagattttgagaggatagggcagactgctatcaatgactaacaytgtctttcaagaatagtcatgaatcatttaacaatggggatatgttctgagaaatgtgttgctaagctattccatcattgcatggacagtatagaggcacttaacacaaacctagatggtttagcctactaagcacttaggctatatggatatagcctaagctatcacatattgtagctcctaggctacaaacctatacagtatgttactatactgaatactgtaggcagttataacacaatggaaagtgttagtgtatctaaatatatctcaacatagaaaaggtacagtaaaaatatggtataaaagatgatacaccttctattactctgttttcacactgtggataaagacatggctgagactgggtaatttatgatgaaaagaggtttaatgggttcacagttccatgtggctggagaggtctcacaaacatggtggaaggcgaaaggcacatctgacatggcagcaggtgagagagaatgagagtgaagacaaaggggaagccccttataaaaccatcagatcttgtgagacttattcactactacaagaacagtatggggaaaactgcccccgtgactcggttatctcctaccacgtccctcccacaacatgtgggaattctgggagcaacaattcaagatgagatttgggtggggacacagccaaaccatatcattcttccc

SEQ ID NO: 76115 - DNA, 695 bp, Homo sapiens
tctgtctcagcctcccaaagtgcagggattacaggtgtgagccactgcacctagcctgttgcarttttaaataggtggccccagtgggcctcactgagaaagacacatatgagcaaaggtcaaagaggtgaagacatgagccagcctgtccagagaaaggacatgctggcctgagggacagccagtgcacagccgcaaagtggagggtgcatggcacgtttgaggtcatgtggtcagagtggactgaggagggctgagcggaaggatatgaggtcaaagaggcactagaaaagggacgaggtcacctaagggttttataggccattgtaaggacttgagttttgatcttgggagaagtaaaaggcagaggaacttgatgtccgtatccccagagagcaggggaccatctctggggtcagatcactacctgtgtgatttctgggatgtcacacctcagtgacatgcaaaggcaagctggagttccttattgagacaatgaagactttcattctatatccagaaaataaaggcttacacaaccaaagatactagattttcccctgctttactagcagggagagaatgaagaggctaggggggtatttggctttgataatccaacctgaaggaggtttttctgatgggaaaaagaagtctaaaagttgggactggagatacatgccaactgactctga

SEQ ID NO: 76116 - DNA, 695 bp, Homo sapiens
tctgtctcagcctcccaaagtgcagggattacaggtgtgagccactgcacctagcctgttgcaattttaaataggtggccccagtgggcctcactgagaaagacacatatgagcaaaggtcaaagaggtgaagacatgagccagcctgtccagagaaaggacatgctggcctgagggacagccagtgcacagccgcaaagtggagggtgcatggcacgtttgaggtcatgtggtcagagtggactgaggagggctgagcggaaggatatgaggtcaaagaggcactagaaaagggacgaggtcacctaagggttttataggccattgtaaggacttgagttttgatcttgggagaagtaaaaggcagaggaacttgatgtccgtatccccagagagcaggggaccatctctggggtcagatcactacctgtgtgatttctgggatgtcacacctcagtgacatgcaaaggcaagctggagttccttattgagacaatgaagactttcattctatatccagaaaataaaggcttacamaaccaaagatactagattttcccctgctttactagcagggagagaatgaagaggctaggggggtatttggctttgataatccaacctgaaggaggtttttctgatgggaaaaagaagtctaaaagttgggactggagatacatgccaactgactctga

SEQ ID NO: 76117 - DNA, 695 bp, Homo sapiens
tctgtctcagcctcccaaagtgcagggattacaggtgtgagccactgcacctagcctgttgcaattttaaataggtggccccagtgggcctcactgagaaagacacatatgagcaaaggtcaaagaggtgaagacatgagccagcctgtccagagaaaggacatgctggcctgagggacagccagtgcacagccgcaaagtggagggtgcatggcacgtttgaggtcatgtggtcagagtggactgaggagggctgagcggaaggatatgaggtcaaagaggcactagaaaagggacgaggtcacctaagggttttataggccattgtaaggacttgagttttgatcttgggagaagtaaaaggcagaggaacttgatgtccgtatccccagagagcaggggaccatctctggggtcagatcactacctgtgtgatttctgggatgtcacacctcagtgacatgcaaaggcaagctggagttccttattgagacaatgaagactttcattctatatccagaaaataaaggcttacacaaccaaagatactagattttcccctgctttactagcagggagagaatgaagaggctaggsgggtatttggctttgataatccaacctgaaggaggtttttctgatgggaaaaagaagtctaaaagttgggactggagatacatgccaactgactctga

SEQ ID NO: 76118 - DNA, 762 bp, Homo sapiens
agttttctcacagagcaaaagaacactaatacctacattgtggagttgttggtagaataaaagaataaaataaaacaaaataaaaataaaaaaataaaagaataactaaggaaaagtggttaacaccagggaagctctctacagaaaatagggactttggaatgtaattgccacagagttgaatattcctccttagaacagagcttggtgggggatttaagttggttcacttttctgaaggattagtatgagagatccccatgggaaatcaagtgaatccaagattaatctgctttctgaatgtaaagactttggatggaaaattaggctgcccgtgtgtgtgtgtgtrtgtgtgtgtgtagactgtcttggggtcaattgctgggatgggtagggacatatttcaaaatgagcagggaccacagagtgaggaaacatgttcaaattctggctctgccattaccttcctgtgccatctggcaggtggggccagtaatcaatcatctttgggtttccagtttcctgattccaagatgagggggtagaatccgaagatctccaaggccttgatgagtgctaccagtctgcaaattcccaagccaagttcttcaatgaatcaaatttcctccagtagccatttctaccaaaggagcaactgtttttccttcccactgacatggctatgtattcgaactggatataggtgagaggcatttttgtcctagcttctcgggcccctccaaggagctccaagaggcttaa

SEQ ID NO: 76119 - DNA, 1428 bp, Homo sapiens
tctagtaaaagcctaaggtcctcctcagtgccctaaggaaccctcccctgccttgaacacatacgagcttgactttctgtgtgtgctcagcctgttcctgagggtagacatgacaagatagctgggggaatatgtccctgatgaaaaacagttcagacaggggcatgtaccatgaaggatggggaaggggcccagattgggaaagcatgttcccaggatcacattgcaccacatggggagaaccaggattttcatctcattgcttgtataagttcccaatagaaataaataggaatattgtgagtgtgtgtggagcctccatagagccatagaaggggtgtgtgacttgcccaagatatgacagttacaagtgtccaagctggactagaacctctgcctcccccaatggagactgcatttgattatcatcttaatgaaggtaatatggaagtaaaagtaatctggtgaggatgtgaaggtaggggctaaggagtggggatggactgcagcttgaggaatggacttacctgttaaataaatagcttagaactaccttgagagaaagtagtgtagttagtgctcctcaggccaaactaagcagtgaacaaaattttaaatgggatggacaggcagagtaggggcgagatggaatgcccttagtgagttctgctctcctgccccggccctctctccagcatctcctctccctggctgaggccaaagccagcctttgcagagcccctggcatggtcctcaatgcttggcctcaaaagaggaatgctgtctgctccctgtggagttcctgaacccctctgccagccccacactccctcttctgagaacggaagctcggatttccagctcagcccagaagggttaaccaggaagcacctagtcagacacccagggaacagctgtcagcccctcccagggtgaggaagagattgggaagccagaatcagggtggatctcagccatggggcagagcaccagtttatctcgctatctgagaacctggagcagtttctcaagtgggggtggtcagggcagagccccagtcatggtttctcaggcatggaggtgctctgcaaccaggcaataaattgagagccaccacctcccaggactcaactcccacctctgctcacggccccagcagccagccagggcctcccaagagtactcctgcctccattctgtccgtgctgccagcttgcctccctgaagctgagctccagtcctgtggagaaggctgcctgccgtctgcagtagaacgcttcagtgcctcacctggcacttgggaccctcggtcatccttatgtcaaccttcttgccrgccacgtctcccatagctgccttcccacacccctaggctgcagccaacacaccatttgctgttccctgacactcccatgtgttcctgtcatc

SEQ ID NO: 76120 - DNA, 730 bp, Homo sapiens
aaaaactaggtcacagttactttctaaatttatgttttatacataccatattaaaaataaaatacattaaaaatcctacaaacataggaagttttgctgtttcttagggacacagatgtgagagagtcccaaagcaaagggatgttactggtaactgcgggtctgtgatactagctttctggtgcagcctctctcgcctgtagctggtgttctgggtgtgtgtgggtttagttctctttcttgtggctttctgaggatgctgggactgtcatgcatttccttgtctctgttctgagaagaaaatgacaaggaattaaagtctacattgartatagaaaagtgacattttggatatcagaaaagtgacatcttggctgacagaaaatgaaagctcacctgtcttaggagactaaggaaaaatactaccatgatttttctgtccagtaaaacaaaaatttgggggtgtacaagttaaacctaatgataataaacacctcttgacggtgacagtctccgtaatgatcaaatagttttccaaaccctgtccatgtcaagtgatctttaaggaaccaaccagattccatattgaagtttgttgtaattaaattcaacctgcatgatagtgctcattaagttgtgtttttttcattgcagatgttggtcaggcgtcatttaaatattttcagtcagcagaggaagcaaagcgtgccattgaggctgtgctgtcagc

SEQ ID NO: 76121 - DNA, 1330 bp, Homo sapiens
gcaagaaagttttagaggcggtactgtgtattccttgttgcctcacatcagaaggcacatgctcgctagttttctccagtcttgggttattgagaagatattgatcagtggattcaggtgtttgcagcctgatccatccattctaatattccttgctggccttttgcctaatgatattagcagtcattgatgattattgtctaacactgtgatttcatcagaggtttcacatgatattctaattctgatattccttcttcctttattagctgtaattcttctataaagaagagcttggtctcatcaactatctggttactctgaaatagttcataaaggaaaggcaggacaaatgcttgattctttatctttaatttatctgcttttggaataatgagtttattctcaagcatctcccaaaggtgatatgctggttatgtattgctgcatattaattgccccctcacttagtggcttaaaatagcaaccattttattttgtattataattttgtgggtcaggaatttgggccaggatcagctgagagattcttctgctctgtgtggtactggctgaagtcacttgggagtattcagcttgtggatgggctgatctggaggatccgagacaacttcccttgtatgtgtgatgtcttagtgggaatggctggaaggcggagctgtgcggggactgttaaccrgagtgcctacacttggcttccccagtatggcagacttcttatatagtagttcacggctccttagagaatgttccaagagactcaggtcaaagcagcaaggctttttctgacttagcctcagaagtcatacaacatcacttctgccatattctttttattacaagtgagagttccaggattggtccaggtccaagggaagggtagtacacatacacgtgaacactgggaggcatagtttattgagaccctcttacagctacctggagcatagagtcagaagtcttcctagcttctctgattgtactcgaccccttctccccgctatgcctctgaccatcctcttaattttggctgggagttgttgcagaagacacatccatgctccaggtgtgcacagtccccttcgtggtcagcagaatgtgtacagcctcattgtgagcagggccaacagtaggttaccaagctcctgcaatgctggagtgcccattaccaactcctgccaacccactgccacatagtatctcatgggctcttgtttaagctgaacatattcactggggccaccttggagaacttggccttgacctgcttaaacacttgagcaaggttctattctgagagcttggatct

SEQ ID NO: 76122 - DNA, 1330 bp, Homo sapiens
gcaagaaagttttagaggcggtactgtgtattccttgttgcctcacatcagaaggcacatgctcgctagttttctccagtcttgggttattgagaagatattgatcagtggattcaggtgtttgcagcctgatccatccattctaatattccttgctggccttttgcctaatgatattagcagtcattgatgattattgtctaacactgtgatttcatcagaggtttcacatgatattctaattctgatattccttcttcctttattagctgtaattcttctataaagaagagcttggtctcatcaactatctggttactctgaaatagttcataaaggaaaggcaggacaaatgcttgattctttatctttaatttatctgcttttggaataatgagtttattctcaagcatctcccaaaggtgatatgctggttatgtattgctgcatattaattgccccctcacttagtggcttaaaatagcaaccattttattttgtattataattttgtgggtcaggaatttgggccaggatcagctgagagattcttctgctctgtgtggtactggctgaagtcacttgggagtattcagcttgtggatgggctgatctggaggatccgagacaacttcccttgtatgtgtgatgtcttagtgggaatggctggaaggcggagctgtgcggggactgttaaccggagtgcctacacttggcttccccagtatggcagacttcttatatagtagttcacggctccttagagaatgttccaagagactcaggtcaaagcagcaaggctttttctgacttagcctcagaagtcatacaacatcacttctgccatattctttttattacaagtgagagttccaggattggtccaggtccaagggaagggtagtacayatacacgtgaacactgggaggcatagtttattgagaccctcttacagctacctggagcatagagtcagaagtcttcctagcttctctgattgtactcgaccccttctccccgctatgcctctgaccatcctcttaattttggctgggagttgttgcagaagacacatccatgctccaggtgtgcacagtccccttcgtggtcagcagaatgtgtacagcctcattgtgagcagggccaacagtaggttaccaagctcctgcaatgctggagtgcccattaccaactcctgccaacccactgccacatagtatctcatgggctcttgtttaagctgaacatattcactggggccaccttggagaacttggccttgacctgcttaaacacttgagcaaggttctattctgagagcttggatct

SEQ ID NO: 76123 - DNA, 1330 bp, Homo sapiens
gcaagaaagttttagaggcggtactgtgtattccttgttgcctcacatcagaaggcacatgctcgctagttttctccagtcttgggttattgagaagatattgatcagtggattcaggtgtttgcagcctgatccatccattctaatattccttgctggccttttgcctaatgatattagcagtcattgatgattattgtctaacactgtgatttcatcagaggtttcacatgatattctaattctgatattccttcttcctttattagctgtaattcttctataaagaagagcttggtctcatcaactatctggttactctgaaatagttcataaaggaaaggcaggacaaatgcttgattctttatctttaatttatctgcttttggaataatgagtttattctcaagcatctcccaaaggtgatatgctggttatgtattgctgcatattaattgccccctcacttagtggcttaaaatagcaaccattttattttgtattataattttgtgggtcaggaatttgggccaggatcagctgagagattcttctgctctgtgtggtactggctgaagtcacttgggagtattcagcttgtggatgggctgatctggaggatccgagacaacttcccttgtatgtgtgatgtcttagtgggaatggctggaaggcggagctgtgcggggactgttaaccggagtgcctacacttggcttccccagtatggcagacttcttatatagtagttcacggctccttagagaatgttccaagagactcaggtcaaagcagcaaggctttttctgacttagcctcagaagtcatacaacatcacttctgccatattctttttattacaagtgagagttccaggattggtccaggtccaagggaagggtagtacacatacacgtgaacactgggaggcatagtttattgagaccctcttacagctacctggagcatagagtcagaagtcttcctagcttctctgattgtactcgaccccttctccccgctatgcctctgaccatcctcttaattttggctgggagttgttgcagaagacacatccatrctccaggtgtgcacagtccccttcgtggtcagcagaatgtgtacagcctcattgtgagcagggccaacagtaggttaccaagctcctgcaatgctggagtgcccattaccaactcctgccaacccactgccacatagtatctcatgggctcttgtttaagctgaacatattcactggggccaccttggagaacttggccttgacctgcttaaacacttgagcaaggttctattctgagagcttggatct

SEQ ID NO: 76124 - DNA, 310 bp, Homo sapiens
gatccatgtgattctttggtcacacttcaggtgccagagtcccttccagagaggatggatctccctagcctttctggaggaggattcccacaagtaggggtagcagcttcatccctgagaaatcttcagggaagctggtgtcgggccctgaaggctgaaaagcattttgacaggtggaaaaaagcatacagtgttgcattctaggaaatagcatgctccaacgacagaggcacgggagtrtgcctgggaacctttgaggagacaagggtgggtggggctgtgtgtgtgtgtgtgtgtgtgtgtgtgtgtg

SEQ ID NO: 76125 - DNA, 2063 bp, Homo sapiens
aacccaaatcctttggagaggaactcactttcattacgggcctcaaattactgctggtagtaatctctctaatgcaatttctggtcaatacaaaagataacaaagcacagaagaaaattaggcaagagagtcagcaaaaacaacagacaacagaaacagatgtacagggtctctggagactggaattatcaaatgcagtttctcaattaataaattatattcacaatagctatgtgtgaaagggaacataaaaagtaaaaaagttctcttcagtgaatagcaatctattaaaaaattataatggatttgaaaaagaaattctagacatgaagtgtttagcacattggggtagtgagttccctgtcaytgaaggtacatgaacaaggccagacaactgagtaacagaatagttgaagaggggagtctagccctggctagcggttagcctggtcatcttcaagtctccttatggtacaaatgctgtaagatattttgcctaagaacaagacatcctccaattgaccagggtcctcagatcatgtctagcttgacttctccaggtatgggcttgagaatcctgcccaagactgctgcatttctcactgccccagggtagctaacagttaccatggctgtgtaaacttgcagagagatagggatcatccatagaagctgcagatgaaacacagggagccaatctgggggacatatcacatactatggatccaggagaagttttaataacatgtagtttaaattgatcatttgcagacatctgcatgagtttgcacaaactctcttcactttaaaacattctcaaaactttataatattccaaaagaaaagaaaaaaccatcaacttttgacctgctgtctttcttggttctgtttatgttctcaacttgttctactctatcaaactctccaaatgggggggcctatggccatattttccatccatgctcactcttcagaatcccctaacccaaatttctttgcatacagtcagtttattcaagttacacttgttcttaggttcatcctttccaacatttctgatcatcttctccttcctggggctctctttggaaatgacagttaccattcaaggggcatccttaaaccactttctattacattatttaatccttacatgaatcatgagtaatcatttctgtaagggctattacatggtaatattcattccttatagaaaaaatagaaaatacctgtaaacaaaagcaaattgaaatctcttctaattttaccaacaggagataactttttgctaatgtttgttaatatttgggatgttttctccaggcattttttctgtgaaattttgcaaaacatgagattttatatgctgagcatacattttagtctgtctttatttattaacaatagattatgaacccttttccatgttaataaatatacagctacaacttaattcttaatgtttgcacactatgtttctatatggatatatgacaacttccttacaaatctattgttaaacatttgaattaattccaatcttcactattaaaatagcatcttatagctatatctttgtgtacatccttaattatttctccaaaataaattcctaaatgtggaaatgaattcatacttctgcttttgacaaatttcccccccagaaagtttgtactaatttagactcccaacagccatgtgtgaacagggctatttccctgcactctaaccaacatttgggtattaatgtttttattgccctggctaatttcataagtagcattttattattgttttaattagcttttctacagttataagtaaaatagaatatgctcttccatgtttatttaccaattgatttttttcttttgtgatttaaattgttaatattcttcatatagtaacactggtacatagaaataaatattaaccagtattattatcatcatcatgattatcattataggtagcagcccttgtacattgtaaacagaatcccaaatttttcatttccttttaatttaatccaattatattttatcaatttaggccatacagag

SEQ ID NO: 76126 - DNA, 784 bp, Homo sapiens
tactgtttgttttaatccattaaggcagcaaaaattttaaaaatttaaaaattagtaataatatataaagtggagaagtataaaggcaaatgggtatttttcacatatttctggtgggggtgtagatgggaattgtaatacaagttgctttttgttttttgatgtcttcctagagtaccacacactcatgtacaagactgcaggatgtgattaaattgtaacaactgaaaaaaaaaaatcacctagagttagggaggggaaaccaatcaaattgtttcagggtcactaggggtagggcctgagcattggttttattttaaagctcctcacgtgattctagtgctcaacccggactgcaagtctctcagttcggtgaaatattacgctttttttctttttttactgagacatatctatatgtaactgatgtggatagcaaattgcagaatatgaatggtatgatgtcatttatgtagaaacaaaacaatactgtgtagttccatgggcatatatacatatatgtgagtacagtagtccctccttagctgcagttttgctttctgaggtttcagttaccatggtcaaccaaggtctgcaaatcttaaattaaaaattccagaaataaacaattcwcaagttttaattgtgtgccctctggttccatcccacccagggcacaaatcatccctttgtcccgcctacccaccttgcatccactatccacccattattatacaggaaaaagcacagtgtatttagagtttggtactatccgctgtttcag

SEQ ID NO: 76127 - DNA, 511 bp, Homo sapiens
taaaaaaatcctggccaattaagaaaaaatttcctggcccgtgatgtggcagatgtggtacctgatatgccaaaagagccctactcccagagactggccctcctttctcttgggggaggggaggtagaagtcgatgtgggaaaatcctaaaatgggtttcttactgattcccagaggtctccaatagkgttgcacccacaacagtacattggcacccccacgctctcagctttccctatcttctctgtttcctctaccagtgcttcctggagtctcttcctccacaaagcctcttgcattcaaatttttgactcaggatctgcttctaggggttcccagactaagacaggatgtaactctggtgcactttcttcttctcccttggctggttcccactggcacgaagctgcccattgacttctgggcttaggtgaaatgccagaacacctaagggatgtgtgtccctgaatggccaccatggtgctggacaacacgccccagaagtggaggg

SEQ ID NO: 76128 - DNA, 1388 bp, Homo sapiens
ctgcctcagcctccagagtagctgggactacaggcacccgccaccacgcccggctaattttttgtatttttagtaaagacggggtttcaccgtgctagccaggatggtctcgatctcctgacctcgtgatctgcccgcctcggcctcccaaagtgttgtgattacaggcgtgagccactgcgcctgtttttgttttttttttttttcacagagggagctgtatcttgagacaggtgaacatgctgtgataacaccaagtatcctttctcctgtctcagagaaatacagcctcacccaactatgcacactagcaagaagcaccaactcagtctcttcyattgggtacataatggtaggaggaaagctgagggtctcaggtggtcccatctctcatctaagagcattcttttacctctcgactggcgaactccatcctgtccagcaatgaagtagaccccaacagcaaggacgaaaatgctgacgatttcagcaaagagaaagccagatatggtggctgcatttagttcaatgcagttctgacacactgtagggaaaaggagagacaaaccttcaggttgcgaaagttgtttttcctggttcgttttctcctgcctgtctgcaataatgccgctgtggagggcagcaggcttttcctctgtgggtggcagggcaagggaagatccttgcgccaaaactcaatgcatcttgatgctcttaagtcccccaggattcctggggaagcccatgtagtctaactaccaggaagtatctggaacagaaggaagactagatactcttcatgctccactgcgctccagttctcactgctgctcaccttatgatcacctctgtctccccaaccccttcattcaactcagtgctgaattgcttgaatccatggagcccacccaaaggtaaacaaaattttacaggactggctgtagtttttcaatagggtgagggaagtatcttacagtattttaaaagaggcaagctgaaattaagagaacaggcgataatattactgtggaggatctatttccactttcaccccagataaaaagctcaccagaacagcaaatactgattaatttcacaacaaacagaccaaaggggattacatacttctgtaatacacttggagtgggtttgacttgttctgtgatcctttacactgatacatccctcgagggtccttggcattacttcccagattccatttttttttatcttcagctaggaagccgatcatcttcccatctttaaaccatgtgatatttttggcttctgcatcacaagtcagaagtaccgaaccatcttcttgatagtcatacaccttaaccaagtggttgtcctgaaatgagaaaagccgtggttctattaaggat

SEQ ID NO: 76129 - DNA, 622 bp, Homo sapiens
accagagcctgtttggactcaataagactgctgagtattttaggaatatattagctctttattttgtttttgttgttgttattttgagacaaggtctcgttttgttgctcaggctgtagtgcagtggcacaatcatggctcattgcagccttgacctcccaggctcaatagatgtgtctgcctcagcctcctgagcagctggaactacaggaacacaccaccacgcctggctaatttttgtgttttttgtactgtttcactatgttgcccaagctggtctcaaactcctgggctcaaatgattctcctgccttagtttcccaaagtgctgagattacaggcgtgagctaccatgcccggccctcaactctttattttgaaraggagagcaaaaggaggtagatatatgtgtaggatcatttaggtgctctctctctctctttttttttttttcgatgcggggtctcactctgttgcccaggctggagtgcagtggcatgatctcagctctctacaacctccaccttccaggttcaagtgattctcccgcctcagcctcctgagtagctgggattacaggcgcatgtcaccacgttcagctaatttttatattgttagtagag

SEQ ID NO: 76130 - DNA, 515 bp, Homo sapiens
tttccacatcaataaatatttgtctgcatcatcatttaacagctgcatgattttccactatatgcattcatgtaccaagccctagtggtggacagtatgacagtatgttctctctctctctttttttttttttagagacaaagtctcactttgccacccagggccagagtgcagtggcaccatcatagcccactgcagcctcagacttctgagctcaagcaatcctcctgccacagcctgccraggagctgggactacaggcacatgacagtgtgcccagataattttttttttcagagaccaagtcttgttatgttgcccaggctggtcttgaactcctggcctcaagtgatcctctggcctcagcctcccaaagtgctaggattacagatgtgagccgctgtgactgtcctctctctgttctaaaccacactctgatttgcatctgctgcaggcagacacagcaaacagagaagggtaggccctcagcccgtccagcctccacccaaaccccc

SEQ ID NO: 76131 - DNA, 601 bp, Homo sapiens
cctgctcagggcctcacaggcagtagggacataaagaatatttagagtggaggaaagaaagggaggagggaagaaatgaatgagccacacatggcagatagtctgagcccccagtcaaatgctgagagggaggacatggtggaggaccaagcagggctgcccagtctggtcatgtcagctgttgatgtgcagggagcccctgctgcasagcccgctggcccagagatcatgcaggtagtcacttcccctccctgctgcagagaggttagggtgggaccaggaaatcctgggagatggtggaggaagatgggcagagcaggagagagtggggagggcctgggagtcaggaaacctgaagtggagattaaagcagtggctgggtcaggcacagtggctcacatctgtgatcccagcactttgggaggctgaggcaggtggatcacctgagatcaggagtttgagacaagcctggtcaacatggtggaaacccgtctctactaaaaatacaaaaattagctgggtgtggtggcatgcgcctgtaattccaactacttgggaggctgaggcaggagaatcacttgaacccgggaagcagaggttg

SEQ ID NO: 76132 - DNA, 1146 bp, Homo sapiens
tgctgttcttttgtgggtaccaaggtgagggggagatgggagctacccaagcccaattgcagggcagaacagcctaaggatggggtagtgcccctggtgacagaaggtcaagttctagccttgctacttcacatttgggagacaagttcctgtgcctcctgttccttttgtacagtagggatatgacaattgttgtgaaagttaaacaccatttgtaaagcacttagcatagtgtctaattcatagtaagcactaagtaaatgttagctgtaataataattatttttagatttttggattcagactctgctcttctctggcccttatttattcataggacaaattcagcatctgctgcatgctgggccrggtgcccaggcacctggggtacacagactatgtcagaagaaggtcctcctcttggagtttaaggacaaaaaaacaagtgtattagggttgtgaaggagagatgaagggggctacagcatcgcctgtaaaaataggacgtccaggggctgggcttcttcccctaccccctcacccctactacgttcctcagcttccagagtctgcaggtagattccctcaagtcctctgaaattcttctccagggacttgtgaggagcttgggctcactggacctgtctctactagggtgggcagagcaggctctccccaaaacaacagaatcttggcttcccagccccagcctggcagagcactagcctctgggttttaatgagctgccctgggttagaaacaggacgtgactgtggctggctgagaatcctgaagatcttattaaagaatcatctcccttgtactttgggctgaaatgctctttccaaccaaggatcaaagcaaacttgacacacattctctcattaatctccccatcccctggggcgggagcagatcggtagctgttttctctggttctcaaagagggaagctgatgcgacattgacctggtgtggcttgtggaaagacctcccccttggtcagatgctgaacagggaccaggacccaggcatcctagcggcggctatgccaagtgtcatccacactttgtgccccacgcccccagcaccatctcagcaagaaggaaaacatctcattaggcaaacagactcagccacactggcc

SEQ ID NO: 76133 - DNA, 662 bp, Homo sapiens
tcccaagtgcaaaatggatcatccaaaaatactgcagctcaatattctctatgctcccgagaaagttgaaattattttcttacagcctattaatagagatcacaattataaagctgcactttggaggcgtcattatttatagagaacaggaagggtgaaggaaggaggagagagacatctctatctgttctgaatggtgcatcctaaaccctcaacagaaagtctacttacatcttggtcatagcgctttctgatttccgggtgagtctgttcaatgagacgctccacaaaacatgtctaaaagggaagaaacatctttcatctgccgaccacagaggaaaatgtactgtgcccttcccccagctcccaatacaccacataattcagggataagragagaaaaaggagagcaaggagggttatgggacagcaaataattaacactgaagccacaggattattttcaaataaaagatgaaatctttcttagacaggcatccctcaggaaatgaaaacttataaaaatcagagtaaggctcaatttcccatcttctgtccagatgtagacataaggctcaggcatgcaagtggcttaggaacaggctccacctgctgcttgggaaaagccagaatttcacagtatgacttcgtaacaggcatgc

SEQ ID NO: 76134 - DNA, 627 bp, Homo sapiens
gggatccttcacacagcatgtctgcccacgtaggacctgaacatagctgggccccttcagcctctgtcctacccctgcgcccaccctatagccatgcagcacacacacggccagttcccaacgtgtgggtgaacattgcgggtttcactgaagtttttgtgggaaaccaggggagcagatggcatcatacagcacactccagcctaatcacagcagccctgggtttctcccttctctccwtcgtcatctctcttccaggcagtgctcttcccctcctctccaatcccagtttctttaacaaaaccaaatcctcattttacatccccaatgaagcaaaacaaagccggataggacacagaccacagggctcctgctccaccggtatctcattcaacctcctttatccccatctttttattatggccaaccattttatcctcacgcaggcctctgtgccctgcacacacaacagcttcctcaagctgccctccatgtgggtgctgtgaggctccgagaggagacaggacttgccccatgccacccagcccctgggcagggctcctccctgccttgcccccagagggcctaggttaggtcccctccccaagcccatttgtccctgtggtt

SEQ ID NO: 76135 - DNA, 1513 bp, Homo sapiens
ctagaaccggtgggatgaagtttcagggtgcagctagatgctggagaggaagcctgcacacaggcaaatgcaccaacagaactggcaggagatggtccagtgattaaagtgatcaggcagaggttgaatcattgcctgtccagggacgctgtaggcagaaggcagggagctagccaatattaaacaccttctgtgtagcagtcctggatatttggaactagaattcaagctccttaagaactggggcccacattttatttactttttttttttttttttttgaggtggagtctcgctctctcacccaggctggagtgcagtggcacaatcttggctcactgcaacctctgccttccaggttcaagtgattctcctgcctcagcctcccaagtagctgggattacaggcacgcaccaccacgccctgctaatttttgtatttttagtagaaacgagattttgccatgttggccaggctggtcttgaactcctgacctcaaatgatctgtccgcctcggcttcccaaagtgctgggattacaggcgtgagccaccatgcccggcctgtttacctttggattctcagcgcctagcactgtgcttggctcctggttgtaaaacctaaaataacaggaaaaatagccaccattgacagccacctactgtattttttgtaaagaatcctgacaacaattgctcatggcaggtactataatctccactttacagatgagaaaactgaggttcggtggggttgaatgacttgcccccggtcatacacttcctaagcagcaaagccagggttgggactcaggtttgtctgccttcccggatccctgatttttctcctccttgtggcatgtcactgcatcgggacggtggttgcactacggatgtccctggaaggccctcttgattctgaggttctgtcttattagctgcacctccctccacccccggccaaccgcaaagaaaaggaaaagtcctttcctcctcctcaggtggctcgtggtggattacttagcgcttgacacggcgtgtctctgtgtcactgttcctgggcggaattaaatcagggcaggaaaatattaatttggagttggggatggaggccgctcctttccaattattctccaccccatcaggcttatcctggcgcaaacaaggaaggaggctggattaattgctttggactctgccccactccggtcccaattactgggccggcttggctcccagcattatgaagcacactgctgtgcaggaaattgtgtgaaattttaacggattttcagatgcaataatggagcacaggattcaaggccagtattcatggggcagccgggccctctatgcctcggctgaggttaagctgtttggggtttctttgtatattaaaggatcatctrgttaaccccaaaacccagggccgccagaactgttcagactctgaccccacagaggcagggtgggctcctggagtgcaaggaaacccactgccttcatgataataac

SEQ ID NO: 76136 - DNA, 602 bp, Homo sapiens
aattaattatgtgcaggggatgcccccttaatggccatcgtttagtttaatttaagaaacagatccctcctcacacccccctcggtcagcagcaccaccattggcagctgcattgattaatggcctcctcttggatacaggggagcagtggttctgaaactggagcgcgcctgagaaacgcctcaaggattcctttacacacggattgcaagaatccatccctgggtggtgtctgataatttggatttctgacaggttcccaggtgatcttgatgctagtggttccgggaacacactttggaaatcactgtagtagagacaggatttcctgtagtctccccaccctcwggactcgggaactctgcccttcactgccccctgtctcaagggtcctctaatccaataggggcgggcatagccatctctgccactttactacccacaagtgcactcatctctccaatggtgtgtaagacatgtgcattctctgagcatcatggtgatcccacccctgggcatttctattccaaagagagatggataagtgccaaggacccaattcctggacccctctgtctagatgcagtccctcctgaactgga

SEQ ID NO: 76137 - DNA, 1422 bp, Homo sapiens
caacctccacctcccaggttcaagcaattctcctgcctcagcctcctgagtagcggggattacaggtaccagccaccacgcccagctaattttgtatttttagtagagttgaggtttcactacattggccaggctggtctcgaactcctgacgtcaggtgatccgctcacctcagcctctgtaacctacaaacctcttcagaaagtgtaaaatgaaagcatttccccatttctaaagcagtgtccaggtttcatcaggtagctgtcgaacccaaagagactttgaagccaagagtccacaggatcagcttcccagtggccccagaagttacaagatggggccctcccaacaaaaggcatcctcaggcttttacgtaatgctggtgtgcttagcgactgctgaaagttgactgtgcttgtgtcrtgaaagccaagatgaagagacgttattatggttgtgtgttgctttcagctagatactcctcgctggggaaatgtaactgcaaagcagactccaggacactgtcttcctgaaagccggtgcttttgggggacattctggggcccaccagggtcatcctggatgctgactggaactgagaagaggtttgctgggaagatagggacagattctttgtatctatgtcattcaggtaaaccctacatgtgacatgtgacaccatctcttttgacctcagtttcaaatgagatatttgaccaaccttattgctaagggtcaggctagcttgaaataaccctcaagaaatctagataaaaacctaaatgagattataggctttttttttttgcctaagattatttgcttccagaaccctaaggaaacttcacaggaaacatggtaccatattttagtacacatctccatcctatgcatgttctccagaacctcttcacacacactttgaggagagttccatcaaacctccttctcttattccatcttaatgtcatgcattatttctcttcatcctgcctctccttttcagttacaaattgattctgatagaaacaccctaaatgaccttcccagggcagtcagagagttaacttgttgtagggttgcatttggccatctgggcagagggaggaaacagtggtcagtgtccaccctgtgggagggaggcagcacccaccacagctttccaactttgctggcttcacatttcccaggacagggcaagaagaggaagagctcctcagtggctgtggggagagtgcaggaaggagccctagacttgcccatttcttcttgtcccaaaacccaacacagacctaaaactcagccaagcccaagctatgccccgcttctgcaatctcttgcaaggcccctgcttaaacaacctgagctcccagctttagtaggcttgggaacttgatgcttcatttgggacaaactttgtgg

SEQ ID NO: 76138 - DNA, 696 bp, Homo sapiens
tgcatggtggcgggcgcctgtagtcccagctactcgggaggctgaaggctgaggcaggagaatggtgtgaacccaggaggcagagcttgcagtgagccaacatcgcgccactgcactcagcctgggygacaaagtgagactccgttaaaaaaaaaaaaaaactaatatgcaaacaacatggattaaattattagcttagtagaaggagtcactaaggaagtcagttcctatactttgttgttaaaaaattaactgacaacactttaaaacacatgttctcagcaccctgtcttggtagcctttggccctggctgtactcctggacatagatagagctacactggttcttcataaaccatagatacaagtaggaatttaaatgtttctaacttgtaggctggagcttatctttttctgccttcatagggtagccatgagcaaggagcctggtgaccttaacagaaagggaagatttaaggtttctatttaaatgtgttcaggaaaagcagagtttgaattaaaatttttatctcaatttcaacttcatttggttttacatctttaaatattgttctttttaaatgttgattataattaatatttgttaataaagacaaaatactagtgaatatttttaatgtttaatatgttttagaaatgataacacttttaaaaaggaaactgggcctttctttt

SEQ ID NO: 76139 - DNA, 696 bp, Homo sapiens
tgcatggtggcgggcgcctgtagtcccagctactcgggaggctgaaggctgaggcaggagaatggtgtgaacccaggaggcagagcttgcagtgagccaacatcgcgccactgcactcagcctgggcgacaaagtgagactccgttaaaaaaaaaaaaaaactaatatgcaaacaacatggattaaattattagcttagtagaaggagtcactaaggaagtcagttcctatactttgttgttaaaaaattaactgacaacactttaaaayacatgttctcagcaccctgtcttggtagcctttggccctggctgtactcctggacatagatagagctacactggttcttcataaaccatagatacaagtaggaatttaaatgtttctaacttgtaggctggagcttatctttttctgccttcatagggtagccatgagcaaggagcctggtgaccttaacagaaagggaagatttaaggtttctatttaaatgtgttcaggaaaagcagagtttgaattaaaatttttatctcaatttcaacttcatttggttttacatctttaaatattgttctttttaaatgttgattataattaatatttgttaataaagacaaaatactagtgaatatttttaatgtttaatatgttttagaaatgataacacttttaaaaaggaaactgggcctttctttt

SEQ ID NO: 76140 - DNA, 1095 bp, Homo sapiens
tctcatcaaaatttctataattttgggctttttgaaggcttgactggttctaaagttaaaatgaagaatacatgtaaaattgctttctgagagaggattttaatcaacctaaagccatgatgtaaagcagtaaaaatcaattaataaagatgattatttaaaacttgtatgtgtaaaaattaataaacaaaatgagaatatcgacaaactggagaaaatgtaatacgaatataattggtaaattgtaaaaatggcattgaaaaacagggaagttggatcatttacctcccatttctagcccctcatttgttggggcttgccctcagaaggattgaaactattgtgctttagggtgtccctgaaaagcacactcccatgaacctggaaagtgtttgatagaaaggcagagaggtgcaaatatcraggtggaaagctgttaatgtgtataggattgtgtagtgtgtctgcagctgagcttagagagggtggaggtgatatggggaagggaaaaaacacagcagtatctactacaggtgagaaatgttttgattacaaaattaaatgaaaaatgctggataaaaaaaccacatgtatgaagaacaattaccatgatgtaagaaaaaaaaaaaagggcatggagtataaagactggaaggaataatggcaaaatattaagtgaatatcttggattctaggactaccaccaaattttattatagaagtagtactaatatagaagtaatagttgtcacatttgttgttgttacttttgtttatgacaaaggttcacaaactataatctaacttctgtttttgcagataaagttttattggacacatagtcatgcccgttcatgtattgccgatggctaattttgtcctatgtctgaagatttgaatggtgcaacagagatcaaatgactgacacaacttaatatatttattgtctggctttttaagaaaaactttgctgatccctggtttaaaacagtgtgccaagctaataggataatctgatcgcaatttgactgaggatatagtagaagtatttggggagaaaaaaacaaaacaggcttagaacactatatttgtgta

SEQ ID NO: 76141 - DNA, 1095 bp, Homo sapiens
tctcatcaaaatttctataattttgggctttttgaaggcttgactggttctaaagttaaaatgaagaatacatgtaaaattgctttctgagagaggattttaatcaacctaaagccatgatgtaaagcagtaaaaatcaattaataaagatgattatttaaaacttgtatgtgtaaaaattaataaacaaaatgagaatatcgacaaactggagaaaatgtaatacgaatataattggtaaattgtaaaaatggcattgaaaaacagggaagttggatcatttacctcccatttctagcccctcatttgttggggcttgccctcagaaggattgaaactattgtgctttagggtgtccctgaaaagcacactcccatgaacctggaaagtgtttgatagaaaggcagagaggtgcaaatatcgaggtggaaagctgttaatgtgtataggattgtgtagtgtgtctgcagctgagcttagagagggtggaggtgatatggggaagggaaaaaacacagcagtatctactacaggtgagaaatgttttgattacaaaattaaatgaaaaatgctggataaaaaaaccacatgtatgaagaacaattaccatgatgtaagaaaaaaaaaaaagggcatggagtataaagactggaaggaataatggcaaaatattaagtgaatatcttggattctaggactaccaccaaattttattrtagaagtagtactaatatagaagtaatagttgtcacatttgttgttgttacttttgtttatgacaaaggttcacaaactataatctaacttctgtttttgcagataaagttttattggacacatagtcatgcccgttcatgtattgccgatggctaattttgtcctatgtctgaagatttgaatggtgcaacagagatcaaatgactgacacaacttaatatatttattgtctggctttttaagaaaaactttgctgatccctggtttaaaacagtgtgccaagctaataggataatctgatcgcaatttgactgaggatatagtagaagtatttggggagaaaaaaacaaaacaggcttagaacactatatttgtgta

SEQ ID NO: 76142 - DNA, 1095 bp, Homo sapiens
tctcatcaaaatttctataattttgggctttttgaaggcttgactggttctaaagttaaaatgaagaatacatgtaaaattgctttctgagagaggattttaatcaacctaaagccatgatgtaaagcagtaaaaatcaattaataaagatgattatttaaaacttgtatgtgtaaaaattaataaacaaaatgagaatatcgacaaactggagaaaatgtaatacgaatataattggtaaattgtaaaaatggcattgaaaaacagggaagttggatcatttacctcccatttctagcccctcatttgttggggcttgccctcagaaggattgaaactattgtgctttagggtgtccctgaaaagcacactcccatgaacctggaaagtgtttgatagaaaggcagagaggtgcaaatatcgaggtggaaagctgttaatgtgtataggattgtgtagtgtgtctgcagctgagcttagagagggtggaggtgatatggggaagggaaaaaacacagcagtatctactacaggtgagaaatgttttgattacaaaattaaatgaaaaatgctggataaaaaaaccacatgtatgaagaacaattaccatgatgtaagaaaaaaaaaaaagggcatggagtataaagactggaaggaataatggcaaaatattaagtgaatatcttggattctaggactaccaccaaattttattatagaagtagtactaatatagaagtaatagttgtcacatttgttgttgttacttttgtttatgacaaaggttcacaaactataatctaacttctgtttttgcagataaagttttattggacacatagtcatgcccgttcatgtattgccgatggctaattttgtcctatgtctgaagatttgaatggtgcaacagagatcaaatgactgacacaacttaatatatttattgtctggctttttaagaaaaactttgcygatccctggtttaaaacagtgtgccaagctaataggataatctgatcgcaatttgactgaggatatagtagaagtatttggggagaaaaaaacaaaacaggcttagaacactatatttgtgta

SEQ ID NO: 76143 - DNA, 1048 bp, Homo sapiens
attcctggaagtggaattgttggattagggaggagatgtgtttgcaattttaattgatatagatttggccaagatcctaaatagatatagatgcgggacctggatgttgggtttgattatcctttacaggctctccatagtgacggtgggtatctttagagaaagctcaccatttttgcattttacctctactattcctcctctaggagaaattagtgtattttttccttttttggaagccttcattacaattctctttctaagacttggaatttccatgttgccaaagaggagaatagttactttatagtttctctggtacagcactcagaattctgtaacttggccttactgcttaacctgccggtgctgggatcctcatgtgtaaaatggaaatgttcatgactcttcttcctgagataaaattttgttcatttcatcaaacactcagtacattcttattcctccatgatgccttcttcactcgctaaccacttgatgtcagtttctgaacatctctatactccctggrttaatgattctgttttatctataaactcaaataaaccagagcttggaaaagcgtatcagagttcaaattatgcagcatacgggattagcaacagccttaggcaagaattcaacctcaaaccctgtgaattattgtaacactaacccgtttgtccataatcctcaggtctctagggctgtactctctggcttagcagccacttaaccgcatgtggccactgagcacatgagctgtggctagaggaacaaatcatcttctgtggctgccccagggaactccccttcatttcactcaagttggttgttttcatgctttcaaatatgtttaaagttcatcatttcagtttttgaaggacagcattggctgatactattttcaatttcctaggtagcaaaattaaaataacccaccagagggctccaaagctgtactaagcttgctttctttttctttttcttctttttttttttgtaaccactggaagtgcacagaatctaaattgtattgagggaatag

SEQ ID NO: 76144 - DNA, 1048 bp, Homo sapiens
attcctggaagtggaattgttggattagggaggagatgtgtttgcaattttaattgatatagatttggccaagatcctaaatagatatagatgcgggacctggatgttgggtttgattatcctttacaggctctccatagtgacggtgggtatctttagagaaagctcaccatttttgcattttacctctactattcctcctctaggagaaattagtgtattttttccttttttggaagccttcattacaattctctttctaagacttggaatttccatgttgccaaagaggagaatagttactttatagtttctctggtacagcactcagaattctgtaacttggccttactgcttaacctgccggtgctgggatcctcatgtgtaaaatggaaatgttcatgactcttcttcctgagataaaattttgttcatttcatcaaacactcagtacattcttattcctccatgatgccttcttcactcgctaaccacttgatgtcagtttctgaacatctctatactccctggattaatgattctgttttatctataaactcaaataaaccagagcttggaaaagcgtatcagagttcaaattatgcagcatacgggattagcaacagccttaggcaagaattcaacctcaaaccctgtgaattmttgtaacactaacccgtttgtccataatcctcaggtctctagggctgtactctctggcttagcagccacttaaccgcatgtggccactgagcacatgagctgtggctagaggaacaaatcatcttctgtggctgccccagggaactccccttcatttcactcaagttggttgttttcatgctttcaaatatgtttaaagttcatcatttcagtttttgaaggacagcattggctgatactattttcaatttcctaggtagcaaaattaaaataacccaccagagggctccaaagctgtactaagcttgctttctttttctttttcttctttttttttttgtaaccactggaagtgcacagaatctaaattgtattgagggaatag

SEQ ID NO: 76145 - DNA, 1048 bp, Homo sapiens
attcctggaagtggaattgttggattagggaggagatgtgtttgcaattttaattgatatagatttggccaagatcctaaatagatatagatgcgggacctggatgttgggtttgattatcctttacaggctctccatagtgacggtgggtatctttagagaaagctcaccatttttgcattttacctctactattcctcctctaggagaaattagtgtattttttccttttttggaagccttcattacaattctctttctaagacttggaatttccatgttgccaaagaggagaatagttactttatagtttctctggtacagcactcagaattctgtaacttggccttactgcttaacctgccggtgctgggatcctcatgtgtaaaatggaaatgttcatgactcttcttcctgagataaaattttgttcatttcatcaaacactcagtacattcttattcctccatgatgccttcttcactcgctaaccacttgatgtcagtttctgaacatctctatactccctggattaatgattctgttttatctataaactcaaataaaccagagcttggaaaagcgtatcagagttcaaattatgcagcatacgggattagcaacagccttaggcaagaattcaacctcaaaccctgtgaattattgtaacwctaacccgtttgtccataatcctcaggtctctagggctgtactctctggcttagcagccacttaaccgcatgtggccactgagcacatgagctgtggctagaggaacaaatcatcttctgtggctgccccagggaactccccttcatttcactcaagttggttgttttcatgctttcaaatatgtttaaagttcatcatttcagtttttgaaggacagcattggctgatactattttcaatttcctaggtagcaaaattaaaataacccaccagagggctccaaagctgtactaagcttgctttctttttctttttcttctttttttttttgtaaccactggaagtgcacagaatctaaattgtattgagggaatag

SEQ ID NO: 76146 - DNA, 1048 bp, Homo sapiens
attcctggaagtggaattgttggattagggaggagatgtgtttgcaattttaattgatatagatttggccaagatcctaaatagatatagatgcgggacctggatgttgggtttgattatcctttacaggctctccatagtgacggtgggtatctttagagaaagctcaccatttttgcattttacctctactattcctcctctaggagaaattagtgtattttttccttttttggaagccttcattacaattctctttctaagacttggaatttccatgttgccaaagaggagaatagttactttatagtttctctggtacagcactcagaattctgtaacttggccttactgcttaacctgccggtgctgggatcctcatgtgtaaaatggaaatgttcatgactcttcttcctgagataaaattttgttcatttcatcaaacactcagtacattcttattcctccatgatgccttcttcactcgctaaccacttgatgtcagtttctgaacatctctatactccctggattaatgattctgttttatctataaactcaaataaaccagagcttggaaaagcgtatcagagttcaaattatgcagcatacgggattagcaacagccttaggcaagaattcaacctcaaaccctgtgaattattgtaacactaacccgtttgtccataatcctcaggtctctagggctgtactctctggcttagcagccacttaaccgcatgtggccactgagcacatgagctgtggctagaggaacaaatcatcttctgtggctgccccagggaactccccttcatttcactcaagttggttgttttcatgctttcaaatatktttaaagttcatcatttcagtttttgaaggacagcattggctgatactattttcaatttcctaggtagcaaaattaaaataacccaccagagggctccaaagctgtactaagcttgctttctttttctttttcttctttttttttttgtaaccactggaagtgcacagaatctaaattgtattgagggaatag

SEQ ID NO: 76147 - DNA, 1026 bp, Homo sapiens
tgtgtatgtacggtatatgtgtgtgtgcagtatacrtgtgtgtgtgtgtatttggaaggaagagagagatttattttgacgaattggcttgcacaattatgaaggtttgaggagtccacaatctaccgggcaggccagcagcctggagacccagggaagggttgcagttcaagtccaagggcagtctgctggcagaattcctttttgcttgcgggaggccaggccttcagctgattgaatgaagccacctacatcatgaagggtaatctgttttactcaaaatccatcaattacaatcttaatatccaataccatcacagaaaccgctaaaataatgtttggtcaaatatcttggcactgtgacccagccatgtcgacacatgagattaaccattacactcccttatatggcaatgattttgtaatatttttggcagagggaatagaaagataattccatctttagcacagtcaatcagacatttaaaaaatatttgatagtttagaaatgctgatttcaactatacgacttgttattgataatgtttaatttttaggattgttatcacatatgggagaactatcacgtaataggtacaatatacccatagtagatacctaataggtatcatatacgagcactaataatttaggacattaattttgagtttgtgtgtgagagaaataagtttttgatgtgatgatattatacaggttttgatgtgatgatattaatcagtttattgatattatttttataatggcctacgagttttgggaaggctgttattttatgtcaaatgagctaaaagtttaaatctttttctaatatgttcatatgatttacgtttctttaggagctaaattatagaatctaagaatctcttcaatacttcaatttgaaacatctcttgttataaagtattgttttggaaatgatctgaaaattcccttctatttcctttttgatctcagaataatttctattggtttcatggccaattttttgctattttatatccccat

SEQ ID NO: 76148 - DNA, 889 bp, Homo sapiens
ttgggaccaaaactataaccacagggatgatcaatgccatcgcccstatagactcatacctaagacatcagtgatcaccaccaagacatgaagagttgagtcaacagcatatgtgccacctgctctgatcaaagagctgaaggtcacgttcagtatcacatagacactgccaaacttaaaactttcaataagaaacttgagatgttactcaggttgttgatgacagaaaagtctgaggtgggaggcccactcagtgctgtcgtggcagagcttagagatgttgaaggtgccaggagcaaacccaaggcagtgcagattccatcaggcagtgccggctccttgttacaaaagcttctgaatggtgcttggtaaacacgtttgcctttggcgaccctcttaattcccttgccatagtcatctttaaaagctacaagtaggactataaccatcagagcacttaattagtgactatatgtagacagattatgaaggagtcattggaaggacatttagccaaacagctacttctgtattaagggtgcctgaaagatttgggggcatttctccttttttggtctgtaagtctaaaccaaatattgtcttatgaattatttgcaatttaagaaaaatgacagatatttaatagacatgaaattatttcattattactgaatatttccttctcttttcaaaattaaaattatgaagttgaccagaaacaggaaataatgccatcagtgtaggtggtaggtgatcctaacctcaatgtggacttggtcttttgggtcatttttcaacctgatgaaatctaaaaaggaaattcttgggcagtttgacgtttttctttcttttgatataatgtgatgtttataatccattctagttagaa

SEQ ID NO: 76149 - DNA, 889 bp, Homo sapiens
ttgggaccaaaactataaccacagggatgatcaatgccatcgcccgtatagactcatacctaagamatcagtgatcaccaccaagacatgaagagttgagtcaacagcatatgtgccacctgctctgatcaaagagctgaaggtcacgttcagtatcacatagacactgccaaacttaaaactttcaataagaaacttgagatgttactcaggttgttgatgacagaaaagtctgaggtgggaggcccactcagtgctgtcgtggcagagcttagagatgttgaaggtgccaggagcaaacccaaggcagtgcagattccatcaggcagtgccggctccttgttacaaaagcttctgaatggtgcttggtaaacacgtttgcctttggcgaccctcttaattcccttgccatagtcatctttaaaagctacaagtaggactataaccatcagagcacttaattagtgactatatgtagacagattatgaaggagtcattggaaggacatttagccaaacagctacttctgtattaagggtgcctgaaagatttgggggcatttctccttttttggtctgtaagtctaaaccaaatattgtcttatgaattatttgcaatttaagaaaaatgacagatatttaatagacatgaaattatttcattattactgaatatttccttctcttttcaaaattaaaattatgaagttgaccagaaacaggaaataatgccatcagtgtaggtggtaggtgatcctaacctcaatgtggacttggtcttttgggtcatttttcaacctgatgaaatctaaaaaggaaattcttgggcagtttgacgtttttctttcttttgatataatgtgatgtttataatccattctagttagaa

SEQ ID NO: 76150 - DNA, 889 bp, Homo sapiens
ttgggaccaaaactataaccacagggatgatcaatgccatcgcccgtatagactcatacctaagacatcagtgatcaccaccaagacatgaagagttgagtcaacagcatatgtgccacctgctctgatcaaagagctgaaggtcacgttcagtatcacatagacactgccaaacttaaaactttcaataagaaacttgagatgttactcaggttgttgatgacagaaaagtctgaggtgggaggcccactcagtgctgtcgtggcagagcttagagatrttgaaggtgccaggagcaaacccaaggcagtgcagattccatcaggcagtgccggctccttgttacaaaagcttctgaatggtgcttggtaaacacgtttgcctttggcgaccctcttaattcccttgccatagtcatctttaaaagctacaagtaggactataaccatcagagcacttaattagtgactatatgtagacagattatgaaggagtcattggaaggacatttagccaaacagctacttctgtattaagggtgcctgaaagatttgggggcatttctccttttttggtctgtaagtctaaaccaaatattgtcttatgaattatttgcaatttaagaaaaatgacagatatttaatagacatgaaattatttcattattactgaatatttccttctcttttcaaaattaaaattatgaagttgaccagaaacaggaaataatgccatcagtgtaggtggtaggtgatcctaacctcaatgtggacttggtcttttgggtcatttttcaacctgatgaaatctaaaaaggaaattcttgggcagtttgacgtttttctttcttttgatataatgtgatgtttataatccattctagttagaa

SEQ ID NO: 76151 - DNA, 710 bp, Homo sapiens
tgattcactttgaccagtgcactcctgggagagtgggggcttctcctcctcagcaccaagcctacctcttgtggggccttctctggcagttgtacgaggtccctcaactatgctctacctctaggcctggctactccccgtatctccctttatgatgtcatcttccctcttctcaaaggcactaaccttgctaaataataattacaataatgcttattaacattgatcatctcttatgtctaggcactctgctaagtaacattgtattttctcagataatagcaatgaaacctagtgaacttctcatggtacaattcagaaacgcccagggtcgcacagctagtaggtgccaycagaaatcaaggtctctctgtgtcaatttgtgcttgtactactgggcaactacctgttgcaatgggaccccatatttttatctgtaatctaagattctttttacactgctgtacggatacacaaatgactcagacaaacactcatcaaaaagggaaataacctactacattttaatttttgcattctctccaaagcctcttcagcccaaagtctcagaaaaaattaatttaaaaaaattgtagaactttattactctagctagtggtccttctgttaatcttttcaaaaaacaagctcctggatttttttaagggttttcatgtctctatctccttcagttgtgctctgatcttagt

SEQ ID NO: 76152 - DNA, 1694 bp, Homo sapiens
gaatttaggaaaccaaaattggataggtaattgtgagagtttaaagagagtaaagtaaaaaattagggacaattatctggctaattcagaaacaaaaacccacctttaccctactgtattcttctccagggaaaaggargtgttttaaagctggattgtattagctggcctatttccattttaaaacttactgtatcattttaagagtcagaaagtctggctttaaaatctggttctgccacttaagttattttacccactctgagcctcagattcctaatcttgtaaaatgagtttaacaaaataatcctgaaaaaatgttctgaggattaaaaacaacaataacaacaacaaaagcaacaaactcatggtatcactacatatcctcttcattctattcttgtcaacaaatcgtcaatttcccaaatcatggttacctctgtaagagtaaaacaaatttgagaactgagagatttaaagataatggtcgtgttcaaaaacaaatcctttttaacctaaaggatccatactgtttaaataaagttattttgttttttagatttttttaaatcatagtttattctcacagaggcagagaaaaatgccaggtccaacagttttcctgagaaatggtcaccagaagacagtcaaatgaggccattggaccccgtctcccattttcttcctgagcattttgttttcccctgtgtctcactgtgaccactactcttccccattgtgtatagagtccatgagagaaagcagaccccaatggggatgggtacagggaaagtgttctgtgagggtgggatgggaacaaacatttcagaaagaactttgtgtcttccctctgggctgtgtctatagtttcaaaatgtggtaggaatgaaggggaaaccccaaatattcagccctcctcattagctttcacctaaagtctaataattacatggaaaaaattgagggctgagctatccagataatctccctagttcccccacttccccttgaaagtgttgcgtgacctttattgacagggatgagggtggagtagaaaatggagttagaagtgatatatattggttttagtttctgtgaaattctcagagcctaaagaaacagaactggtaatattggtttggatgacaggcatctagggtttagggttatggttggtgcaagggatgtagacagtttccttcagctgtgaaggaatggagagggaaggcggttggaacagaatttgttctgttttggtgggactgcagtgtggaccccctacttccagagacacctgattccctatatctcaggttcaggaccccccaccttgggtgttaggtggttcataacattggaccccaattcctagagtgtggacctccaagcaggctggcttcacctggacacttatcttctatctgtgcctcacatccctaacgtagggccagtgtccaaaggcgtgaagactcatctggtggtctgggcccactgaagctgaccccctgcctgccatgccctccctgaaatatacaacagaatgtcttcctctggcaacggggcagaatataaactaataaggacccaagcgatctaactgcaggaaggagggatttttctgaatatctgaaattctgcaagcatggcaggccaggctggaatttggagggtcccttctaaatatacaaggatcc

SEQ ID NO: 76153 - DNA, 1694 bp, Homo sapiens
gaatttaggaaaccaaaattggataggtaattgtgagagtttaaagagagtaaagtaaaaaattagggacaattatctggctaattcagaaacaaaaacccacctttaccctactgtattcttctccagggaaaaggaggtgttttaaagctggattgtattagctggcctatttccattttaaaacttactgtatcattttaagagtcagaaagtctggctttaaaatctggttctgccacttaagttattttacccactctgagcctcagattcctratcttgtaaaatgagtttaacaaaataatcctgaaaaaatgttctgaggattaaaaacaacaataacaacaacaaaagcaacaaactcatggtatcactacatatcctcttcattctattcttgtcaacaaatcgtcaatttcccaaatcatggttacctctgtaagagtaaaacaaatttgagaactgagagatttaaagataatggtcgtgttcaaaaacaaatcctttttaacctaaaggatccatactgtttaaataaagttattttgttttttagatttttttaaatcatagtttattctcacagaggcagagaaaaatgccaggtccaacagttttcctgagaaatggtcaccagaagacagtcaaatgaggccattggaccccgtctcccattttcttcctgagcattttgttttcccctgtgtctcactgtgaccactactcttccccattgtgtatagagtccatgagagaaagcagaccccaatggggatgggtacagggaaagtgttctgtgagggtgggatgggaacaaacatttcagaaagaactttgtgtcttccctctgggctgtgtctatagtttcaaaatgtggtaggaatgaaggggaaaccccaaatattcagccctcctcattagctttcacctaaagtctaataattacatggaaaaaattgagggctgagctatccagataatctccctagttcccccacttccccttgaaagtgttgcgtgacctttattgacagggatgagggtggagtagaaaatggagttagaagtgatatatattggttttagtttctgtgaaattctcagagcctaaagaaacagaactggtaatattggtttggatgacaggcatctagggtttagggttatggttggtgcaagggatgtagacagtttccttcagctgtgaaggaatggagagggaaggcggttggaacagaatttgttctgttttggtgggactgcagtgtggaccccctacttccagagacacctgattccctatatctcaggttcaggaccccccaccttgggtgttaggtggttcataacattggaccccaattcctagagtgtggacctccaagcaggctggcttcacctggacacttatcttctatctgtgcctcacatccctaacgtagggccagtgtccaaaggcgtgaagactcatctggtggtctgggcccactgaagctgaccccctgcctgccatgccctccctgaaatatacaacagaatgtcttcctctggcaacggggcagaatataaactaataaggacccaagcgatctaactgcaggaaggagggatttttctgaatatctgaaattctgcaagcatggcaggccaggctggaatttggagggtcccttctaaatatacaaggatcc

SEQ ID NO: 76154 - DNA, 1694 bp, Homo sapiens
gaatttaggaaaccaaaattggataggtaattgtgagagtttaaagagagtaaagtaaaaaattagggacaattatctggctaattcagaaacaaaaacccacctttaccctactgtattcttctccagggaaaaggaggtgttttaaagctggattgtattagctggcctatttccattttaaaacttactgtatcattttaagagtcagaaagtctggctttaaaatctggttctgccacttaagttattttacccactctgagcctcagattcctaatcttgtaaaatgagtttaacaaaataatcctgaaaaaatgttctgaggattaaaaacaacaataacaacaacaaaagcaacaaactcatggtatcactacrtatcctcttcattctattcttgtcaacaaatcgtcaatttcccaaatcatggttacctctgtaagagtaaaacaaatttgagaactgagagatttaaagataatggtcgtgttcaaaaacaaatcctttttaacctaaaggatccatactgtttaaataaagttattttgttttttagatttttttaaatcatagtttattctcacagaggcagagaaaaatgccaggtccaacagttttcctgagaaatggtcaccagaagacagtcaaatgaggccattggaccccgtctcccattttcttcctgagcattttgttttcccctgtgtctcactgtgaccactactcttccccattgtgtatagagtccatgagagaaagcagaccccaatggggatgggtacagggaaagtgttctgtgagggtgggatgggaacaaacatttcagaaagaactttgtgtcttccctctgggctgtgtctatagtttcaaaatgtggtaggaatgaaggggaaaccccaaatattcagccctcctcattagctttcacctaaagtctaataattacatggaaaaaattgagggctgagctatccagataatctccctagttcccccacttccccttgaaagtgttgcgtgacctttattgacagggatgagggtggagtagaaaatggagttagaagtgatatatattggttttagtttctgtgaaattctcagagcctaaagaaacagaactggtaatattggtttggatgacaggcatctagggtttagggttatggttggtgcaagggatgtagacagtttccttcagctgtgaaggaatggagagggaaggcggttggaacagaatttgttctgttttggtgggactgcagtgtggaccccctacttccagagacacctgattccctatatctcaggttcaggaccccccaccttgggtgttaggtggttcataacattggaccccaattcctagagtgtggacctccaagcaggctggcttcacctggacacttatcttctatctgtgcctcacatccctaacgtagggccagtgtccaaaggcgtgaagactcatctggtggtctgggcccactgaagctgaccccctgcctgccatgccctccctgaaatatacaacagaatgtcttcctctggcaacggggcagaatataaactaataaggacccaagcgatctaactgcaggaaggagggatttttctgaatatctgaaattctgcaagcatggcaggccaggctggaatttggagggtcccttctaaatatacaaggatcc

SEQ ID NO: 76155 - DNA, 874 bp, Homo sapiens
tgccttgtgctgagaaatcaggattccggtctagggagtccagcatttgagtctgttctccctgtaagcagagctcagtgggagagcgttctcccttctgatacctacagaggtctttgggggtggggggcccagggcagccacagatgtctcccgacagtgcccagctccccgaccagctccacrtgccaagctcagggatgttttccttggaaagcatagacccaaagacctcctaagggtgggcctgaaattcctctgcatacggaattggaagaagaggtaggtggtttaaaaaaaaatactgagtgatattagagagtgtagcaaataacattcttgtgaatattatgaaattacttagtataacacaactcaataccagggtatgacctacactaggcaccctgacttctgattgccagaattaaggatggtgcaattttagtacatggtattatgcatcacctaccctgtattggctgtaatatttttatataatatgatttcttttattaactacctaatatgaaatatacaataatagatttctagaaagacaattcacatgttcataatacagcaatgtattttagagagatggccctttaattctctatctcaccaaaacacaaagcttcttaggagattggggtccagcaggaattcctggggcagggaagccaatgggctatgccaaggggctaaggggtaagggatcaggtgcccaccaaacccactgtggattgggggcacaggcccagagcaatgtgcaatgggtttagtgtgaagaggtagaagagaaggagctgttctatgtatgaatgtggtgtggagtaggggtgaaggattggagagaagctgagaaatatct

SEQ ID NO: 76156 - DNA, 874 bp, Homo sapiens
tgccttgtgctgagaaatcaggattccggtctagggagtccagcatttgagtctgttctccctgtaagcagagctcagtgggagagcgttctcccttctgatacctacagaggtctttgggggtggggggcccagggcagccacagatgtctcccgacagtgcccagctccccgaccagctccacgtgccaagctcagggatgttttccttggaaagcatagacccaaagacctcctaagggtgggcctgaaattcctctgcatacggaattggaagaagaggtaggtggtttaaaaaaaaatactgagtgatattagagagtgtagcaaataacattcttgtgaatattatgaaattacttagtataacacaactcaataccagggtatgacctacactaggcaccctgacttctgattgccagaattaaggatggtgcaattttagtacatggtattatgcatcacctaccctgtattggctgtaatatttttatataatatgatttcttttattaactacctaatatgaaatatacaataatagatttctagaaagacaattcacatgttcataatacagcaatgtattttagagagatggccctttaattctctatctcaccaaaacacaaagcttcttaggagattggggtccagcaggaattcctggggcagggaagccaatgggctatgccaaggggctaaggggtaagggatcaggtgcccaccaaacccactgtggattgggggcacaggcccagagcaatgtgcaatgggtttagtgtgaagaggtagaagagaaggagctgttctatgtatgaatgtrgtgtggagtaggggtgaaggattggagagaagctgagaaatatct

SEQ ID NO: 76157 - DNA, 987 bp, Homo sapiens
tgcatggccccatacgatcacaattcaaatttgaccagaaggacctctgctgctctaagtgaatttatatgtcagattgtgatactattaacaagtaaatcctttgagataagtaattgtcatcaagacttaacaagccttttttaacttttctcttccaaacagcctaatgaccattataattgttaaagggggttaaaactgaccactgcaatgacaaattactcacctgaagctggcgggtgatattagaagcccaacattataaggtgcaggctgagtcaaactgctgtcrtcaccagaagcctccatcggaaggccaccgtactaaaaagaagtctactttgggatggcctaaaatgtgctagtcaccatgtcgaatcatgtcatctcaccaaatcctcactgtgacccttgagcaaagtctgccatagaattcccatttggcagatgagctaagtgaagtctagaaattcagagtcaacttttcagagccacacactgaacagaattttgcctacaacatgttgtttctaggatgtaaacaaaatgagatgtggatgtgtggatagagcacttttctcttgtccaattattctaccctatatctgaaagtctgggctctactctcatggtatcaagaaggcccctttcccctgaacaaccaatgggcttcacaatgaacaggaagtccactgaggggctccaacatcatcaagactcgcctggtgacatggcttaaagtctgatagctaactagatcaagaatctcctttttagaaggggtaggtgttacaacccagtaaagggaatacactttgatagcaactctccagtaagaggcttggcaaatcattgagaggaaaataaaataattcactttaggtgtatttggcatcggattagtgaagataatgattcagagtgtaggtgccagcgtgcaagcttccgggcttcaaattccagccatattatttactaaatgca

SEQ ID NO: 76158 - DNA, 905 bp, Homo sapiens
aacctccctgagtccccatacttaaaaagtggaagataaaagacacgcctcaggaaactgttttgagtatgaaatgaagtgattcctgaaagaaatcaagcacacagcaggccctcaataatgtctgctcctcctttactgtatctcccagaaagggagggcttagctgctgagacgacttgcttagcacagctgcccctgccaggtagtgactttatgccaccccaccattcatttcatccttccagtcatgtacactcactcactggtttctttcaaatcagtagtcacaaaatctgatgtctgcagtggccgatgagtaatgtaaatgagcaaggcaggccaggtgtaagacaatagggaatggtggaaactgtraaaaagttgaacacgtctcatcttaaaggaaaagaagaaatattaggctacttttgccagatagtgtcatctttccagagaaagcccaaatctgaatttttacacaatatcttaaatgttggccactaatttaaaatttaaagcctgtgcaatgctaacaaaatacacctataggccagatctaatctcaggagtttccagagtgtgatctcaggttcaaattttatataaatatccatgtctctcatgcttcagaagagggagcttctacttagggacttgtgaccatgtaaatggaaatgtttaatgtggcacaacgggagtcaaaaaaactcatacttattaagcaggctagagggaaactgattaagtattgccttgatgatgtgtggttttcatcacagacatgaatctccattgtccagttggtgggacgcagggtctaagaaaggcccttttttatgtactgaccccaggggcagagtttgaaagttacctttctgttacagtttacaaactgtttttat

SEQ ID NO: 76159 - DNA, 905 bp, Homo sapiens
aacctccctgagtccccatacttaaaaagtggaagataaaagacacgcctcaggaaactgttttgagtatgaaatgaagtgattcctgaaagaaatcaagcacacagcaggccctcaataatgtctgctcctcctttactgtatctcccagaaagggagggcttagctgctgagacgacttgcttagcacagctgcccctgccaggtagtgactttatgccaccccaccattcatttcatccttccagtcatgtacactcactcactggtttctttcaaatcagtagtcacaaaatctgatgtctgcagtggccgatgagtaatgtaaatgagcaaggcaggccaggtgtaagacaatagggaatggtggaaactgtaaaaaagttgaacacgtctcatcttaaaggaaaagaagaaatattagrctacttttgccagatagtgtcatctttccagagaaagcccaaatctgaatttttacacaatatcttaaatgttggccactaatttaaaatttaaagcctgtgcaatgctaacaaaatacacctataggccagatctaatctcaggagtttccagagtgtgatctcaggttcaaattttatataaatatccatgtctctcatgcttcagaagagggagcttctacttagggacttgtgaccatgtaaatggaaatgtttaatgtggcacaacgggagtcaaaaaaactcatacttattaagcaggctagagggaaactgattaagtattgccttgatgatgtgtggttttcatcacagacatgaatctccattgtccagttggtgggacgcagggtctaagaaaggcccttttttatgtactgaccccaggggcagagtttgaaagttacctttctgttacagtttacaaactgtttttat

SEQ ID NO: 76160 - DNA, 905 bp, Homo sapiens
aacctccctgagtccccatacttaaaaagtggaagataaaagacacgcctcaggaaactgttttgagtatgaaatgaagtgattcctgaaagaaatcaagcacacagcaggccctcaataatgtctgctcctcctttactgtatctcccagaaagggagggcttagctgctgagacgacttgcttagcacagctgcccctgccaggtagtgactttatgccaccccaccattcatttcatccttccagtcatgtacactcactcactggtttctttcaaatcagtagtcacaaaatctgatgtctgcagtggccgatgagtaatgtaaatgagcaaggcaggccaggtgtaagacaatagggaatggtggaaactgtaaaaaagttgaacacgtctcatcttaaaggaaaagaagaaatattaggctacttttgccagatagtgtcatctttccagagaaagcccaaatctgaatttttacacaatatcttaaatgttggccactaatttaaaatttaaagcctgtgcaatgctaacaaaatacacctataggccagatctaatctcaggagtttccagagtgtgatctcaggttcaaattttatataaatatccatgtctctcatgcttcagaagagggagcttctacttagggacttgtgaccatgtaaatggaaatgtttaatgtggcacaacgggagtcaaaaaaactcatacttattaagcaggctagagggaaactgattaagtattgccttgatgatgtgtggttttcatcacagacatgaatctccattgtccagttggtgggacgcagggtctaagaaaggcccttttttatgtactgaccccaggggcagrgtttgaaagttacctttctgttacagtttacaaactgtttttat

SEQ ID NO: 76161 - DNA, 2176 bp, Homo sapiens
tgcatttggaaatctgcatagcatgtaagattgtggctggatcattcgcaaagtttgtatttcattaagctttgatagataagcctgttgtaatttgaaaaattaagatcaatctccgcattaaaaatccccaaagcatttccactgagtatgaatttccttatcacagaactttctataagatatttacagattttgacaagtctggctatgaattctacaataaaactcttagttaataatggcaacgatttaaaatctaaaattttttttcaagagttgtttatataccttttcttctttcaaaggtatttctatgctgttaaaataattgtactttttgtctacatgaactatcttaagaatttctatgtcaataataaaggaatgtgtctgataaccaaaaaaaaaaaaaaaaaagtagagtttggattggatgacatccaaggacttctttgacttttgattctagaaactagaattccaagggtgctattcacatcggtagcagccagctctctagatgcagagttaaggccaaccaaattcattctgcaagaattgaggatgccaacactgacaattaagttcctaaatgtatccattgaggtggtttgattacaaatgtcaaaactcaaatctgactaactacaggtaaaagggaaataattataaggtcctggtgggggctcccagacccaaagggaaatctacaaaagcagaaacctaaaaggacaggaatcagggcatttggaggatctaggtagctagtcttcaggacattgcaagaggacccactggctccaaccatttttcttctgctctttaaccactgggctcaagagcctggggggatagtccattgtttatatagtggattgatattcaatatccattctgccctcatctagagtcccttcagtcatcgttaaggccagaaagctaaacattatattccatagtctagtttgcagacagtgttccagaaggtacttaataatattcagctagtcacatgtgktcatgtgagatcagaaaggcagaagtgaggtggaggccacatttgtgctgcttctgcaatttctggtgcagaacataaatggcaaggtggttgatttttctgcaacagctttagctgaaatcccagtagctagccacttgttagatattgagaggatggcatgggtcatccattttgttggtgcagtcccagcaggcatgtcatggctctggggccaacaattgtggccatggtttcttatctgtcagtcacagctaacatgcatatttctggtaccaatgattacaacgacaatcagaagttggcatcgtggttcccacttccgtggcttcctgatgttaacagttctctttgcagactgttacttgttatataacaattatttttttctgcaaataattactggatactccattctctgtaataaatccccttctgcttaaacaggtaaatagttccattttagtccaattggccatcatggctcatatgcctaccccttggtggggctgattggcagccccaccaagattggcaaccccatcaagtacacacaacggaagagggaaaatttcccagaagaaaataagatgctcttatcaaaataaaagggaaaattgactgtgagtggcagaaaataacaaccaaccatcctgtaaataaatacaaagataattaatcaacatcattttcagggtgtcttgtaggcccattacacaaagcaaagttttctgaagtcctgaaatattacaatacattatgaaagcttaactaccctaaggcaaggagtcagggaatgcttcagaaaaagacatctgatctcagtctgaaggatcaaagaaatatgaaggtctttctaggtagtggaaaattcatgtcttaattggcactctgtgtctgtatgtgtgtgtgcacacatgctcacgcacatgtgtgttgagtatctaaataaagattgaagagtggattaattagtaaagaggaaagtttcattttgagcatttctctcactagcagttgtacatttcatagtaggaaggaaccataaaaaggcattgtaaacaatcaagacactgtagattcaggttagctagccagagattccaagagcccatacccagaggacacacagaagcaggcagttgcctaccacta

SEQ ID NO: 76162 - DNA, 634 bp, Homo sapiens
caatgcgcccaagaggcctccttcagccttcttcctgtacttctctgagtatggcccaaaaatcaaaggagaacgtcctggcctgtcctttggtgatgttgcraagaagctgggagagatgtggaataacactgctgcagatgacaagcagccttatgaaaagaggtcggcgaagctgaaagaaaaatacgaaaaggatattgctgcatatcgagctaaaggaaagcatgatgctgcaaacaatggagttgtcaaggctgcaaaaagcaagaaaaagaaggaagaggaggaaaatgaggaagatgaagaggatgaggaggaggagaaagatgaagatgaagatgaagaagatgatgaagatgaagaagatggtgatgatgaacaagttggttctagtgcagtttttcttttgtctataaagcatttaatccccctgtacacaactcactccttttaaagacaaaaactgaaatgtaagggtgtgtaagatttgtttttaaattgtacagtgtctttttttgtatagttaacacactaccgaatgtgtctttagatagccctgtcctggtggtattttcaataacaactaaccttgcctgttatagtatgcgggttgcaaattggcatggaaatt

SEQ ID NO: 76163 - DNA, 634 bp, Homo sapiens
caatgcgcccaagaggcctccttcagccttcttcctgtacttctctgagtatggcccaaaaatcaaaggagaacgtcctggcctgtcctttggtgatgttgcgaagaagctgggagagatgtggaataacactgctgcagatgacaagcagccttatgaaaagaggtcggcgaagctgaaagaaaaatacgaaaaggatattgctgcatatcgagctaaaggaaagcatgatgctgcaaacaatggagttgtcaaggctgcaaaaagcaagaaaaagaaggaagaggaggaaaatgaggaagatgaagaggatgaggaggaggagaaagatgaagatgaagatgaagaagatgatgaagatgaagaagatggtgatgatgaacaagttggttctagtgcagtttttcttttgtctataaagcatttaatccccctgtacacaactcactccttttaaagacaaaaactgaaatgtaagggtgtgtaagatttgtttttaaaytgtacagtgtctttttttgtatagttaacacactaccgaatgtgtctttagatagccctgtcctggtggtattttcaataacaactaaccttgcctgttatagtatgcgggttgcaaattggcatggaaatt

SEQ ID NO: 76164 - DNA, 572 bp, Homo sapiens
cagcctcatcataagtaaggtatgattgatgagcacatactctgctctgcctctgggagccccactaaacagcagcacagagtaatggagtagtgctggtgactcatgctctgcccttaatctcagacacatactgctggcctcgcataagtgaccttggcaggcctgggtgatagaaagtggctttcgagaaaaatggcttattggtcttctggtcagtcaattagggtggcaggggatctcgtcagttgcatggatattacctcagtttgacaaatggctgcttgcttccacctggggcaggctcaggttgatgttgtgtgaaggcctggcatgttagtcagggtaagtctaggctgctataacaaagagaccccaaatgacagccacttaaactagataagagtttatttgtctttatgtcattgttaagagataagaggggctgggctggtaggcagcctgccattcttaacatgtagctctgacttgtaggtccatagtgrcagcttcagctttcatcctcccccagccaacaggaagggggggagacacatgcttaagctttttga

SEQ ID NO: 76165 - DNA, 640 bp, Homo sapiens
cttgagtccaggaggtcaaggccacaatgatcacaccactgcattccagcctgggtggcagggttaggcctcatcattcatttattcactcataaatagataagtttcaacatactaaggccttttgtaaaatcagaagcatttaaaacaagtcttaacaaagggattatttttaagaaaataaggcttttaaggagaggcattccacatgcctcttttaagttcagcagttggttctttgtcaaaacaagacatayacgaggcagcttagcatagtgttgacaagcatggagcatagtattgagaagcatgatagctatggagtcagtgcctaggttcaaatcctagctccagctcttacttgctgtatgatcttagtagctttccttaacttctgtctccctccatgaacgtgccaatttatgaattaataaagaatttagatcagtacctggcacatagaaaactattaggtgatagaatcatcattatccattcaaggactcccaaagaatatatggcacctacattagatcagtttaagaattgtcacgttcatcagatagtaattattgccctagtacatgaatgcgtgagaaaattatgatgggcattaatatttaaagtggcaaaatctgtt

SEQ ID NO: 76166 - DNA, 761 bp, Homo sapiens
aatacagaaatgtttgattacatcctaactagagacataatgaagtactcagaagtctacacctacacatagaatcatggatatacttacacatagaaccacatgctacacctatgggtagaatcatggatatacctacacatagaaccacgtgccatacctatgtgtagaatcatggatatacctacacagagaaccacatgctacacctatgcatagaatcatggatatacttacacatagaaccacatgctatacctatgtgtagaatcatggatatacctacacatagaaccacgtgctatacctgtgcataaaatgatggatatacttasacatagaaccacatgctacacctatgcatagaatcatggatatacttacatatagaaccacatactgtacctatgtgtagaatcatggatatacttacacatagaaccacatactatacctatgcgcagaatcatggatatacttacacatagaactgcatgctttacctacgcatagaatcatggatgtacttacacacagaatcacatactctacctatgcatagaatatgcattgatatactgatgcatatgtgattctatgtctatgactgtgaccagtagcactccccatgcacatgtatacaggagcattatattgctgattcagataccatgagcaatgttgattttccaaaatgtgttccaaaagagtttaaacaactcttgacttaaaaaaaaataaataattcagcaatcctgctt

SEQ ID NO: 76167 - DNA, 823 bp, Homo sapiens
ataaaccctgcatcttgagcactccccttttcaaagcagattatttcccataagtctacaaattacacaccaagggatggagaaacagctgaacctcaggcactaatatatggtgctcaggtgtggatcagaaataaaggaaaagatcacagaccacctacatcaggatatcgcaaaagagttccattcttagtgtcagggcctgagggaggcagttggaggtccctggagaagaggagaaaatcattgtgtccccagtgggctcaggagccacctctgctgggaaactggggtgagaaaatgtgtagacaaagggcgtgcactgtgcctgtctctctaccttcactcagagtggctctgcttttccctggttcttgtatgcgacttcagttgaaaaccaatgtttggtactaaaacataccttaaaactccagactaagtccttattttgcagaagaagctgataagtgacattttcaagatcacattgctagttaaaaataggattggttaagtctgctaaccctgagcacctctgcagaaatctccactcgagattatatctgtccaatccagcgctgacaaccagacataactggctgctgatttctaccctaaagctgggatagatttgctcagaaatccaggggaaattgaggcatggggaggaagtacacatgtccctcctcaaagccactgccttgaaaagcrcacatcctagacccttctctactgcctctcctgcttgaaccctatctccactccatcccattgggaaacagttcactgctcatggtagccttgttgtgtctagggttgaggg

SEQ ID NO: 76168 - DNA, 823 bp, Homo sapiens
ataaaccctgcatcttgagcactccccttttcaaagcagattatttcccataagtctacaaattacacaccaagggatggagaaacagctgaacctcaggcactaatatatggtgctcaggtgtggatcagaaataaaggaaaagatcacagaccacctacatcaggatatcgcaaaagagttccattcttagtgtcagggcctgagggaggcagttggaggtccctggagaagaggagaaaatcattgtgtccccagtgggctcaggagccacctctgctgggaaactggggtgagaaaatgtgtagacaaagggcgtgcactgtgcctgtctctctaccttcactcagagtggctctgcttttccctggttcttgtatgcgacttcagttgaaaaccaatgtttggtactaaaacataccttaaaactccagactaagtccttattttgcagaagaagctgataagtgacattttcaagatcacattgctagttaaaaataggattggttaagtctgctaaccctgagcacctctgcagaaatctccactcgagattatatctgtccaatccagcgctgacaaccagacataactggctgctgatttctaccctaaagctgggatagatttgctcagaaatccaggggaaattgaggcatggggaggaagtacacatgtccctcctcaaagccactgccttgaaaagcgcacatcctagacccttctctactgcctctcctgcttgaaccctatctccactccatcccattgggaaacagttcactgctcatggtagccttgytgtgtctagggttgaggg

SEQ ID NO: 76169 - DNA, 837 bp, Homo sapiens
cctttagtaaaagcattcattctttttaaggtacccattaaaagggaggggaaaacccagatcccaaaaccaaatcttgcaaaataagttagccacaggattactttcgaacagctctcttaccctattctacctgtcatattctgccagaatgttctccaggctctccacggactctacagtttacaaaaattcatatctcttcaggaaaatatctgctgcttgaaatgaggttcacatgatttgaagcaaattagaatattccatgatgaggaatacataacattttggtcaaaatcgcctggcctaagcccatctacatattctcctctttcatcctcataacctgaatggaaataaatgtcacacactgactcacagacttgcacaaccatgcacacactatatcctccactttaagacataagagattaacttgttcaattttataacctcttggtttcctttctttgtttcaagtgcctctcttttttcaaaatcatgtgtatttgggcaactggtttgccaaaaggtatggatggctaaaaacaatttacttattgcagacacaacctcttaccttgtcctgataactaattagccaaaagagtgagggatgaaaaaggagaaaaaaaatagttccaataatatgctagtttacctcatacttctytgtcattttgcaacagaccatgagaagacatcactacttaatgaaaaaatattcaattgtctaaatctgagttttcttcctgaaaacagtaaattttagctagataggaaaaagtttcttttaaagaatataccctgtttagaggtggataaagtgaaagagtt

SEQ ID NO: 76170 - DNA, 1339 bp, Homo sapiens
acagaaatacctacaggtttcctctgatgccaggggaacatagctgattcctactgaaaacaaaacaaaaacaaaaaacaaacaaaaagcttggttcttggaggactggcaggttaccgacgtgcataccccatggccagaaatgaagacctgctattactaaggagaagtgaaaagtctaggaatagttgagaaagccatgcttgacctgaataattcattaagtaactatgagtcatcgttctggatatggcatcttattagattttgtgagacaaaccacacataggcattcccttctctctcaagcagattcagttatgatgtgtgcataaagcaatcacatgggtgggacaaggaatagatacatgggctcaagatgaatgctgaggaaggaagatacasctggaatctaagaagtctaggaatatttttcagaggaagacactcctttcttgaagaatgaatggggtactgacaaggaaagagagcattccagttgaatgagatcaaataagcaaagttgtcgcttattctttggttgtatatagtcagacactttcgcaaagctaaagtccccaatcctgtgccttgacaagtatcagtgggtcttcataattgattcctggaacaaaagccatctgcacaaaggttctttccaagaatcaacctacttatctatgaatctttcttccatgaaaccagactaggaaaggtgagcagaaactatcatagaaaatatttggatcctcagaagaatgactgtctctgtttcagaaaaagattcagggccagtgacattgatgcaaaaaaaatgatggaagcaccagctctgatctgaaccttgaaaaggagattccctggaggacggtgtatgccaattatttctgcctggcagaggagagcaagaaaggaggcaagtgccaggtggggtgagaaatttactgtagccagagttcacctacaggctgtctaattcctttaacctgggctggactgaagggctgagaagaacattctcattagggtatgaaatggatcatttccagtggccagatggttccccataaatacattaatgactttataggcatgtctgcttggaaaaggaacaatttaactaccacaacgtaggaagtgctccttttggattctgggtaaactaaatcaaagaccaagaaattacaaaaaaaaaaaaaaagtctttgttaaattactccctttcgcacacctcattctttttatatggcaagctcaataaacaagtgtaatatttgttttcaaattaaaaaaataaaattcatctcaaccttcaaaagtcattcaaccatgaatggtc

SEQ ID NO: 76171 - DNA, 1781 bp, Homo sapiens
tgcattccaattcagatatgcctttttttctaatggttcttttaaaagatgcctacttttttaaaaggaaagaatgtaaattctaacataaataagttatcctgacactaatgtccatgatgaaagtggagaaatttctacaggtgaatgaccctcaccctggctctggaacctgggccacacatgctcatcagactcatctctctgcacgctggtttctcagtgccatctgcagtgaccctgtgttgctcaaccagaggctggccagcctgtgggcctcagcaaagaccactacacctccatgatgccatttcacttgcagaccacttccctttctttacctgagcagtccccaatttttaaatttaatcactcaagaacatagatcaacctgatcctgagctctagtgaggcagtaactcttcaaaaaatgtttgttctgcctttcttagtagatgactgctatggtgagaaaatcacctaaaatctgcaaatcctcaagttcccttaagtaaaaaatggccatgtttatcgttatactagttgttttctatttttccaatttttaaagtctctgctatctataactaaatttaaacttgtatttaataaaacattttatacaattatttctaacaaaacgctctttaaaaatttttaatgttgatcatctcaatttattctcaacagtttattcttatttgggaaaccaggaaggaaagtgagaaataggttaagcaactgttaaaacattttattaaaatttttattaaggcatttttcttttttcttttttttgagatggagtctcgctccgtcgcccaggtggagtgcagtggcgtgatcgtggctcactgcaacctccatctcctgggttcaagcagttctcctgtctcagcctcccaagtagctgggactacaggcgcctgccaccacgcatgtctaatttttgtatcttcagtagagacagggtttcaccatgttggtcagactggtctcgaactcccgacctcaggtgatccacccaccttggcttcccaaagtgctgggattacaggtgtgagccmccatgcccagccagcatttttcttctccgtgaaaaaaaattaagctccatcttattatttaaatgcatttaaatacatttgaaagttcttgcacatctcaaggcgacttcagatatttgcaactaagactgtaacatttaaagcatggtgaaaatgtatttgaattctctattatccttaggcttaactgttcccctgaaccatcaatgtccatcttttcttgtatggtatccaaatggaacagcaaccaaatgaagcagatgtggctgatgcggggagataacagtatatagtggaaatccctccctcaaaatctcttaaaaaataataggcagagaggtgttgacacatgacatctattctcatgttgacatttgacaaagtaattacatttcacatgcctaatgagatgattttaaaacatctgaattgtactaaatatatatttttagaaaatatattactgtcacatatatttcaggagtaggtgataatgatacaaaactaaatataccataactaaaaaagaaacaaaaaacaaaaaacttctagtcaactaacctggatattcctggactccttacaactacctcaaaaacaagactaaaaacattcaactcattacttttccttccacaactgcttcctcttactgcttaaagtcagtattcctcacctccgtggcataccaaccaatccagctattcaaatttt

SEQ ID NO: 76172 - DNA, 672 bp, Homo sapiens
tagagagacatgttataggctctgaatctgaaaaggaacttcagggaattgggtagtgtgttaattggtatctttttacgacatacatacttggctttcctttattgctgctcagttggtgctgtcatagagtatatgttttcttttaattgcagttaatgatattttactcaggccaataaaaagggagatgataggttatatttattatcttaagccctctttttggccagtattctgagtcaccataaatcactgtcactgttattagagagtgttttcatttactaaagagcgtttcagtcaggcgcggtggctcacacctttaatgcgagcactttaggaggctgtggcaggaggatagcgagaggccaggagttcagcctaggcaacatagcaagaccctgtctctacawaaaaattaaaaattagctgggtgtggtagcatgtatgtgtagtcccagttacttcggaggctgaggtaggaggattgcttgagcccagcagtgagctatgatcatgccactgtactcctctctgggtgacagagcaagattttatctctaaaaaataaagattcttctgttactcattgattacgctttgaaagcaaaatgtttctcagattttagtttgatcattaggatttcaggatctggtaaatattacatt

SEQ ID NO: 76173 - DNA, 582 bp, Homo sapiens
gggacgcaggagaggatctcggagaagaagaggccaccctgaagcacacagtttacgtcaaaagtttacatggagaaggcggttccgttctgaagcgcggtctgctgtccttttgggcgcgaggcatgtggtgttcgctgtgaagcctcctgggcctgttggtcctccgatttcatcctcgggacataatgcttaccaacagtacttgcactgagttgacactcgtgcactcttgactccagatgtttttcaaaatgtatgttcacaccaataattgcctacttcagaggctaatamgacaaaaccaataaaactgagtgatggtgtctgtattgggaaaaaaaaaagtgttccatgttctttctcacctacgtttctgcccacctttccctctaaaagttccttccccatccctgccctagccccccaatttctgcattagtcatgactaagccttctttaagcttaaggacataaaatatacagtacctaatacagtgcctgacctatagcagagggttaaaaatgggctgagctggcttaggtctcttctttgtcctctcaatgactcctatttgctta

SEQ ID NO: 76174 - DNA, 1126 bp, Homo sapiens
ctagtactttgggaggccaaggcgggtagatcacctgaggtcaggagttcactaccagcctgattaacatggtgaaaccccatctctgctaaatacaaaaatattagctgggcgtggtggcgcgtgcctgtaatccgagctacttggggggctgacacagaagaatcgcttgtaactgggaggcggaggttgcagtgagccgagatcatgccattgcacattgcactccagcctgggtacacaagagcgaaactccgtctcaaaaaaaaaaaaaaaaaaaaagtgttagagtgggggcagaaccctccaaaaagttaaaagtgtcaaaaacacttatcatgtcactaataattgcaacacatccacaaccacagcataacartgtctcatatgtaaatgaagtatttgcagttattctatttttttgccaccctgcagaacagggaccctgggtcactatgctattttctatcccgaccacaccttaaggaggcaaaacaaaaagttttcccaggttccagtgaacatgtgatcatttctttttcttggcactaccttgaagatacatacatattttttgttttgcttaaactgcaacttgtatatgtgtcaaatgcaacccaatccattcagcttaaaagtcctattgaaagatttcaccataggagtgtgtttcccttgtggtaacaaaacataattttgtatcagcatttaatagtaaacctacttaggattcattcgggagccaccaggtgaccaaagtactctgctaacaagttttcctgcattagcatatgtaattttcccagcagcattatgaagacaatgctggtactgtttaaaacaaacaaacaaacaacaacaacaacaaaaaaacactgaccagaaggattaagaaactaggaatagcaaggttaactcgtttgttgagagtttttagctatttgtgccagaaccaacattcacccacccaagtcagtcagactataaagtgaaagaagtttcccaggggaacactgtttcctctgaatgttcacaaaggcagtcacaaaagtataagcctctatgataatttaaagcagtcaattatgctccaagtccttttaaaacacatacgtatgcagta

SEQ ID NO: 76175 - DNA, 550 bp, Homo sapiens
tggcccacttaggagacatctttagaaagggaaaggctgtctttttgtacaggtagtagaacaacaaggtcagctgagcttaaggctgtggggttcgaagcagcccttcaagaagtcatcacccctgaagtagtgcctgcgagtcagtcagaggcataccaaaccctgagacagaatcaggcacaagttcacaactttttttttttttggggggagacagtcctactctgtcgcccaggctggagtgcagtagcgcgatctcagctcactgcaacctccgcctcccgggttcaagcaattctcctacctcagcctcccgagtagcggggactacaggtgcatgccgccacgcccggttaattttttgtattttagtagagatggggtttcaccgtgttgcccaggctggtcgcgaactcctgagctcagccaatccgcccacctcggcctcccaaagtgctgggattacaggtatgagccaccaygcccagccaagttcacaacttctgatatcaagttgttgctgagaaaaggtcaggacacttcttaa

SEQ ID NO: 76176 - DNA, 729 bp, Homo sapiens
ttgaatgtatttctcctcctaactgaaatttcatatcctttgatagacatctctctaatcccgccccctccccaccccaggctggggcttttaagaagtgggtgtgcctcctctaagttttctttccactgcacagttgcagaccacaaggccttaggccagggttggtggaaccacagaagagaatgagcttgggtgcctgaatcatcacaaggaagacagctgccccctgacgggacttggactgtgccttggactcggacaggagaaatagatttctactgtgttcaagcctctctgcatctagggcctggttatctcagctgtttacctgccctaatactcagcattcccaggcttgtacctgcacacatcattacccctgttgagtctgtccctgcttaggcctccatagttgctggactcctccatccatccacccatctacccattcatcctacaaatgctgttgactttttttggatgtgcacactgtgccgggtgcaggactcatgtcttcctgtgttgctcacactcttcactgcctcttcagcttctctgaatccccctcaattttcccagtctacttcagacccgctgcctgctcagaagccctccctgagcactgcaggccaggcctttgacagcttgatccctyacagactggccagtccatgaacccattcctggattctttcctggggggaaaaatgggggagacagggatgt

SEQ ID NO: 76177 - DNA, 647 bp, Homo sapiens
ctgtcaccaggctgaagtgcagtggcacgatctcagctcactgcaatctccacctcccaggttcaagccattctcctgcctcagcctcccgagtagctgggactacaggcgcctgccaccacacccagctaatttttgtatttttagtagagacggggtttcaccatgttggccagaatggtcttgatctcctgacctcgtggtccgccagcctcggcctcccaacgtgctgggattacagacgtgagccactgcgcccggcctccccttggcctggtgttaaagctacattctccttgtttcccacagaccccctccaagccctcccgcagccrtccacactggtctaccaaggagccttcagctttctctggagactcattaggaggtccacttctctcatgttcccactggagagtttgtgctcccatctccctggctgcttttcccatctcgaaaggtccgtgtctcctctcagctcctccagaaataccaccctgcccaccagccccagggttgccttcctcctctgagctctgagaactcccttctctcccactcctttggcacctggcagtggctaccttgagctgtctcttcacactggccgcccccaccaggctgggcttcgtgtctttgctgtatct

SEQ ID NO: 76178 - DNA, 1585 bp, Homo sapiens
tttaggaggcagggcctttgggaggtgattagatagtggggataaaacccaatgaataggattattgcccttataaaagaggccccaaagagccggcttgctgcttccaccagtgagaacacagagggaaggaaccatctatgaggaggcggacccttaccagacaccaaatctcccaacaccttgatcttggactgcccagcctccagaactgtgattagtgcatttctgttgttcataagctcccagcctatggccttctgttagagcatccaaaacagactaagacggggggcctcccagggaggaggacagtgcagaaatagggccaggacaccaagaggacacactgggtgcagtcaggaggctcctctggccagcagatgaggggagtggaatgagggctgagcctgggcaggagcaaagagccaggccaagaagtcagatgccagggaccgtggaaggcagcaaggcttcttcagggaagactgactcccgagctggaggtcctgatgctccagccccaggacttgctctggaggaaagtggagtttcatcctcaagactccagggctgagaggcactgccttccagtcctccaaggaaaagggggctgaaagaggggaagaacaggcagcctgaaaggccccacagggcacctgacatctctacctggcctgccacccacccggggctaccccagkgatgatggccttctgctggtgggcaattcaagcacaggtctgcccagggtccctgttgcaggcctgccagctgaccagagccagctctgcctgctccagggatgtgggatcctgggagagtaggatgggatccaaaccctcccaggcttctctggggttccccggaagcccgagttcccgcctcctcaggccagctctcaggtgtcaggtttcccgctgtgctcagctactgagccagcctcactcttccccagtgttggggcagaacagggaggggacactggaggcagggccctgatggtcagaaaggaggggaaggcccgagactccctctccaaaggcaccagggaggggcagggagaaagaagacaggacagccggccacagggctggagaggctcagcctcaagagccggggttcagcgctggctcctttttgaaaagcccacacaagcagcaaagaaagccagccttttgaaaagcaggtctctgcccacagaggccagtgaggaaggcatcactaccaagaagtcttcaaagccaggcagagtcacccggtgtaaggtctctgtcccaaaggccagggcacttcccctcacagtcagacctggacagccccatggacttctccaggccctagtttcctggacttgtgacctgcagtgatgctgctgatcccacacacctgctgaaatctctttgctggcaggggcctcaaatagcttctgaccaggcctctcatcttattcacggggaggctaagtagaaagtagaaagcgccaggaagatgtttgtgttcagtgttgtaccgccgccagggtcctagagctggacagagcagacctgagatgggcacatcagagctgtgatgtgacacccag

SEQ ID NO: 76179 - DNA, 1585 bp, Homo sapiens
tttaggaggcagggcctttgggaggtgattagatagtggggataaaacccaatgaataggattattgcccttataaaagaggccccaaagagccggcttgctgcttccaccagtgagaacacagagggaaggaaccatctatgaggaggcggacccttaccagacaccaaatctcccaacaccttgatcttggactgcccagcctccagaactgtgattagtgcatttctgttgttcataagctcccagcctatggccttctgttagagcatccaaaacagactaagacggggggcctcccagggaggaggacagtgcagaaatagggccaggacaccaagaggacacactgggtgcagtcaggaggctcctctggccagcagatgaggggagtggaatgagggctgagcctgggcaggagcaaagagccaggccaagaagtcagatgccagggaccgtggaaggcagcaaggcttcttcagggaagactgactcccgagctggaggtcctgatgctccagccccaggacttgctctggaggaaagtggagtttcatcctcaagactccagggctgagaggcactgccttccagtcctccaaggaaaagggggctgaaagaggggaagaacaggcagcctgaaaggccccacagggcacctgacatctctacctggcctgccacccacccggggctaccccagggatgatggccttctgctggtgggcaattcaagcacaggtctgcccagggtccctgttgcaggcctgccagctgaccagagccagctctgcctgctccagggatgtgggatcctgggagagtaggatgggatccaaaccctcccaggcttctctggggttccccggaagcccgagttcccgcctcctcaggccagctctcaggtgtcaggtttcccgctgtgctcagctactgagccagcctcactcttccccagtgttggggcagaacagggaggggacactggaggcagggccctgatggtcagaaaggaggggaaggcccgagactccctctccaaaggcaccagggaggggcagggagaaagaagacaggacagccggccrcagggctggagaggctcagcctcaagagccggggttcagcgctggctcctttttgaaaagcccacacaagcagcaaagaaagccagccttttgaaaagcaggtctctgcccacagaggccagtgaggaaggcatcactaccaagaagtcttcaaagccaggcagagtcacccggtgtaaggtctctgtcccaaaggccagggcacttcccctcacagtcagacctggacagccccatggacttctccaggccctagtttcctggacttgtgacctgcagtgatgctgctgatcccacacacctgctgaaatctctttgctggcaggggcctcaaatagcttctgaccaggcctctcatcttattcacggggaggctaagtagaaagtagaaagcgccaggaagatgtttgtgttcagtgttgtaccgccgccagggtcctagagctggacagagcagacctgagatgggcacatcagagctgtgatgtgacacccag

SEQ ID NO: 76180 - DNA, 547 bp, Homo sapiens
catggcccccagggagcctcctctcccctctgcatggatacagctcagaatcttgtttcctgtatcttctgagtctctcaatggcccacactgacttttctagcctgggagaaattcggatttcatgcaactaggtaatgcaccctttgtgagtcattcagaggcagggtgcttgggaaagtgatacaggaaaaatgagggtgtggggaaattgtggggaaccttgaacggcagaactgagagtctggggtacactacataagctaactacttgactacacaccagataaatcagagatgaagaaamcgaaagtgggccatctgcccagaacccagcttcaaaggccattctttccgggttccttatgtactccaggtgtatcagtttaacctcttttgctccagtctcatcaaccccaagaggcctattgcttggcttagcccccagggctgccatgggtctgctttcctccctctctatctattggttcccagtccaatggagtatgccaagggcctagaaagaaagtgatatgcccaaagggat

SEQ ID NO: 76181 - DNA, 975 bp, Homo sapiens
tggcattagggggtttaggggtgtcgtggggaacctgaaggaagggcaagtacttttgggtaccaggaacccccactgcagatggagagctccatgtycccaaggttctgaattgaggaacaatgggcaaagacccacagtgagatggggcaggggcaggaatccagacacgaatgcctctcccccacctcactgggcagatcggccatggtgcctgtacactctccatgaccctgggtgcgactgaactttggcccaaccaggctcccggctgcaggcagcccatgtgcaggccacttagtgaccacctggctgaaagaacactgccgtctggggaaatggaggttggcaaagccaatccactgtggaaaatggaccgcagaatagagaggggccaagtcagctggtagccaggaaggactgcaatggagaaatacattcacctgccagggttccaggaggcaactgacaggcattgactctagtttaattaatggaaaagaaggttctgcaaagggctctgggctacgcactggagaaggccctgttagtgctatggccagagcccttgcattcaccgccacaccctgaagtcggcttactgtgacaatgcacagctcactggacgtggggaacatgcttggcctgtgtgtggggcaaactggaagtgctggagctaatgcctgtggagcagctctcaaccaatgacgggcggggaggtggtgaataagtaccccagctctcccttcccttgatcgaggtaacactgaggcctggtctacactgtctcccagagttcccctgcaggattgggctctggttgccctcagtggtaactggcttaaaataacagttagcttttgctatggaacaaatcatcctaaaatgctgtggcctaaggtaataatgatgaattgtttctcatgattgtctgggttagctggtgggtcttctgctgggtttgcccaggctcat

SEQ ID NO: 76182 - DNA, 2534 bp, Homo sapiens
cagattgcaaaggggtagcaagaacaagatagtggagaaaccaggtgccttcaaattcaccctgtaatcactgggttgccttcagctgtaagcaaaggaaaacttgtgaccaaagatgaattggcctaatcacaaggatatttattgctttcttaactgaaatgtaggcagctctagggctgattcagcagcttaactttgtcattgtgggctctttctgttcctcttttacactccctcagtctgtttggctttttgtcctttgtcctattgcctcatgatctcaagggggctgctgaggttccagcattgcatcaacatttaaaagcaaaaagcagagggtaaaggtttgctcctcatgtggcccattgaacttgagtattgagaagcttctcaggaaacatccttttatatcttgttgaactgggtcactggctgtgagttgctctcaggaaggcaagggaagcaactttttcagcctctagggaggaagagaaacaagagaaaagaatgttggaatttttgaatagccaaccccagtgaatgcacaaatcccaagataaagtttcattctgtagaaggaagagcactagattatgagccaggagccacccgcttgccgtgtgaacttgcagctgtcacctagcttccctgggcctgcgaccctctctctagggtgaccgtttggattcactagatggcctctttctgctcagacatccctgattttattaaaactcctccagggtgttgaatgagctgtctggtggtaaggtaattaatttaatgagctccacttggtaaaaacagctgtggcttgtctccttcccatggtcaggggacatttgttggctgaatcaactttcctattcacagatccttatggaagtttaattacacctacaaccttgtgtctttggtccttaaatgtctttccccagtgagagcatcagctcaagaaggtgtcaaagagaccctacgtatgtgctaaaccaaagagacatctcttgtcattgattgatctctgccctgccaaggcagggtcagcctgatgtggtttgggtgtttgtcccctccaaatctcatgttgaaatgtaatccccagtattggaggtagggcttggtgggagcggttggatcatgggggcggatccctcatgaatggattagcatgaaacccttggcaatgagcgagtcatgcgagatctggttgcttgaaaatgtgtggcatctccctcactctcatgctcctgctcttgccatgtgagatgtctgcttccctttcgctttctgccgtgattgcaagcttcctgaggccccccccagaagcagctgttggcaccgtgctttttatatagcctgcagaactgtgagccaatcaaacctcttttctttataaattacccagtgtcaggtttttttttttttttagatggaattttgctcttgtcacccaggttggagtgcaatggcatgatctcggctcactgtaacctccacctccaaggttcaagcaattctcctgcctcagcctccggagtagccgggattacaggcgcccaccaccacatctggctaatttttgtattttttcagtagagatggggtttcactatgttggccaggctagtctcaaactcctgacctcaggtgatccacccgcctcagcctcctaaagtgctgggattacaggcttgagccacccagctggccggcggaggtatttatagtaatgcaagaacggccaaaagcacagccataggcagaactgtgagggaggaaattggccctctgaggcccctccacatctcccactcccacctggcattcatgagtctcctatagttggattctctcagctctggtctggttgtaggttttgtctacatactccctagagctcttgtcctcagtttaagcaacagcaaagacagacaatcatctctgtaccttaaatctaaatttccaggagagggattattatttgctcaacttggatcaggtgtgcaccctggtccaattactgtggtgggaatgggaggggtgattgaggaaggtcaccacagtacaaatctggattcaggggccttccctgtggggttagaggtggggcgtagtgtacttttcagttgatttttatttttaatggggaagtgggaccaggtgtggtggctcaggcctgtaatctcaacactttggggaggctgaggcctgagggctgcttgaggccgggaattcaagaccggcttgggcaacatagcaagaccgtgtctctacaaaaaatacaaacattaaccaggcgtagtggtgggtgcctgtagtcacagccacttgggaggctgaggtaagagaattacttgagcccaggagtttggggctgcagggagtcactatacctggccccacttggtgacagagcaagagtctgcctttaaaaaaagggagggtaataagtggattttccayattgtttgatgtagtgtgaaaaccccagagatcacataacattgtcagcattattaagtttgaattct

SEQ ID NO: 76183 - DNA, 1739 bp, Homo sapiens
cgcacaaggaagggagggctccgccagagctgatggcctgcctgtctgcccatctgcccttcatttgctcttggctagctgacttcactctccatggctgcagagcagtcgaacggggcagaatgccaaagatcttcagcttctctggagggtgtctgtaatctttctgtaggtcccacctgccctgcgtcaatgcaaggtgctatggggcccccaagcagatccaccagggcaggggttctcagccctggctgtacttagaatcacctgggggatcttcaaaacatgcttaatcaggtccccaccctagacctactcagtcagaattggtggggggaagcagtgaggcagacatgctattttatttttaattcccctatgtgactctaatctgatccagggttgagaagcactcactggagccttgctcctcaaaatgtgggtccaatgcccagcagcatcagagcagctgggagcttgttagaatctcaggccccatctcagatctacagaatcaacatctgcattttagcaagacccgcaggtgattcgtgcatctatcagcktttgagaagcattgcacaggtggatcccctagaaagtttcacgaggacagggacgtttgttttgttcactgctgtattcagtaatgtctggaacagtgagtgctggcacatggtaggtgcgcaggaaatatctgcagggtttcgaatgcgtacaaaagaacacaagagttaagccgaacaatccatgtccccagctgagcccccaaggctcgccattacctgtccatcaccctcccaccttgagggatgggggtcgaaggcaggtgtgtgagtggcaaacagggattagagggcttggctccctcccggaagctacctggcttgggcatccaatcaccgctctgtttgtacccttgcaggtaccctgtgagcctgtcgtcggacctggagtggcggcctgaccggtgccaggacgccagcgaggtacagcgcgacccgcgcgcgggttcggcgccactggctgaggacgtgcaggtggacccgcgcaaggactcgcacagcagctccgagcgcttcctagagcagtcgcactcgtccatggagcgcgccttcgaggccgactacgggcgctcctgcgactacaaggtggggtcgccgtcctacctggacaagctgctgtggcgcgacaacaagccgcaccactactcggagcccaagctcatcctggacctgtcgcactggaagcaggcggccggcgcgccccccacggccacggggctggcggacacgggggcgcgcgaggacgagccggccagcctcttcctggagatcgcgcagtgggtcaagagcacgcagggcggcccagagcacgccagcccgcccgccgacgaccccgagcgccgcttgtctgcctcgccccccggccgcccggccccggtggacggcggcgccagcccccagttcgacctggacgtgttcatctcccgcgccctgaagctctgcaccaagcccgaggacctgccggacaataaactgggcgacctcaatggtgcgtgcatccccgagcaccctggcgacctcgtgcagaccgaggccttctccaaagaaaggtggtgagggcggaggggccgctccaggccccacagagcaggagacccccagagaaagccggggctggcaggaggcggccgcccttcccgcccctctctgctgccttggggttggcagaacacg

SEQ ID NO: 76184 - DNA, 862 bp, Homo sapiens
ttgggttgaggaatgatgatatcctaggcccagaataggaaagaatggggtgagaatatgaggggtttcttttccatatatgggctggttgcctgtggcaggtcctagggcttgggcaagcactaatggataccagtgatttgtgtggcctggggcacagtgttgtcccttcctagagcctcagtttccctcatcccttccaccccctttcaggctactgctgcttcctgtggcctccatggctgaggactggctggactgcccggccctgggccctggctggaagcgccgcgaagtctttcgcaagtcaggggccacctgtggacgctcagacacctattaccagaggtactgggtgggtagtgggcagagtcaggagtggggtagagcctgattctggtaaaatcaaatggtgtggttaaatttatggatgaagtttaaattatgcacatacagttaatccttattagcggattttatgtttgaatttcacctacttaataaaattyatttgtaacttaaaagtcactactcacagtgcatttgtgattattcaagaatacgtacagagcagtgaaaaactgtcactcaatgcatgtatttctagctgaggctgaaggagcccttttcagctttaatactgtaaacaggtgtccttttcgtggtctgtttagtgtcacatttttctaatttttgtactttttggtgattttgctttttaaaatggtccccaagcatagtgctgaggtgctgtttagtgttctgtgagaagactatgtcgtgctttatggagaaaatacaaggcagataaactttgctggttatctgagttacaatgctgttggctgtaagttcaatgtta

SEQ ID NO: 76185 - DNA, 156 bp, Homo sapiens
cagccacattcaactgctcagccctggtgagcttgcctgagattggagtccccgtctgtggctgtttgaaagagggcctcacttcataaagaaggcaagcaatycttcctcacctcccatccacagaggaatcctggctacagcttggagcaaggc

SEQ ID NO: 76186 - DNA, 820 bp, Homo sapiens
ggatcctttattgacttctaggtaggcccccgaacaggtctttatcttaggctttcttttcttttctttttttgcgacagaattttgctcttgttgcccaggctggcatgtaatggcgcaatctctgctcactgcaacctccgcctcccgggttcaagagattctcctgcctcagcctcacgagtagctgggattacaggcatgcgccaccacgcccagctaattttgtatttttagtagagatggggtttcaccatgttggtcaggctggtctgtaactcctggcctcaagtgatccacctgccttggcctcccaaagtgctgggattacaggcgtgccccactgcacccagccttaggctttattttctacctttgcctgttgtatataaaaatatctagcccccgttgttagagagatattgtgaggctaaactccatatttaaaccaagtaatttcctaaaagagctatgtaacataagaatactgttgttactgaaaaagggctcttgcaggggctcttggacragaacatgtctcaccttgctggcagcacaggtgagaagaggagggaacacctagaggatagggtggctctcctgagcattgttaatgggcaagcagtcactctttggagaaggagacattactgttatagcatttgcaccatattgttcataagtatgtcaaatttggttcctgacccacatctcttaacccaggtatctgatagtgtaaacaaagcccattttcacagcatggaacagagtgggtggcagctcattattgaaactagcttgcaccttgattagaaaagca

SEQ ID NO: 76187 - DNA, 1531 bp, Homo sapiens
ggtgaatctcaaatgcatgacactaagggaaggaagccaggttctgaagactgcacactgcatgctccatttatatgatgttctgaaataggcaaagatataagaagaaaaaacagcagtgcttgccaagtgctggggtgggggtaaaggggtgaatataaaagcacaaagacttttgggggaggtgacagaaatagtcatatctccgtcacgctggtgaatgtgggctaaagatgtttgtgaaaatgtatatataactgtactctagaaagggtgagttttactgtatgtaaattatgaaaccacaataaatctcacttttcaaacatgctgcaggcagggcatggtgactgatgcctgtaatcccaacactttgggagtctggggtgggaggatcgcttgagcccaggagtttgagaccagcctgggcaacagggtgagataatctgtctctacaaaagtaaaaaaagtagccaggcatggtggcatgcacctgtagtcctagctacttgggaggctgaggtgggaggatggtttgagcccaggagtttgaggttaccgtgagctatgctcctgccactgcactccaagcaacagagtaaggccctgtccctaaaaaaaaataaagcaaagcaaaatgctgcatattctttgatacttttcccatgaagaggtggtgtctatgtctgaaacccttcaatgtaggctctgagactgcttgaccaatagagtatgatccaggtcctaataaactagcagcttctgctgccttccgggagccctgagcagcggtaggagtgtggggatcctgaggctgcaggctggcgaggccaggggcagctgcccagtggacagcccagggagccagcctttccgctttcctagccayggcgccaacgtgtgcacgaagccatcttcccaactgaatgagaggcacagacggtcacatatccaagccctgctccaactcctgacccgcaaaatcatgacatataaacaggtgttgcttttaatctctaagttttggggtagtcagttaggcagcaatagatgaccagaacaatctctgctgaaagaaagaaaagaaaacacaagaggaggaaggagaaaaaggaagaaaagggaaaagaaagaataaacgccaggagctattgggaaaagaccaacatttgttgtgacgttttctcttagaacccacaacctctggggttgaggacggcatctcattctcggtaggtttagctctggggtttcacgaagcccaattactgactcaggaatgccagaataccaaatatcaaatgttgttaaattctctaaagtaaggctatgaggatcatatgcaacaaaaaaatttgcataatttaaataagtagtcatttcctgcagattcaagaggacgtctgtacctttgcgtggctgcagcacaatcctcacgtcaagttctggtcctgcatcctggaggcagtgcctctctggggcacaccatgtttacagagaaacaaattcctgagttcacccatttaacaag

SEQ ID NO: 76188 - DNA, 1531 bp, Homo sapiens
ggtgaatctcaaatgcatgacactaagggaaggaagccaggttctgaagactgcacactgcatgctccatttatatgatgttctgaaataggcaaagatataagaagaaaaaacagcagtgcttgccaagtgctggggtgggggtaaaggggtgaatataaaagcacaaagacttttgggggaggtgacagaaatagtcatatctccgtcacgctggtgaatgtgggctaaagatgtttgtgaaaatgtatatataactgtactctagaaagggtgagttttactgtatgtaaattatgaaaccacaataaatctcacttttcaaacatgctgcaggcagggcatggtgactgatgcctgtaatcccaacactttgggagtctggggtgggaggatcgcttgagcccaggagtttgagaccagcctgggcaacagggtgagataatctgtctctacaaaagtaaaaaaagtagccaggcatggtggcatgcacctgtagtcctagctacttgggaggctgaggtgggaggatggtttgagcccaggagtttgaggttaccgtgagctatgctcctgccactgcactccaagcaacagagtaaggccctgtccctaaaaaaaaataaagcaaagcaaaatgctgcatattctttgatacttttcccatgaagaggtggtgtctatgtctgaaacccttcaatgtaggctctgagactgcttgaccaatagagtatgatccaggtcctaataaactagcagcttctgctgccttccgggagccctgagcagcggtaggagtgtggggatcctgaggctgcaggctggcgaggccaggggcagctgcccagtggacagcccagggagccagcctttccgctttcctagccatggcgccaacgtgtgcacgaagccatcttcccaactgaatgagaggcacagacggtcacatatccaagccctgctccaactcctgacccgcaaaatcatgacatataaacaggtgttgcttttaatctctaagttttggggtagtcagttaggcagcaatagatgaccagaacaatctctgctgaaagaaagaaaagaaaacacaagaggaggaaggagaaaaaggaagaaaagggaaaagaaagaataaacgccaggagctattgggaaaagaccaacatttgttgtgacgttttctcttagaacccacaacctctggrgttgaggacggcatctcattctcggtaggtttagctctggggtttcacgaagcccaattactgactcaggaatgccagaataccaaatatcaaatgttgttaaattctctaaagtaaggctatgaggatcatatgcaacaaaaaaatttgcataatttaaataagtagtcatttcctgcagattcaagaggacgtctgtacctttgcgtggctgcagcacaatcctcacgtcaagttctggtcctgcatcctggaggcagtgcctctctggggcacaccatgtttacagagaaacaaattcctgagttcacccatttaacaag

SEQ ID NO: 76189 - DNA, 745 bp, Homo sapiens
aaaggtactaacacattgctctccaaagagatttttattagttcatattctcactatagtatatgaaagtgcctgtgggctgtcatcaatatgaaaaaatttccaagcctgaagagcaacaaataacatatcctyattgttttaagttgcatttaaaaaattactagtgaaataataccaaacagtctctcagaccacagtgcaatcaaattagaactcaggattaagaaactcactcaaaaccacacaattacatggaaattgaacaacctgatcctgaatgactcctgggttaataatgaaattaaggcaaaaatcaagttttttgaaaccaatgagaacaaagagacaacctaccagaatctctgggacacagctaaagcagtgttaagagggaattttatggtactaaatacccacatgagaaagctagaaagatctcaagttgacaccctaacatcacaattagaagagctacagaggcaagagcaaattaatccaaaatctggcagaagacaagagataactaagatcagagcggaattgaaggagatagagatacaaaaaccctgcaaaaaatcaatgaatccagaagccggttttttgaaaaaattaacaaaatagatatattgctagctagactaatgaagaagaaaatagagaagaatcaaatagacacaataaaaaatgacaaaggggataacaccactgactccacagaaatacaaactaccatcagagaata

SEQ ID NO: 76190 - DNA, 745 bp, Homo sapiens
aaaggtactaacacattgctctccaaagagatttttattagttcatattctcactatagtatatgaaagtgcctgtgggctgtcatcaatatgaaaaaatttccaagcctgaagagcaacaaataacatatccttattgttttaagttgcatttaaaaaattactagtgaaataataccaaacagtctctcagaccacagtgcaatcaaattagaactcaggattaagaaactcactcaaaaccacacaattacatggaaattgaacaamctgatcctgaatgactcctgggttaataatgaaattaaggcaaaaatcaagttttttgaaaccaatgagaacaaagagacaacctaccagaatctctgggacacagctaaagcagtgttaagagggaattttatggtactaaatacccacatgagaaagctagaaagatctcaagttgacaccctaacatcacaattagaagagctacagaggcaagagcaaattaatccaaaatctggcagaagacaagagataactaagatcagagcggaattgaaggagatagagatacaaaaaccctgcaaaaaatcaatgaatccagaagccggttttttgaaaaaattaacaaaatagatatattgctagctagactaatgaagaagaaaatagagaagaatcaaatagacacaataaaaaatgacaaaggggataacaccactgactccacagaaatacaaactaccatcagagaata

SEQ ID NO: 76191 - DNA, 745 bp, Homo sapiens
aaaggtactaacacattgctctccaaagagatttttattagttcatattctcactatagtatatgaaagtgcctgtgggctgtcatcaatatgaaaaaatttccaagcctgaagagcaacaaataacatatccttattgttttaagttgcatttaaaaaattactagtgaaataataccaaacagtctctcagaccacagtgcaatcaaattagaactcaggattaagaaactcactcaaaaccacacaattacatggaaattgaacaacctgatcctgaatgactcctgggttaataatgaaattaaggcaaaaatcaagttttttgaaaccaatgagaacaaagagacaacctaccagaatctctgggacacagctaaagcagtgttaagagggaattttatggtactaaatacccacatgagaaagctagaaagatctcaagttgacaccctracatcacaattagaagagctacagaggcaagagcaaattaatccaaaatctggcagaagacaagagataactaagatcagagcggaattgaaggagatagagatacaaaaaccctgcaaaaaatcaatgaatccagaagccggttttttgaaaaaattaacaaaatagatatattgctagctagactaatgaagaagaaaatagagaagaatcaaatagacacaataaaaaatgacaaaggggataacaccactgactccacagaaatacaaactaccatcagagaata

SEQ ID NO: 76192 - DNA, 972 bp, Homo sapiens
caagtactagatgggtttttttctttaattgtacatataattacttttaaaattatggactttgtataacttttccagttcccacaagagaattaagaatattgaatttgttcaaaattaagccttctatcacttactttttagatgaaatacaaattaggacagtttttaaattaggagtttcctaataaaaaaattatatgataaattagttacataasttgtttccatactatgcactggaacaaaaagaaaaggaaagaaaaagacttcataagatttattcctaaacctcttgcattcacactaattttgtgtgttagaagaaaagcccacagtgtttttaaacagtttgttaacgctctttacataatgagctttattctttttctatgctaattattttttcatgtatgagtacattacagttgggtgattatctacataaaaatgacttgaaatcaagaaagagaggacagagatcagagagtttaaacagtaaagacctggggcaaggcagaactaaagggagcatctacgtttgagtggcagaaggaaaaagaagtgataggaaagatgatgagcaaaccagaagggcagaagacccagtaaggataccctggaagctgaaagggaggagttcaagatcaaaggttgatcaacatcatctagtggctgggggctccagcagtgtggtcagagaggaccaagacagatggaggtgtccattgaggtgtcctagattatgtcatgacattgtttatctgaattaaaagtctgtctcatttatttggtcttttgcacataaaagtgaataccaagaaaaagcctggttatttggactttgatagtatttccattttactagtttagtaagagtattttataccatcttcttaaacataacagaaaatataatgtaaatgtaaaacaaaactattatggcactagagaatacctatctgtcatact

SEQ ID NO: 76193 - DNA, 642 bp, Homo sapiens
taagaatgatggagccgttgctgccactccgagccccaccggagacggcccccaggcctaggcgggcaggcaggcctacgctaactgtcattttcacccccgccctccccacaggtcgctggagctcctgtttgccagtggccagaacaataagctcctgtacggtgaaccccccaagtccccgcgcgccacccgcaagttctcctcgccgccacctctgtccatcaccaagacatcgtcaccgagccgccggcggaagctctccctgaacatccccatcatcactggcggcaaggccctggacctggccgccctcagctgcaactccaatggctacaccagcatgtactcggccatgtcacccttcagcaaggccacgctggacaccagcaagctctatgtgtccagcagcttcaccaacaagattccagatgagggcgatacgacccctgagaagccygaagacccttcagcgctcagcaagcagagtgagtggccatgccgtcggagctgccccccagcctcccagccccactgaggctcagcctggcccagcaaggcctcagggctgctcttcctgctcccatggggaaggaagggagaggcttgggggtcccaccaggcagatagtggaggcagcac

SEQ ID NO: 76194 - DNA, 1461 bp, Homo sapiens
atcctcctgccgcagcctcccaagtagctaggactataggcacatgccaccacatctggctaactttttaatttttttttatagagtcagggcctccctgtgttcccaggctggtcttcaacttctgggatgaagcaatcctcccagaggatggtttcaggctcccagagtcctgggattacaggcgtgagccaccacacccagcctaagacaaagatctaactgcagacagaagtggagaaggaaggccataacgtgaccatagagggagagattaatgatgtagccataaaacaaggaatgccatcagccaccagaagctagaagaggcaaggagcagattctcccctagatcttccagaggtggtgtggccctctgacaccgtgatcttggctgactgataatgatttcagaattctggcctccagaacgctgagaaataaatgcctgtcattttaagccacgatgtctgcagtagtttgttatggcagccagaggaaactagtataaatatctccccatctccaagtaaatatgtatgcaaaaggcatacatatttgactagtctgaagtacaaatacaaaagagaaaatcagatacaatttcagagttcctcattcaaaatgagaacataacactcctaaatttttttacagttaaagaaagtatagataaaaagagaaataaatacggctttagaaattatatccaattatatccactggatccaattatatccactgtatactcagttccctgaagattagcctactcaacagacaagaactgtttatcaagtagcctagcaaaagaagactcaatcttgagtaactccgacttctagtatattcttctctgaaggaaagagaagctaaattatataggtttcattactaccataaataaattcaacaaaataaggtcactctggcactccttggagtcctctagattatttccatcctgcttctccactgccttcccattcttagtgaacaaagcaaacataattcttcctttaatttaatcaattggtcttaatgaatcaccatgttaaaaatgtaaacaacctagggccacgtgcagtcgtcacgcctgtaatcacagcactttgggaggtcgaagagggagaatcacttgagctcaggagttcgggaccagcccaggcaacacaacaatatctctacaaaaaaaaaaaaaattagccagacgcggtggcacatgcctrtagtaccagctactctgggaagcttgagatgggaggatcacttgagtccatgcattcaaggttacagtgagctgtgatcaggctactgcaatccagtctgggcaacagagtgagaccctgtctctattaaaaaataaaaataaaaaataaaaaaacctaagtttaaatctgcagttactctcactaagaagtatgttaacccagtaattcacactgtccaggttgagcacta

SEQ ID NO: 76195 - DNA, 1461 bp, Homo sapiens
atcctcctgccgcagcctcccaagtagctaggactataggcacatgccaccacatctggctaactttttaatttttttttatagagtcagggcctccctgtgttcccaggctggtcttcaacttctgggatgaagcaatcctcccagaggatggtttcaggctcccagagtcctgggattacaggcgtgagccaccacacccagcctaagacaaagatctaactgcagacagaagtggagaaggaaggccataacgtgaccatagagggagagattaatgatgtagccataaaacaaggaatgccatcagccaccagaagctagaagaggcaaggagcagattctcccctagatcttccagaggtggtgtggccctctgacaccgtgatcttggctgactgataatgatttcagaattctggcctccagaacgctgagaaataaatgcctgtcattttaagccacgatgtctgcagtagtttgttatggcagccagaggaaactagtataaatatctccccatctccaagtaaatatgtatgcaaaaggcatacatatttgactagtctgaagtacaaatacaaaagagaaaatcagatacaatttcagagttcctcattcaaaatgagaacataacactcctaaatttttttacagttaaagaaagtatagataaaaagagaaataaatacggctttagaaattatatccaattatatccactggatccaattatatccactgtatactcagttccctgaagattagcctactcaacagacaagaactgtttatcaagtagcctagcaaaagaagactcaatcttgagtaactccgacttctagtatattcttctctgaaggaaagagaagctaaattatataggtttcattactaccataaataaattcaacaaaataaggtcactctggcactccttggagtcctctagattatttccatcctgcttctccactgccttcccattcttagtgaacaaagcaaacataattcttcctttaatttaatcaattggtcttaatgaatcaccatgttaaaaatgtaaacaacctagggccacgtgcagtcgtcacgcctgtaatcacagcactttgggaggtcgaagagggagaatcacttgagctcaggagttcgggaccagcccaggcaacacaacaatatctctacaaaaaaaaaaaaaattagccagacgcggtggcacatgcctatagtaccagctactctgggaagcttgagatgggaggatcacttgagtccatgcattcaaggttacagtgagctgtgatcaggctactgcaatccagtctgggcaacagagtgagaccctgtctctattaaaaaataaaaataaaaaataaaaaaacctaagtttaaatctgcagttactctcaytaagaagtatgttaacccagtaattcacactgtccaggttgagcacta

SEQ ID NO: 76196 - DNA, 695 bp, Homo sapiens
aatcttttcagrtgcttttttcaattaagccttttcctttacttcctgctaatagtgataacatatttataatagctatttacagtactattaacaagtattacagtgctggttcaaaggaaataaaaactttattaataaaataagagattttgcaaaagtcatccaaccaaactcccttttatacgtcttgccaacgattataaccatacccttgagcacattaattctttttatctcgctagagattcagagacatacacttccatctatgggggtagatgagagatttcaagcaacaatattccattagaagaaaagaaagtaatataaggatattagcttatctgtgcctaagctacttccttctaaatagagcataagaaaaactaattaatctgaaggcagtacaaactgacatctcacaataatctatgtcaaggagctagtgcttctgcggccacattgtccttcctccactatacccacctcaagtcaggaggctcattctactattttttgagtgtgtttagtgttttctttgtattgtcatgtgtacacctaatagtaaaaccatgcagctcactaattctcctactcaagtatggtggatgggatgggtagaaaactaacattgaatgacaaccatatgctctgtgataccatgacaactttagaaatgaggaaacaagact

SEQ ID NO: 76197 - DNA, 590 bp, Homo sapiens
agggagaggagaaggaagagataaatgtttaatatttattgagcacttactctgtgccaaacatttgttcatgcttcatggataacctcacttcaaaacgctataggtaagaattattattatccgaccttagacattaagcagctgaggcagaagtgaaaagtctcaccaaacatcacatggaagttgaattcaataagcaattgattygaaaacctgtgtaatctctagatcatatcatcttcatgataatgagaagggaccttttctcaccattttcttttatggccatagcatcatcttatcaaatatttataggctttcccatgcagattgaataaagcatgattcttagccttgtgaatcttttttttttttttttttaggtaatagagaaacagctaaattaaaagaactgttgcttatctctcatttttactttataaaatgtcatttagttcctctttttttcttaaatgagtgtttttacaacctacacttcattaagaaagacatgctgatatcaagtaattctttactggttcttgcctttcctaaaatatcctgtaaccttccatcattatactgga

SEQ ID NO: 76198 - DNA, 1029 bp, Homo sapiens
actccatcatcaccttaaaaagttccctcatgcctctttcctgacaatccccaactcaccccctggcgaaaacaaaaacaaaaacaagaaaacaaaacccactgttttgattattatttactatggtttagctctggaccattgcatgaatggaatcatacagtatgtattctttttttttgtaaggtttctttcactcagcctgatgtttctgagactcgtccctgttattgcatgtatcagtagccagcttttaaaattattgagcagtattccattgcataaatactacgttttatccatttttctgttgatgacatttggggtgtttccagtttcagaatgtctgtctcatgatgattctacactttggcatccctccyaacaatgtatgagagttccagttgcttcatattctcaccaatatttggtgctatcagtagtttttaaattttagccatttaagtgagtatgtagtgttatttcatgttttccttagtcatattttcgtgtccccgatgactaattatattgaatacctttccttgtgtttactttcattttgtatatcttctttggtgaaaaatctgttggaaacttttgtccattttttatatttgatgtgtatcttattattgagtcctaaaggtttcttatttttcctggagattggtattttgtccgatacctgtgcttttagctggattgctttaatgggccattccgccatatcatcaacctagccttatgaattttaggattgttgctaggatgagtgttctccttgtcattagcatatgatcgcctttcttttcctttgtcctcagaagcacacatgaagagctttgtaaattccttcaattatagcatatgatacttaagagaggggtttgtcctttctaagctgctaaattttgttttacctgaaccaccaatttgaaagaaaaaattaaatgaaagttaaaataatttatgaaataacaatcaacttctatgtttgctactttgattgtgataatggcttcatgg

SEQ ID NO: 76199 - DNA, 1029 bp, Homo sapiens
actccatcatcaccttaaaaagttccctcatgcctctttcctgacaatccccaactcaccccctggcgaaaacaaaaacaaaaacaagaaaacaaaacccactgttttgattattatttactatggtttagctctggaccattgcatgaatggaatcatacagtatgtattctttttttttgtaaggtttctttcactcagcctgatgtttctgagactcgtccctgttattgcatgtatcagtagccagcttttaaaattattgagcagtattccattgcataaatactacgttttatccatttttctgttgatgacatttggggtgtttccagtttcagaatgtctgtctcatgatgattctacactttggcatccctcctaacaatgtatgagagttccagttgcttcatattctcaccaatatttggtgctatcagtagtttttaaattttagccatttaagtgagtatgtagtgttatttcatgttttccttagtcatattttcrtgtccccgatgactaattatattgaatacctttccttgtgtttactttcattttgtatatcttctttggtgaaaaatctgttggaaacttttgtccattttttatatttgatgtgtatcttattattgagtcctaaaggtttcttatttttcctggagattggtattttgtccgatacctgtgcttttagctggattgctttaatgggccattccgccatatcatcaacctagccttatgaattttaggattgttgctaggatgagtgttctccttgtcattagcatatgatcgcctttcttttcctttgtcctcagaagcacacatgaagagctttgtaaattccttcaattatagcatatgatacttaagagaggggtttgtcctttctaagctgctaaattttgttttacctgaaccaccaatttgaaagaaaaaattaaatgaaagttaaaataatttatgaaataacaatcaacttctatgtttgctactttgattgtgataatggcttcatgg

SEQ ID NO: 76200 - DNA, 1029 bp, Homo sapiens
actccatcatcaccttaaaaagttccctcatgcctctttcctgacaatccccaactcaccccctggcgaaaacaaaaacaaaaacaagaaaacaaaacccactgttttgattattatttactatggtttagctctggaccattgcatgaatggaatcatacagtatgtattctttttttttgtaaggtttctttcactcagcctgatgtttctgagactcgtccctgttattgcatgtatcagtagccagcttttaaaattattgagcagtattccattgcataaatactacgttttatccatttttctgttgatgacatttggggtgtttccagtttcagaatgtctgtctcatgatgattctacactttggcatccctcctaacaatgtatgagagttccagttgcttcatattctcaccaatatttggtgctatcagtagtttttaaattttagccatttaagtgagtatgtagtgttatttcatgttttccttagtcatattttcgtgtccccgatgactaattatattgaatacctttccttrtgtttactttcattttgtatatcttctttggtgaaaaatctgttggaaacttttgtccattttttatatttgatgtgtatcttattattgagtcctaaaggtttcttatttttcctggagattggtattttgtccgatacctgtgcttttagctggattgctttaatgggccattccgccatatcatcaacctagccttatgaattttaggattgttgctaggatgagtgttctccttgtcattagcatatgatcgcctttcttttcctttgtcctcagaagcacacatgaagagctttgtaaattccttcaattatagcatatgatacttaagagaggggtttgtcctttctaagctgctaaattttgttttacctgaaccaccaatttgaaagaaaaaattaaatgaaagttaaaataatttatgaaataacaatcaacttctatgtttgctactttgattgtgataatggcttcatgg

SEQ ID NO: 76201 - DNA, 1929 bp, Homo sapiens
tgcattatggcctttagtagaaggaagaggtatgatctgccatagtacctggggttctccatggttttcttcatgggagggcatcttagtttaccatgtaaacaagacaatacacagtggggagagatgtaacttccagaagatcatactgctatttgttaagggagaaatggatgctagataactagaaacacatcagttgccctcttagatacatttaactactctttaaattaacctctcaattacttctggttaatatatgcactgctggatatactgaggagcccgtcctgcttgcttcctcatgcatcattttcttcctctcccattagctrcatggaggatgggcaaaggcacttcctgtgattgcctctggtgttcaaccttacactgccatctggagcaatgctgcattcttctgggaatgcctcacagttgtctgtggtgctaatgaatgccaaggcctttgagagccagagtgcacttcattatacaatgacttcattaagccaaaattatgaaacagtcagtgttagtctgttttgtactgctatcacagaacaccacagcctgagtagtttataaaaaatagaaatttatttctcacagttctggaggctaggaagttcaagagcaagattggactgttggtccaagatcaaggctggcagttttggtgtctggtgagggcctggtgtcctcttccaagatggtggcctgaatgctggatcctctgcaggggagaagtgctattcctcatacggcagaagagaagaagagccaagagagaaaactcattcttgaaagccctttcattaagtcattaaacccatccatgagggtggagcctgaaaagtctaatcacctcttaaaggccccacctcccaataccattattttggcaattaaatttcaacttcttttttctttctttctttttttttttgaggagtctctctctgtcactcaggctggagtgcagtggcatgatctcggctgactgcaacctccgcctcccaggttaaaacaattctccagcctcagcctccccagtagctgagattacaggtgtgcgccactgtgtctaatttttgtattttttgtagagatggggtttcaccatgttggccaggctaatcttgaactccggacctcaaatattctgcctgccttggcctcccaaagtgctaggattacaggcatgggccaccacgccctgcctcaacgtgagttttcagggggacaaacattcaaaccattgcgtagtccatgccatttttttttttttgccttctttccctttgaacttctttctatcatttgtttatcttctttccattggaactaggagaaaagtttgaacctggacactgaagagatggtgtctgtgaatcactgaatgaaaataactcatttgggttttacctgcagccctgttagagcaaagatacagcttcacagggtttaataagagctagaatgggatgttctttaagcattgttagtgtcctaattccccactcttgtaactcctctggccaccctcatccccttttcccttctcattccgtttcttcacagcagtccttcatcagttccttctccctaatgcttctgtttctctgcctttccccaagtccaaagtaaataaatcaagtgctccttttttgcattacgaaaaattctttctcatacaagaaaatttaatatggttctcttaaagcttgttcactgctgattgtgatttaattcacagacataatatctgcgctttaagttttaggtaaggccaagtctactttatggaataacctgaaaagcaacagtaagaaaatagcatatagctggcaggaaattattcaagatgttcatgccttcctcttcaaaccggtttcaagggaatagtgaaatagagttccctgatag

SEQ ID NO: 76202 - DNA, 1929 bp, Homo sapiens
tgcattatggcctttagtagaaggaagaggtatgatctgccatagtacctggggttctccatggttttcttcatgggagggcatcttagtttaccatgtaaacaagacaatacacagtggggagagatgtaacttccagaagatcatactgctatttgttaagggagaaatggatgctagataactagaaacacatcagttgccctcttagatacatttaactactctttaaattaacctctcaattacttctggttaatatatgcactgctggatatactgaggagcccgtcctgcttgcttcctcatgcatcattttcttcctctcccattagctacatggaggatgggcaaaggcacttcctgtgattgcctctggtgttcaaccttacactgccatctggagcaatgctgcattcttctgggaatgcctcacagttgtctgtggtgctaatgaatgccaaggcctttgagagccagagtgcacttcattatacaatgacttcattaagccaaaattatgaaacagtcagtgttagtctgttttgtactgctatcacagaacaccacagcctgagtagtttataaaaaatagaaatttatttctcacagttctggaggctaggaagttcaagagcaagattggactgttggtccaagatcaaggckggcagttttggtgtctggtgagggcctggtgtcctcttccaagatggtggcctgaatgctggatcctctgcaggggagaagtgctattcctcatacggcagaagagaagaagagccaagagagaaaactcattcttgaaagccctttcattaagtcattaaacccatccatgagggtggagcctgaaaagtctaatcacctcttaaaggccccacctcccaataccattattttggcaattaaatttcaacttcttttttctttctttctttttttttttgaggagtctctctctgtcactcaggctggagtgcagtggcatgatctcggctgactgcaacctccgcctcccaggttaaaacaattctccagcctcagcctccccagtagctgagattacaggtgtgcgccactgtgtctaatttttgtattttttgtagagatggggtttcaccatgttggccaggctaatcttgaactccggacctcaaatattctgcctgccttggcctcccaaagtgctaggattacaggcatgggccaccacgccctgcctcaacgtgagttttcagggggacaaacattcaaaccattgcgtagtccatgccatttttttttttttgccttctttccctttgaacttctttctatcatttgtttatcttctttccattggaactaggagaaaagtttgaacctggacactgaagagatggtgtctgtgaatcactgaatgaaaataactcatttgggttttacctgcagccctgttagagcaaagatacagcttcacagggtttaataagagctagaatgggatgttctttaagcattgttagtgtcctaattccccactcttgtaactcctctggccaccctcatccccttttcccttctcattccgtttcttcacagcagtccttcatcagttccttctccctaatgcttctgtttctctgcctttccccaagtccaaagtaaataaatcaagtgctccttttttgcattacgaaaaattctttctcatacaagaaaatttaatatggttctcttaaagcttgttcactgctgattgtgatttaattcacagacataatatctgcgctttaagttttaggtaaggccaagtctactttatggaataacctgaaaagcaacagtaagaaaatagcatatagctggcaggaaattattcaagatgttcatgccttcctcttcaaaccggtttcaagggaatagtgaaatagagttccctgatag

SEQ ID NO: 76203 - DNA, 598 bp, Homo sapiens
ggatgcccaattggagaatagtagctaaaactaggaggggttttgcctgaccaaagagtcagtgcaaggggcccacaggaagatttgaagaggctaacctaggctagtccctgtgaactttggagactgccctcaggactgccttccaggaagagaaactgctgggagtggaaacaaaattgaacaggatgggaataatagagacaaaggaaagaaaaggtccagataaaagcaggtaaaaggaacagagccagacagtgacagaaagcaggctgccatttttgacaagaaaacaacagaaggctaggttctaaacactttagaaagccattttaaaccctgcctcctgaaagttcaaggaaattatttttcacatgaaaatraaaaacagaaaaatactgacgtcaaatcccatacaaagttatacaaaacaagggcagaacatccttataaaccataaaagcatgccacaacacagaacaaaaacaaaatcccccaaacaaaaacactccagataatagcctactatttcaaaataaactaaaagacatgagacagaaaagaacgttaggaattagaaaaattcagaagtgagaag

SEQ ID NO: 76204 - DNA, 1012 bp, Homo sapiens
ttattggtggcattcctgcaaattcaaaagctagagtgtttgtgagcgatgctacatgaaggaatttgtgtagttgtgtgttggcaagcatgaaaaaattagtttagaggtccctctaggcagttaaaacttttttactgaaatataatatttatacatatttatggggtacatgtgatattttgatgcatgcatacaatgtgtaatgatcaaatcaggatatttaaaataaccatcatcacaaacatttttcatttctttgtgctaggaacatttcaaatctcttctagctattctgaaatatacattattgccagctatagtaaccctactgtgctacagtaggagttatttcttctaactgcatgtttttacccattaaccaacctctctcttcatccctcccccactatcctcacattcttccccacctctggtatctatcattctattctctatctctgtgagatcaacttttttagctcccagtatgagtaagatcatgtgatatttgtctttatgtgcatggcttacttcacttaacataatgacctccagttctgtccacactgctgcaaatgacaggatttcactctttattatggctgaataatattccactgtgcatatgtaccacactctstatatccattcatctgctgatgcacacttaggtcgattccgtatcttggctattgtaaacagtgctgcgataaacatggggatacaggtgttcctgtaataagccgattttctttgctttgaacaaatacccaagtagtgggattggatcatatggtagttctattttaagggtttttttaggaacctccacactgttttccataatggttgtcctaatttacattcccaccaacagtgtataagagtgcctccgggtgattttttaaaggactaccagtgggtttaaatcttggaaagataaatgtactaaagcaaccaaaattgtcaagtatgtataaatgggaaattatatttatgccaatttttg

SEQ ID NO: 76205 - DNA, 729 bp, Homo sapiens
taatagcttggcctagcctactttaaaygtgctcaaaacacttgcactagcctacagttgggcaacatcatctaacacaaagcttattttatgcttaagtattgaatatctcatgttatttactgaatactgtattagaagtgaaaaacagaatagctaaatgggtactcaaaatacgatttctactgtatttgctttagcactatcccatcataaatctgtaaaatgctcataatataatgttaactggaaaatacaaacaaaacatgtttatattactatggtatcagctgtgcttcaagaagtttgcccaccttttcctgaacttcttctgtattagacaaaatagccataaaaccaaacccaaaactcgtacccagagggcaggtatttatgcctttaggagaagaatttacaaatacagtcataaataccaaatattaacagttatgggaaaaactgacaaatattatcatatttaagttagatttacaattttttaagcattcagtttaactgacacaaacaaaaataaattaaatacacatcctatttgactacaatcaacatggaagaaatgaaacccagtcttttggcagacagggtataaagaagcatgaatttacaggttcttcctaaaagcactctccgtttgagatgctgacagaatgggctttgtccaaaattcaagacatttttgctaatcactttcttatattactaagtgtc

SEQ ID NO: 76206 - DNA, 729 bp, Homo sapiens
taatagcttggcctagcctactttaaacgtgctcaaaacacttgcactagcctacagttgggcaacatcatctaacacaaagcttattttatgcttaagtattgaatatctcatgttatttactgaatactgtattagaagtgaaaaacagaatagctaaatgggtactcaaaatacgatttctactgtatttgctttagcactatcccatcataaatctgtaaaatgctcataatataatgttaactggaaaatacaaacaaaacaygtttatattactatggtatcagctgtgcttcaagaagtttgcccaccttttcctgaacttcttctgtattagacaaaatagccataaaaccaaacccaaaactcgtacccagagggcaggtatttatgcctttaggagaagaatttacaaatacagtcataaataccaaatattaacagttatgggaaaaactgacaaatattatcatatttaagttagatttacaattttttaagcattcagtttaactgacacaaacaaaaataaattaaatacacatcctatttgactacaatcaacatggaagaaatgaaacccagtcttttggcagacagggtataaagaagcatgaatttacaggttcttcctaaaagcactctccgtttgagatgctgacagaatgggctttgtccaaaattcaagacatttttgctaatcactttcttatattactaagtgtc

SEQ ID NO: 76207 - DNA, 512 bp, Homo sapiens
gggcagatcttatttttccaaatcaargcagtagttcatcatgatgatgccagtaggacaggaatcagacagatcccctggtttttctatataaatttaaaattttagtttgaatcaactatattgaggcatgattatatataataaacatgtaccacattgtgttttttttgtttttttttttttttgttttgagacggtcttattctgtcacccaggctggagtgcagtggtgggatctcagctcactgcaacctccacctcccaggttcaagcaattctcctgccttggtctcctgagtagctgggattacgggcgcccaccacagcgcccagctaattattgtatttttagtggagatggggttttgccatgttggccaagctggtcttgaactcttgacctcaagtgatcttggcctcccaaggtactgggattgcagacgtgagccactgtgcctggccatgtttttaagtgtgttgtacatagttcattgagttttgatgaaaaa

SEQ ID NO: 76208 - DNA, 678 bp, Homo sapiens
gataccttgtttcgtaaagctggacacacttcactgtgggaccatgggttgatctccacctcccctaccctggcagctcaggactgcaggactcagggtcacaggcctaggagatgaccagatccaccctcaatggcagcagtggtgccctgactgtcttctagtatttcttgttgccctgtgccctcttggagtatggacagatgacgcatgactatgccacctccatrtgtcatatccctcggtcaatacttgaatttccatctctcacatttgtattgtcattactcttgaataggataacaaggatgggctaccattagttgagtattgcctatgtgctgggtgcattgctaagggcttcatgtgcattatctcaattaaacttcacaatccccctatgggactattgttatctccactttaccagtgaagaaaatgaggctgagaaaagtgaatatgatatagcaatcattctcctgggtatttgcccaattgagttgaagacttagatccacaaaaaaacctgcacatggatgtttacagcagttttatttgtaattgccaaaacttggaagcaaccaagatttccttcagtaggcgaatggataaataaactggtacatccagagaatggagtattattcattactaaaagaaaatgagctatcaaaccat

SEQ ID NO: 76209 - DNA, 678 bp, Homo sapiens
gataccttgtttcgtaaagctggacacacttcactgtgggaccatgggttgatctccacctcccctaccctggcagctcaggactgcaggactcagggtcacaggcctaggagatgaccagatccaccctcaatggcagcagtggtgccctgactgtcttctagtatttcttgttgccctgtgccctcttggagtatggacagatgacgcatgactatgccacctccatatgtcatatccctcggtcaatacttgaatttccatctctcacatttgtattgtcattactcttgaataggataacaaggatgggctaccattagttgagtattgcctatgtgctgggtgcattgctaagggcttcatgtgcattatctcaattaaacttcacaatcmccctatgggactattgttatctccactttaccagtgaagaaaatgaggctgagaaaagtgaatatgatatagcaatcattctcctgggtatttgcccaattgagttgaagacttagatccacaaaaaaacctgcacatggatgtttacagcagttttatttgtaattgccaaaacttggaagcaaccaagatttccttcagtaggcgaatggataaataaactggtacatccagagaatggagtattattcattactaaaagaaaatgagctatcaaaccat

SEQ ID NO: 76210 - DNA, 678 bp, Homo sapiens
gataccttgtttcgtaaagctggacacacttcactgtgggaccatgggttgatctccacctcccctaccctggcagctcaggactgcaggactcagggtcacaggcctaggagatgaccagatccaccctcaatggcagcagtggtgccctgactgtcttctagtatttcttgttgccctgtgccctcttggagtatggacagatgacgcatgactatgccacctccatatgtcatatccctcggtcaatacttgaatttccatctctcacatttgtattgtcattactcttgaataggataacaaggatgggctaccattagttgagtattgcctatgtgctgggtgcattgctaagggcttcatgtgcattatctcaattaaacttcacaatccccctatgggactattgttatctccactttaccagtgaagaaaatgaggctsagaaaagtgaatatgatatagcaatcattctcctgggtatttgcccaattgagttgaagacttagatccacaaaaaaacctgcacatggatgtttacagcagttttatttgtaattgccaaaacttggaagcaaccaagatttccttcagtaggcgaatggataaataaactggtacatccagagaatggagtattattcattactaaaagaaaatgagctatcaaaccat

SEQ ID NO: 76211 - DNA, 1684 bp, Homo sapiens
ggttccagacacagctcctgactcacttctttctccttgagaaacctatcaggctggctcagaggagtgtttctctggaagaactcagggggcagtctcctctggtcatcatggtactgtgggtagaggacagaagaacagcaagggaggtgatgacccagggctgtggccaggcctgaggccctcaaagctctgagccaggactaaggtggcctctgctctgccaaatccaataggccccagtggaggatgaaacaagtggggaggaaaggaaaaaccagaatatgtgtgtggagggctgcacctttgctggaacctatcaggggctacataaacacgtgtcatttgatttgacttaccttaaaaacaacaccagcactaaatgatgtgaggaatgtccctgtgccttccattttayggctgagggctctgaggcttagacgggttaggtcatctgcccagagtcatcagctgggtacagtcccagcccgatgggaattaaggacagctgagttccaatgctcctgttctttacccttcctgatgctgcctccatgtatgtgatatggcatgacttatggacacagatacagatggaccacgaccacctccccacctacaccacacagctacacacagataagctggacattccgcatcatctcagggaaaacacccttgtaaaggacaaagagaactgggcaagagctcagaagaccaaaatcagggctctggttccgacatttcttgggtatctgctttatctgattcatattctctctctctctctctctctctctctctctcgcctctgtgtatctccatctctccctatttgtctctctgcttactctccccttgttctcactcagggctatagagggagaggagacccataccaggatcctctctccagtttatacacaactgctaacaaagacatcacccatccaaataaacagatatttagcaaattcctcaatgtttgggaaataaaatacatatcctgatgaggtaggcattttttttataagacaatgagaactagggaatcatccaattgccctctttgccatgggctactaggaatctcagagctaaattgcataatgagccacggtagctgtcctgggtttagttttcctggtagaagcaactgcctacctagctctcatccctttgttatttttcaatggctttgaaattttgtagctgatttgcaggtttcctctgtttacagttttttattgtaggttgacccaaattctatttagaagtaggcatgacataaataactttttctttttaaattaataggcaaatttgagagtgttcagtattcctgtgagagaaacaacaaacaaagaccctgcgtaaaatggtttctctacaataatccttttacttgattcaatccaacctgagaaaattaagcattttactcctgttttctttgggaaataaaataatagctgcctccctcagaagctgggattccttgggccttcctacctgacccctcctggcggccacagcagctgaagcacggaggtgttcttgtccctctgctcatgctcctgccacatgtccccaagcctttgtcctttctccctagggaggtgggctgcatggtctttgatgtcccatatgttttaaatctattttattttgggtttcataaccc

SEQ ID NO: 76212 - DNA, 957 bp, Homo sapiens
gcatgaggatctcttgggggtctttggataaaaaagattaacagatgcactttactttcatatacacacaggcagcgggcagacattctcatcatctggcattatcatagcttcttacgcagtagaagcctgctccagtctaactaaatcctgtggaggcttggccacatgtgatgtcaccccaaactagggccacccggtcaagtgcagaactcaccttgttcatctaaaaaacaaaaacaaaaacagaaaaaaaaaaaaaaagaggagagagagatctcattaagcagggaatctggctctttcataaaccgaaacccgaatagaagctgatatacaaggctctacccagaagccgtgtcccctcccacaagacctgctgttctatcagtgacattttaatctatcattggaaattctggaaaagagggagggaaagaatgcttggcttttggggagaggacaaggaaccaatattgatcatactatgtgccaggcacaataacaagcactaccacataatcctcttttattctaccctttgcctaaatatcattgtagaaactgatggcctagtgcaagaaggtgacttgttctaaatcacatgttcctaaaggacagagcctggatttgaaaacccaggtctgtgaacagagacagatggtgaagaagacaggaaacaggaagacatggtaactgttggtgacccccacgcttggtcccatgcccctgtggttcagaggtccacctaccctatasaggtagaagccaatggcgaggagaggcttccgcttgcggcacctgtgcctgggcttctggagcagggacaccagcacgctgcagggcctcagggatctcctgccctcctcgggcctccagacagacagcaggaactgcgggttcttccaaaatgtgtctggagcagaacacagcaaggtgagaatgggccccggatcc

SEQ ID NO: 76213 - DNA, 661 bp, Homo sapiens
agggccaattatagctgctccagggaacacggagctgactcatgcctcaacttggccgtggagagtctcccatccactttctcgcttgtgtctgtgggatgcgttacagtctccctcaaaccccatgaggccgacagggcaagtattatcatcctggactcagtctgtcctgtctcccctcattcttgtgcatccccgtctctgctgttcccaccctggcctgaattaacttttcttttttcacactgctgtgggaatgttttctcctggcaacagaggcaatctgtatcgcttcccataaagaatcagtgcatgagattcctcaatagatttttcctttctggacacagtggtggctttgttacaggggcacctgctgctgtaagccatacccaaatgtccctgagaatttaccccacccgactgtgctgcctggacttgctggtggcctcattagactcagtgtttccccagacccatgtgtggtcagcaagttttgggtcatgtgggtttagcaggacaaactctaggcccttgcctgaccacctcgggctgcagccctgtaacttccccggaagccaccctgctaggctgggaagmcttcactcatctgctgagaacaccacgtccctctcaggggtagaatttgagacgcctgtgt

SEQ ID NO: 76214 - DNA, 818 bp, Homo sapiens
ccccaaattaataacatctaccaacataaccacagcaccattatcacacctaaatgaatgtaaaataatgtcctattatcatataacaccaatttttaagaaacttaaaaagagaaaaaaataaaaaataaaacagcaaagtttccagggccagattcctaaaatcttacatgcagttaggtgatgcttcacaaaatgctactgtacatgactaactaatgaagaatgcttgtctttccagtaactgaaaagaagttcatttttttttgtacttgaaaattgcttggctatttacgtggtacttaacagtcacaattttattggatgctcttagcgatgctaccctaagggagatagagtgatgataaaactgggctccagggttattgagaccagcccaggttttccaggtagctaacagtggcggctggattccaacactggcgtaatggaagcaacactaggctgggagtctgaaaccggaattctggttttctctgtgctcctaactctgcctatgtgatttggggcattggagcaaacctctctggactttcatgtcttcttctgamaagtgaagaactaaatcaatggtctccaagagactttctatttggatctttctttcattcaatacatttctgacttctttactaaaactctgcattcatctcaatttggccccgtagcaaatttatacaggggcttattgagtcataaaggaaatacccaacattagaatattggtgagaaagacatgaatttgacaaaagtcttaccacttgctatggccaagtacagcagaatgctgagcgtct

SEQ ID NO: 76215 - DNA, 1867 bp, Homo sapiens
atatcaatacggttgaatcttcatatataacatttaaaaagaatagataaatgaatttcaagcttgtttggctgtctgtaggcctctatttatagaattaaaggggtcatttcttatcttgccctgcacattgctcagttaatgcatgtatgcacttcctttgaagtcagtgggatctcagctcttggatattctttcgtggcaaggagaaaaagagaaatcaatttactgtcatgaatatcatagtagaatatctttttaagtcaaaattttatagtgcttcttaaaatccataatcaattttgtcttattggggaagatgcaatctcaggataaacaaataaagtattttaattttattagagagaattagaatgccatttttgaygtgtgaagaatgagtctatctctcatcctggcctgaagttacttggaattatttcaggaaattgtctcagtggtctatatgttattttattagtttaaaactaccttgtaattaagatattgttatccattatacaaatcaaaaaatggggatctgagaggttaagtaccttccttgttctaagtcaatagatattaaatggaatatgtaaagctaagtttgtctaggtgtctaatgaacctggagaaaaagaaagtacttattcttctcagaaattgtacagtaattatacttttcatatattaatgtgcttatttttatctatatccacatatacaaaaaatacacataaacacaataaatatcagatatatgggaagtcactttaaagaaggcagtatgtgttagtgaacgcaaatataagattcagatttttataaatattttttatttagaagcaacctaagtgttcaacagcagataaatggacaaataaaatgtgttacttatatataatggagtactattcagccatgaaaagaatgagattctgtcctttgcaacagcatgaatagaactagatggaattaatcatgctacgtaaaataagccaggcacagaaagacaaacatcacatgttctcacttatttgtggtatctaaaaatcaaaacaattaaactcatcgagatacagagtaaaaggatggttaccagaggtggggaatggtagttgggggttggtgatggttaatgggtacaaagataaagttagaaagaatgaataagacctagtatttgatagcacaatagggcgactatagtcaataataatttaatcatatattttaaaataactaaaataatatagttggattgtttgtaacacagaggataaatgcttgagaggatgggtaccccatattacacaatgtgattattatgcattgtatgcctgtaacaaaatatatactccataaatatagatacctactatgtacccacaaaaaataaaagacccctaaaaatccttattattccaatttcaattagtttaaattgaagtcctaatttcacatatttaaaaggaggataatcatgacaagattgttacaagcaatataaataacacttgttaaccatctttggttcaaaaatcaataaacacttgctgttattaaaattatatattgaaagttatgaattaaagtttaaatagtgtccctctatatctctatttaatgtaaatgaaatttaaattataaaagaaaaactaagtgcccgggacttggaagaaatgcagttctctcattttgcatgtctttatgtagaaacataatttttacagctttgatgaagctacatattttggaaacagagctttgatgacctactttatcaaattgccaaatcacttttataaaattgcaaaaagactctcaacttgattagaaaagcactagagattattttaaatataac

SEQ ID NO: 76216 - DNA, 1161 bp, Homo sapiens
ttcaaggactgtttctactttaaatgcaagtaaagagtttcacttgctccagaccaattgctctaacagccagtaccacagccaaaatwtgaactagtccctcatcattaaaaccaattcctggccaggtgcagtggctcatgcctgtaatcccagcactttgggaggccaaggtgggtggatcgcctgaggtcaggagtttgagaccattctggccaacatggtgaaaccccatctctaataaaaatacaaaaaaattagttgggcgtggtggtgcacacctgtgatcccagctacttgggaggctgaggcgggagatggtttgaacccagaaggtggaggttgcagtgagccgaaattgtgccactgcactctagcctgggtgacagagtgagactctgtctcaaacaaacgaaagcaattctttatttctcaattcccaaattttattacaaaatattttttaaccttgaccctcaatgctgtatgtggaaattaagtttaaaaaaacaaaaacaggccgggcgcggtggctcacgcctgtaatcccagcactttgggaggccgaggcgggtggatcacgaggtcaggagatcgagaccaccctggctaacacggtgaaactccgcctctactaaaaatacaaaaaatcgggaggctgaggcagaagaatcgcttgaactcaggaggcggagcttgcagtgagccgagattgtgccactgcactccagcctgggcgacagagtgagactccatctcaaaaaaaataaaaaagaaaaacaatgaactacagtgttaaacaaatgtcttgtcttcatctttataacggggacaagaaattacttgtatctctaaatagtccaatctctaaacagcctccttatttgaaactggctcccctttgagatttgatgaggctggcagaaaaggtatgggacggtaggtgcacacagcacatgtctttattagtatcaagcccatacctactatgcctattctaagtagaaacaactgcttttagactcagattcatgaacaataaccataaagtggtcatgaaaattagttgcaaagtaattggttttagtttactacatttcaaaaataagaactaaatcctcaaatttcagacaatgccttctcataacaacatcagaaaac

SEQ ID NO: 76217 - DNA, 978 bp, Homo sapiens
cattccctagagtatatactcagaaatggaactgatagtattacatagggtgtgctcatgtttcaactttattagtttcataaacattctcctaacttccttttaagtgactcttcaggttaacaagtattctcagatagtggctaatgttctattatgccccacatatttctgatttcactaattaagttgtacgcttttcaaagtcctttgcttatgttagtatgtagtatggtcatatggtaacatatgagactgatgaaatctcagagaactgtaatatctacagttaagttgaatatagaaggactcaatttaaaaattgcctccaaattagatacatgcaactataattacctagagggatatactaaaaccaaaggattctgcactcagactccttcaaaaaatttttagattttcactccattttaataaactgaaaacagaaattgcagctgatgaattacgggtgccgattacataagaaagagaatatggaaatgcaattttaaaaatactaakgaaaaagccttgcccctatatattagcacatattggcatatgaatgtgcatttggaggctaagttaaaatatttatactatttgcttctactcattctagatatcgcacaaatttggcgacaatgctttcttttgataagtgtctacatatcaattccttagtgtgtaatactgtttgccacattttcttttttttctgccagtggtctacacgttcagagaaacttccgtagcaacaaactatagaaatggcccccgaaagaatagtcttgccacattttatcattcacttccataaccttaagaaacaagaaaatcataattttatattgcagtttaagtttttcagtcgtaatctccctgtcttataaagtctcaagtaaattgcctgttagtttaatatttatctcatccttctttaaaaacagaaatcacagcagataaataaagaga

SEQ ID NO: 76218 - DNA, 559 bp, Homo sapiens
tctggatcaattagagtacgaagaagtcccattaactgaacagcgcctcctagctcaggatcagtatcacagatcatttgttcaattaccacattaataagaagaatatcctggtggcaaaacaaaacaaaacaaaacatgtttccattagacctggtttagatctaagacaaaaacaccaactgaaagagcaaagtgagaattatatagagaaaaaacgaagaatggaatagcttatttaaacytctattcctaatgcttttgaaagttctataaaatactacacactagagtgaaaaaaaatcccactccgagaaaaaaaaaagaagaaggaggaaaaaaaacccacaaaagcagagcatgcttcaacttataggaagtggaaaacaaaattctttagcagtagttcttgttcagtagaggttctaacagaatctcattttgggtttcagactcaggcgtaaatttagaggttgactaaacaagcaagatcacatgaccctaagacataaattatctcagcctctaactagtaaatccttcctaacaaaaagaaaaa

SEQ ID NO: 76219 - DNA, 559 bp, Homo sapiens
tctggatcaattagagtacgaagaagtcccattaactgaacagcgcctcctagctcaggatcagtatcacagatcatttgttcaattaccacattaataagaagaatatcctggtggcaaaacaaaacaaaacaaaacatgtttccattagacctggtttagatctaagacaaaaacaccaactgaaagagcaaagtgagaattatatagagaaaaaacgaagaatggaatagcttatttaaacctctattcctaatgcttttgaaagttctataaaatactacacactagagtgaaaaaaaatcccactccgagaaaaaaaaaagaagraggaggaaaaaaaacccacaaaagcagagcatgcttcaacttataggaagtggaaaacaaaattctttagcagtagttcttgttcagtagaggttctaacagaatctcattttgggtttcagactcaggcgtaaatttagaggttgactaaacaagcaagatcacatgaccctaagacataaattatctcagcctctaactagtaaatccttcctaacaaaaagaaaaa

SEQ ID NO: 76220 - DNA, 1016 bp, Homo sapiens
ttctccttagtaaagataaatataaaatgagaaataggcaaatttaaacagctaaactggcagatttttatattactaatacagaaaatacaaagaaacgaggtattcatacattgttggtaggagtatcaaaatgaactgtccttttgcagaatgacacgcacaatatctaccaaattaaaamacacataccattcaatacagcaattccaccactaggtatctaatctacaaaaatactccatatatgagtaaagataaatgaacagagatgctccccgcaatagtattttttgtttgaaactatggaaacacactatagggaacatggttataatgatccaaacaataccttactttaaatgtccttacacagaacaatggcctccacctattactaagtggaaaagagcagttatatgttggatgttctaattcaactaactttgtaaaattccataatgctgtatttatggtgtgcatctctcttatctttacaaaactaagagcttatttacaggcattcttcttagtaccaatgttttatctctaatttctcctgtctataacttcccattctaacatgtcactggtaatgatttgcaggaaattagcactattataattccatcaaataatttcaatgagtcaattgtctaatcacacatatgcaccacaattagggctatcaattttctcaagatctgaatttacaattataaaaaacaaatacatgacaatagtagctactctgagcctacagaggtaataacattgcaagaatcatacctgtataatcagttcatgagcatggctaccatagctaaaaagccagtattgctggttcttatctcttcctctaaatagtcccctcagttacctttctgagtccttacattccttcagggatgtacttgatgtttttttttttttttttttttgcatttttgcgggttcggggctaggggaagcaaagacagtatgactgaccagattctaattccccaaagctttac

SEQ ID NO: 76221 - DNA, 1016 bp, Homo sapiens
ttctccttagtaaagataaatataaaatgagaaataggcaaatttaaacagctaaactggcagatttttatattactaatacagaaaatacaaagaaacgaggtattcatacattgttggtaggagtatcaaaatgaactgtccttttgcagaatgacacgcacaatatctaccaaattaaaacacacataccattcaatacagcaattccaccactaggtatctaatctacaaaaatactccatatatgagtaaagataaatgaacagagatgctccccgcaatagtattttttgtttgaaactatggaaacacrctatagggaacatggttataatgatccaaacaataccttactttaaatgtccttacacagaacaatggcctccacctattactaagtggaaaagagcagttatatgttggatgttctaattcaactaactttgtaaaattccataatgctgtatttatggtgtgcatctctcttatctttacaaaactaagagcttatttacaggcattcttcttagtaccaatgttttatctctaatttctcctgtctataacttcccattctaacatgtcactggtaatgatttgcaggaaattagcactattataattccatcaaataatttcaatgagtcaattgtctaatcacacatatgcaccacaattagggctatcaattttctcaagatctgaatttacaattataaaaaacaaatacatgacaatagtagctactctgagcctacagaggtaataacattgcaagaatcatacctgtataatcagttcatgagcatggctaccatagctaaaaagccagtattgctggttcttatctcttcctctaaatagtcccctcagttacctttctgagtccttacattccttcagggatgtacttgatgtttttttttttttttttttttgcatttttgcgggttcggggctaggggaagcaaagacagtatgactgaccagattctaattccccaaagctttac

SEQ ID NO: 76222 - DNA, 1016 bp, Homo sapiens
ttctccttagtaaagataaatataaaatgagaaataggcaaatttaaacagctaaactggcagatttttatattactaatacagaaaatacaaagaaacgaggtattcatacattgttggtaggagtatcaaaatgaactgtccttttgcagaatgacacgcacaatatctaccaaattaaaacacacataccattcaatacagcaattccaccactaggtatctaatctacaaaaatactccatatatgagtaaagataaatgaacagagatgctccccgcaatagtattttttgtttgaaactatggaaacacactatagggaacatggttataatgatccaaacaataccttactttaaatgtccttacacagaacaatggcctccacctattactaagtggaaaagagcagttatatgttggatgttctaattcaactaactttgtaaaattccataatgctgtatttatggtgtgcatctctcttatctttacaaaactaagagcttatttacaggcattcttcttagtaccaatgttttatctctaatttctcctgtctataacttcccattctaacatgtcactggtaatgatttgcaggaaattagcactattataattccatcaaataatttcaatgagtcaattgtctaatcacacatatgcaccacaattagggctatcaattttctcaagatctgaatttacaattataaaaaacaaatacatgacaayagtagctactctgagcctacagaggtaataacattgcaagaatcatacctgtataatcagttcatgagcatggctaccatagctaaaaagccagtattgctggttcttatctcttcctctaaatagtcccctcagttacctttctgagtccttacattccttcagggatgtacttgatgtttttttttttttttttttttgcatttttgcgggttcggggctaggggaagcaaagacagtatgactgaccagattctaattccccaaagctttac

SEQ ID NO: 76223 - DNA, 501 bp, Homo sapiens
aaagaacttttaatttctagacaatggtttcagaattaagagctgaaaattgttttcttccagttatataaatatggtacatccatacagtggaatgctacacagccattaracatgaacctgggtctctgcatctatggacatgggaacatattattaagtgggagaaggctatgaagcaataaatatgatattgtatgtattaagcttcttcaggttgtaagcaagaagaactgattctagctagcataaacagaaagataaaagaaggaagaggaaaaagtcaaggcaaggtagatggatttactaggaagatactatgctatttcttggattagcattgaagaacaaatgaaataactaagaatgaggaaagggaagaaaccagaatagcttcagtgaccattgcacaaaaaaaatttccaaattttttgggagaattgatctagattggtctagactggatcaaatgtctaccaaaaccaattatctttggctcat

SEQ ID NO: 76224 - DNA, 957 bp, Homo sapiens
gcatgcatcaagtgttgtgtgatcttgtgcagttcttcttagattgagtttttggctcctcgtgtgcaggccttctaaaatcacaatgtccctgagttgggaaggaacatcaggggctatctggttcattatcctaccccccaccgcctcccacgccccacatttctggcagcctacgagtctttggtccctccccagtgctacctggccagctctcagccttgggaggccacctgcccgtgtttgacctgggttaatgaccgccagttcctttcccttaatacractcatctgctctcctgcatgctcgctccttgggtgagagctgccctctgcaacctcataacggaaaatggcttgacttctgccacctcctcctccttcccatgaaagaatctggtcttttctatctctctattatttttaaaaccagattaggttggttgtggtggctcacacctgtaaaaatcccagcaccttgggaggcagaggtgggcagatctcttgagccccaggagtttgagaccaacttgggcaacatggggaaatctctaccaaaaaaatacaggaaaaaaaaaaaaatagctgggtatggtagcacacacctgtagtcccagctacttgggaggctaaggtgggaggattgcttgagcctgggaggtcaaagctgcagtgagccttaatcactccagtgcactccagccggggcaacagctagaccttgtctcaaaaaaaaaaaaaaaagaaaaataagaaaaagaaaccagattaaacattcctaagtaattctttttgtgacttttgcctgtttattaactatcctggctacttaaaatgaatttttgagttatgaatacatttagatggttttaaattcaaagaagtctcttttttctcagtcacttccatccccagccaaacagttcttatccccagagtcagccagtgttaccagtt

SEQ ID NO: 76225 - DNA, 474 bp, Homo sapiens
tgtcaattctggagaccacatccatgaatggtggcatagaattgaacatcccttttctacgtgttcagcccaatgaatttgtcttcttcaaggtgtaccaccargtaagatgatgaagaatgacagggatttaaaaatgcagatttgtggattgggggaagagaggcacaaaagatgaaaaagcaacagcctctgactatattattttcccaccacttcttgtcccggaactcaaaccccatcactgactgccatgccaaaagctactaaggcaccatgaaaagaaagactggggctggaggtggggggcaggttcataatatttaagagctccatgagggaggagtggctgctagggccagccatgtatccatccattcaagcacgcagggaactgccaggtctgaaaccacctgcctgcatgcttctgtcctatgtttctagacatcagaatacacagcaagcccattcttt

SEQ ID NO: 76226 - DNA, 989 bp, Homo sapiens
tgtgcacagctgcctactccaccaaaaagaaatatagaatgctcacttacttttccttctcctcctccactaacagcagagaagcccttgttgaccacggagctatgagttcttagcagtgcaggtgcagawcccttggggcatatgaaacttacttaagcagtgaagtaacttcctgcaggtcaacttaggaaatctcacaaggcaagggtctaggctggtgacaaaagctagggttaagccaagttgcttaaactgtatccactcatgtggttgctattccctctcaattttataatgtttgggtgctagatagacagaggaagcctaagtatattaaaacatatgtagtgttaacaatcaaaatttcaaagaaaagacccacatttatgacatttttggtcattattatacatgtgacagttatgatgatattttctgccagttattctacttagtattactttgatatagccagaccagttttaagttctccattctttttgttcgtttttccagcatccataaataccattaagacaagttgtcaggactcctgaagggggcctcttaaataaaaccctctgtcctccctggaggaaagaaaggaaagaggagccctaaaagagaggaggccttttggagccagtgactgagaacacatgcctgaaaacagtagatcaataagctatgcaactcactgtttacccacctgactctctctgcttcagggctcccacccaaaggtaaatcaagcctcttccaagtccacatcctactatgtgcagaaaagctagaaaacttaatgctgcagccttctagcttgtaacttccctctaagttatgggggttaggaggacagatgcctatattaaagatgtaagtggcttttctcttacctttctctcccttttcagagagctcaatacccaactacgctattcaccattcctcttctaggaaagaaagactgatgtggccttgctcac

SEQ ID NO: 76227 - DNA, 1450 bp, Homo sapiens
ttcctccctctggtgtcaggaggtgtcctttgaggaaattatgccatgtaagcacctgaaccaatccaggcagccactggaccaggctggctccaggtggcctgtgcacccctactacccctrcagcaaactccccatgaccgctctgcccaggccaccagtgctccccttgcattgaaaaagctctttcctctgattctgctctctgaaagggcactgtagcagggtggcttggatcatgatatgttaagctatttttcctggcacagggcacttggctcaggggacagagggaaagaggagggagttcaaacaccagccactatctgtttctgcaatctataatcccagatcctcagactctctttctgggtctagcccagcagccgttccttgcaattggtcttctgtcacggatatctctcctcccctatgttgatagaatttcattcttaaacctagttgaagttgagttctcagaaagtaccttaatctctatgtatctgtctggctacaaatagattccagaggttgtcacacaatggacatagccaaatcttagctctgacatggcaaggggggcctccattataaatgcattatatacccctgggaaatttttttaataccatctgagaacattgcctctgttacttctacttactgacccttgagatagttctcatttaccagagagggactgcctggagaatgtcgagtgtgttattattccttctagggatcagtagtcatatataaaagggtaactggaaatattttgaactcttagaaaaaggttttaacatggttctaataacaaagttggcattaaacatagaacaaagaatgaaatggaatttctggcccaacaatccatcagattttttttttaatgctcactattccttttctctatactctgtaagccctctcttccccctggctacaatacaattatgctaattgcaagtaaacagcacaatttagataattgttaagaattttaaaaattaaaaccatgggatgctgaaggactagtttagtagacaaattattattgctgttatgaataactatgtcacagacactgaactaagtgcattacatacactaccttaccaccttataaggtaggatctattaaaacatcaactttacagagaggaaattaaatcccagacacgtctatgcctaacccaggttcacaaacgctaagtatgaggacttgcagagaaaaagtaagagatatatgaatctgtcacatgcctgagtggttacagccattgtggggacctacatataaaaggagaatgaaacactcaagcagtcactcttccccatctgtctatgagcttgaggctgggctaatcttaccctactttgtatcctccacagcactcccccaaggcaggatgcactgtgtaaggtaaaatatactggacatggtgag

SEQ ID NO: 76228 - DNA, 766 bp, Homo sapiens
catactttctgaaaaaaacaattatctggggacgtaccagagcaaaaataaaaagtaacccaagacaaagaagattatggcagccgagaaaaaagtaaactttacctagaaatctatgaaaaataattwttggatgagagctgtctagcaagcctaggaaatcaacagtccaaatagtaataggaaatcagagggctctgaagagtaagtttcaagtagaaatattcaagtaggaaatattgttattaagaactggatgatctttgacaagatgaaagctgaaggcatattataattctgctcacaaaaaaagtgaattagaaattcaaattcttgaaaagatgtgtaaagaaatcatggtataaatataaaacaatctataatgttgtgtaatatttaaataaattgaagaagagaatctatttgaccttgacacttgaaatattcttcttcaattagtacaggtttattaacacacagttatatatctccttctttatgggtccaatcatgctactttgtgccttaggtaataatattcacattattataatagtgcaaaatccttttacttaaaaaatatcaatcaacctattggcaaagtacagaataatcagtcattgagaacagaacccaactgatagaaatattgacaatgtaaaaagttgggaaatgcagatagcacagagacagagggagtatgtggggcattctttcttgttttataggactatgaatccagatttctgagtttatagatcaagaa

SEQ ID NO: 76229 - DNA, 766 bp, Homo sapiens
catactttctgaaaaaaacaattatctggggacgtaccagagcaaaaataaaaagtaacccaagacaaagaagattatggcagccgagaaaaaagtaaactttacctagaaatctatgaaaaataatttttggatgagagctgtctagcaagcctaggaaatcaacagtccaaatagtaataggaaatcagagggctctgaagagtaagtttcaagtagaaatattcaagtaggaaatattsttattaagaactggatgatctttgacaagatgaaagctgaaggcatattataattctgctcacaaaaaaagtgaattagaaattcaaattcttgaaaagatgtgtaaagaaatcatggtataaatataaaacaatctataatgttgtgtaatatttaaataaattgaagaagagaatctatttgaccttgacacttgaaatattcttcttcaattagtacaggtttattaacacacagttatatatctccttctttatgggtccaatcatgctactttgtgccttaggtaataatattcacattattataatagtgcaaaatccttttacttaaaaaatatcaatcaacctattggcaaagtacagaataatcagtcattgagaacagaacccaactgatagaaatattgacaatgtaaaaagttgggaaatgcagatagcacagagacagagggagtatgtggggcattctttcttgttttataggactatgaatccagatttctgagtttatagatcaagaa

SEQ ID NO: 76230 - DNA, 1095 bp, Homo sapiens
ctagttccctcttgcacaaaatcaatgtctatgtatctttaacacatgtagggatcttggctctcttagaagagctatgtaattaaggtcctcagtggtcgtggatttcattctaatggaggacatttctcctttagttaatattatttcctgttacagaatctggcccattaactttctcactgcacrtggtttagaacttttggatgttcagaacatttaaaatgattcgggaaaaggagagtggtggagggagagaaatagcaaattataatatatccaagtatttaagtcttggctttaatactaaatagcaaactactcgaccattcttaaccttgattacttcattcctaaacagtggtaataatattcttatattttctagggaaattattgtataaaataagtgagataatatatgtaaagatattttgaaaattgttaaaggatgtacaaatataaagtggcctcatcattatatacagatttccaaataaaataaagtatatacagtttgactaaataatcatgtcttacagaaaagtcagggcctaagcaaagttatgaaattattgaagtgtgattagatatattaatcaggttggattaggttatgctgcataataaactcaaaaacacagtggtgacttagaacgaaaggatttaatttttctttcaaggttcatgtcctttgagaattttctgggagactcaaagcaaaggctgaatgaccaccttctggaacattatattaccacatcagagggaaaatggacaacagagggcctttatgctctggtacaaaagtggcacactctatttccattcacattccttggccagaactagtcatacggttcaccaacaattagggccataggaaatgcaatcatataaggtgtgcagaaagtggagagcaggagcacacctctaatgactaccccattaagatttaagaagattcctaacttacagaaacttccatattctccttttaggagctctccccttcagatttgacttgcatatcatttttgtagaaatttaaatatttgttgatagaatgcagaattgtaacaataaacacatacc

SEQ ID NO: 76231 - DNA, 1095 bp, Homo sapiens
ctagttccctcttgcacaaaatcaatgtctatgtatctttaacacatgtagggatcttggctctcttagaagagctatgtaattaaggtcctcagtggtcgtggatttcattctaatggaggacatttctcctttagttaatattatttcctgttacagaatctggcccattaactttctcactgcacgtggtttagaacttttggatgttcagaacatttaaaatgattcgggaaaaggagagtggtggagggagagaaatagcaaattataatatatccaagtatttaagtcttggctttaatactaaatagcaaactactcgaccattcttaaccttgattacttcattcctaaacagtggtaataatattcttatattttctagggaaattattgtataaaataagtgagataatatatgtaaagatattttgaaaattgttaaaggatgtacaaatataaagtggcctcatcattatatacagatttccaaataaaataaagtatatacagtttgactaaataatcatgtcttacagaaaagtcagggcctaagcaaagttatgaaattattgaagtgtgattagatatattaatcaggttggattaggttatgctgcataataaactcaaaaacacagtggtgacttagaacgaaaggatttaatttttctttcaaggttcatgtcctttgagaattttctgggagactcaaagcaaaggctgaatgaccaccttctggaacattatattaccacatcagagggaaaatggacaacagagggcctttatgctctggtacaaaagtggcacactctatttccattcacattccttggccagaactagtcatacggttcaccaacaattagggccataggaaatgcaatcatataaggtgtgcagaaagtggagagcaggagcacacctctaatgactaccccattaagatttaagaagattcctaacttacagaaacttccatattctccttttaggarctctccccttcagatttgacttgcatatcatttttgtagaaatttaaatatttgttgatagaatgcagaattgtaacaataaacacatacc

SEQ ID NO: 76232 - DNA, 563 bp, Homo sapiens
ccatccacaagaaaggtagtggcattctgctagacttcatgtgactattatatttattaaggaataaggcagaggaaaaattgtactgtgattttagaagtactcaaaaagtctttctctcacaaacatcttacattgattgttaatgaatagctctcaaaattatacattagttctcttggctttgggctttgtggcctcccagcatataaatatttttccaagcaataacttttagaattatgagtttcatttttatgagtctttttttttcccccccgagacagagtcccgctttgtcacccaggctgcagtgcagtggtgtgatcttggctcactgcaacctccactcccagggtcaagtgattctcctgtctcagcctcccaagtagctgggactacaggcatgcaccaccatgcmagcctaatttttgtatttttagtagagacagggtttcactatgttggccaggctggtcttgaactcctgacctcgtgatccacctgcctcgtcctcccaaagtgctgggactacaggcttgagccactgtgcccggccacaa

SEQ ID NO: 76233 - DNA, 1045 bp, Homo sapiens
gcattaatttaatgaatgttggcaaaatcattttgataatgtcgaccttgacaatacaaggtggatggcagacaagcatcctcctacagctaagatgggacagaaccaaagccataactcagaactcagttcaggactttctactacattagttgaatcattgattacaaacacaactttggtcaggtggattcacctttttttaatccctcatcaatgaaatagtagagagtgggtatgatggagtctggcctaggtttgaatctcagctccataccagtgtaatcttggacaaattatttaatcattttgcatctcagttctcatttataaggtggccataatgttccttgccttatggagccattatgaagattagatgtggacaagtgcttagcacagtgcccagcacatagcaaaccctccagaacttcttaacaaattcatcagagaatgttgctttagattaaatctatttataatctgttaaataaattttatttgcatgttactcccaaaggtattgaggttataagaagaaagttaacattgttacgtgactatgcttggagatacagggtattttaaaatttcctagtattttaaagccaaacagttacaatgttttagaaattgactccctcatagcagctcacagagagctcctggtctatgtttctgctttgcttaaaagcatttctgtcctgcttttgcaccagtaactgtcctttctgaatctattctctttttttctaaacagcatacttttgaattaagaaaaaaatattgtagagagtagaataatggttaccagaagctggaaagggcagctgggggtgggttgggggaagtggggatggttagtgcttacaaaaaaatacttagaaagagtgaataagatctagtatttgttagcatagaagggtgactataatcaataataatttaattgtacatttaaaaataactaaaagtacataattgtattgtttgtwacagaaaggataaatgcttgagatgatagataccccatttaccctgatat

SEQ ID NO: 76234 - DNA, 997 bp, Homo sapiens
atcaaattgtgtgctacggaggactttatagatctcctgaagctgcactcaatagaattcttggctgaagatccttgtacagtattcccagattaaggccccctgatctagagggatgataataggtgcataaatctttaaatcagtggttaagtctgttagacccagcacctcatatgtaaaatcagtgcacactattatcctgaagtgaaattcatgtgtatataacttgcttacctacttttttttaaaggaaaaaagtcttaactggagaataatagagataatataataggtgaaataagagggaagtcgttttaaataaaatatttgttttagttccaacataactacataatgaagtagtctgataactgaacctccacctagatgtgcacatgataacttttaaattcaggctattaaataagcttttctgaaatggggcacaacacttagtaaaagttctggacaaaaatatatcttttcctcaatttacatatggtattcctggaaaattcagaatacattaaagttgcacaaaaaatacttggtgctagataatgttagaaaattgagttcaattcaaatgttcactattatgattagattattttaaaattacataaatatttggcaagatatttgaatgtcatttgagatgccagctcttagatgtgtagtagtgccagaagcacttcatcagtaattgttccaaccaaagtgtcccattaattttcactggtacagcagtgctcactggttccgtgcccattgaaaaccagtcctatagatcagtgcttttcaaatttattgtgctcatgaaccagctggtcactctaattatgcttgcagtcaggtctgtgattcagcatttctaagaagctcccaagtgattcagatgawccttatagtccaggtaccaccttttaaaaatctattttttgttgataattgtacatatttatggggtatgtgtgatattttgatacatgca

SEQ ID NO: 76235 - DNA, 656 bp, Homo sapiens
gatcccacaggagcagggaaaaaaaatctgactcttgcccttcttttgtttcacatctttttttctccttagagggagaaaaaggatttttaaaaaaaatttttaaggctttgatcctgagaaaaaccagttaaactctaagacttggtatttttcaacaaaaaaatcagatattcctcttcagaaagtttagtctcaatattgttatgctataaatcagtgatttctaaactttcaaattytatgaacctgaatattaatcaacaatgtaaaaaattaggaaattgacagagttgccaactttttatattccctcttttcattttctcacatgataattttaatacataatcactacattttatcactttagtatcatgaaaagacaatttgacaatgaagtagtaggaagaatcactgaataaaatgcagtatcttattaaattgaataaatttgacttaatacaattcccaatactttgtctttcttgtttttgccagcccagtggaaatatcttcactggttagcaccaactgatacacattaaaagcatattccgaatgagcagagagacttttttcagttactggtgagtttcccattattctttgcaaaattgtattagagttttcaggactagaaaatatttgattag

SEQ ID NO: 76236 - DNA, 1532 bp, Homo sapiens
tcctttttagtaatttttggtacctgatatgtttattgtacctcaatctattattatctcatatctatatctatatctatatatgagagcacagagtttggggcacaaatactcctgaggggcatatgggttacatagtaattatattcttacatttcattagcatattcatcttttgggaaaatatagatacacattatcttgtacagtccactcaaaaactcatcgaaatatgtggaagctgtggcttactaaagggattttccccaaaattatacaattaacaaagtaacaggattgagattataacctcagtttccagactctatatccaacgcttttatctaccacataggccacgtaaaacaattaataaataatataagaaaggatataatttagtgcatatagatccatgcttggcacagaccaggctctccacaaatatttgttaaatggttgaataaataagtgctaaaatgtggggtacactcaatgcactgccaaagttcatatagggaaggcagagacctcctgggcaggagctgtcagacaagagacagaggcatcccaagcaaggcacagcggcgaactgcgggggatatttttacaraagagcgaggaggctactcaaagagacaggtgatgtttgggacaggatgggaaacaaaatggtaggagattattacaaagaatttgccagctaggttgaggatcttagagccgacaggagaagaaaaagggatcccttcaacttcccctgccctcatttattcattaggagaagagagagtggaaaaactgtattttagtaagagtaacccagtgtggtacatgtctaggaacccagggtgagttagacggatgcccctccagactggcacactggcttgattccaggccataatgatagctccctcccgcaaactttccatcatttcctgtacatggttaaattttttttatgttatctactgcattgttggatgaaactggaatttattttatgtcactatgttttcatatgcttaggcaaaacaccccagtgccagccttttttaagtcccatttccccttgaagacaaagataaaaaattgtgttttttatggcacagtcttttggagactcagaaatcatttactaattgctcttttaaaaaaattaacttccacatatgtagaaggtacactccagattcttacgtgcatgtattgcatactggtgaagcctgggcttttagcgcaccatcgttgaaacagtgaacattgtatacaataggtaatttttcttttcatttttttggagacagagttttgcactgtcatccaggctggagtgcaatggcgcaatctcagctcactgcaacctccacctcctgggttcaagtgattctccggcctcagcctcctgaatagctgggattacaggcacccgtcaccatgcccggctaatttttgtatttttagtaaagacggggtttcaccacgttggccagggtggtctcaaactcctgacctcaggtgatgcgccc

SEQ ID NO: 76237 - DNA, 891 bp, Homo sapiens
aattaatcaagtgattctcaaaactcacaaagtaaatagccagagtttaattcaataccatcaagttttcagttatagcgctcgctcatactctgcaatgccttctcttcctcttaaaactgctcagtggagtccaactctggaaagtaatagttacttcttaataatagttactgtcccacaaattctatcatattcattccaagaataaaactttcacttttctgcataggagtaagtggaaaatggactttcattccttttcccaatttaggatgaatatttattcagtagctacgttgttttggcgccgtgtcggratacaggtgcagttcctttctagatttcacattgtctggaatgttccatgtgttgatccaaaatatactttatgttccgcaaatgagaggaagagcttggaggcctggattcttttaccacagtagtttttaaacaattatttgaaacaattcagtgttttgcatattttatttacattttcatgacccatgagatacttttccccatatttgacttttactattttgataactactaatgtaatatataaatctctgaaaaatgcagaaaatagcaagaaaagaaaaatcaccagtactctgtcccccagagataagacctttttaatgattcagagtaatctgtcttcgagtttttagtcaattttaacttttttgaaagttagttttgcaacctgctttttaaataatattttgcacgtcctccattttcaactgcctagggtgggcaaacaattttgttagctactgtttctcatcaaaaatagtccaggatttgattatgtgaacttgtggggatgggggacattccaggaacagaaatatcagttgtggcatagaggagagaaga

SEQ ID NO: 76238 - DNA, 1677 bp, Homo sapiens
actttgctgtgatgtgattcagtaaggcccattcattccattgagatgcccctaaatgtcattaactataaatattttttctcctaaagtagtttctccaggagagaatcatgcaatcttccgttggggagaaagcatactgggggttaggagggctgtagggatggttggggaaagtgagggttataaggttggatgccagagaacagaggagggactcgtgtcacagtgctcacctgtaccctccattatgcctacagttcttgtgccagaacctctcttcctctttctatttctccaaagaataaacctccattcttttgtagggtaatggaggcatagtgacttcactggatgaaggaatggaataracgtggaaatgttcttgatacaggttttcaggcagttttcaattctcctcatccaaggttcacctgatacatccaattcctgaactttctagggttctgtagaatgaatcaaccctcttctcattgctctctgcattggtagacctggatttttgcttcctccactttactaagcaagttaccactggtccttctacttcccaccttctaaaaatgtggacaatcttccatccattgttgtctcctctttgattccctttgtactggtgagttcgtgccatgataaattcctattttgttattttgatgtttcaaaggggaacagagggaaagatatgcattggatccactttgtttaactggaatgtgaacaaaaatttgaatctggatgagagaagcaaagtccaagattgtaattagcattccagcttcctgcccttattcctttccagaccacacgtaaatggctcctgggtctgagtgctgtgcacctaagtttgttttgtaatcgggagaaagacatgatcctaaaggaatagtgtatgggaaaatgtgaggtagctgctcgggggagggtgtgaagagaagcgattcatatcccatttctttatataatatgtaatattatatctcatctgcaccaccccacatgcctttgcaagatggatctacaaaaatggaacaacttcaagtagacccagtaacagagattgccatatggattggctacaaatgacctccatttcaccactgaaaatcataattcaggtacaacataagatacaaggatgaatttaatagaaaattcagtcagaaaacagaagttagttttcatatgttcagcaagtcatgttcaacacctattagatgccagacaccattctaaacacttatttcttaggtttttcctgctaagttatcattgacaacctcaacaggagaatatgtgtttttgacagaaatgcagacaaacccaagctacaatgacgaagtagggacctgtggttgactttccacagtaatagaactgaagggtgactgtgaagtataatctacctaggttgtaattgacttatctcacagggatttactagttttaccatgtttgcatgataaaatattacttagatatataatagaattatattttatcattctataactaactggaaattaatcaatttgtccaaattaacagtttatttatcactgttcactttgtgtgtgtgaaaccatagccagagtgctggtaaagtttatttctcttctcaagcagtgatgtagtagaaaaggaagacccactaga

SEQ ID NO: 76239 - DNA, 1677 bp, Homo sapiens
actttgctgtgatgtgattcagtaaggcccattcattccattgagatgcccctaaatgtcattaactataaatattttttctcctaaagtagtttctccaggagagaatcatgcaatcttccgttggggagaaagcatactgggggttaggagggctgtagggatggttggggaaagtgagggttataaggttggatgccagagaacagaggagggactcgtgtcacagtgctcacctgtaccctccattatgcctacagttcttgtgccagaacctctcttcctctttctatttctccaaagaataaacctccattcttttgtagggtaatggaggcatagtgacttcactggatgaaggaatggaatagacgtggaaatgttcttgatacaggttttcaggcagttttcaattctcctcatccaaggttcacctgatacatccaattcctgaactttctagggttctgtagaatgaatcaaccctcttctcattgctctctgcattggtagacctggatttttgcttcctccactttactaagcaagttaccactggtccttctacttcccaccttctaaaaatgtggacaatcttccatccattgttgtctcctctttgattccctttgtactggtgagttcgtgccatgataaattcctattttgttattttgatgtttcaaaggggaacagaggkaaagatatgcattggatccactttgtttaactggaatgtgaacaaaaatttgaatctggatgagagaagcaaagtccaagattgtaattagcattccagcttcctgcccttattcctttccagaccacacgtaaatggctcctgggtctgagtgctgtgcacctaagtttgttttgtaatcgggagaaagacatgatcctaaaggaatagtgtatgggaaaatgtgaggtagctgctcgggggagggtgtgaagagaagcgattcatatcccatttctttatataatatgtaatattatatctcatctgcaccaccccacatgcctttgcaagatggatctacaaaaatggaacaacttcaagtagacccagtaacagagattgccatatggattggctacaaatgacctccatttcaccactgaaaatcataattcaggtacaacataagatacaaggatgaatttaatagaaaattcagtcagaaaacagaagttagttttcatatgttcagcaagtcatgttcaacacctattagatgccagacaccattctaaacacttatttcttaggtttttcctgctaagttatcattgacaacctcaacaggagaatatgtgtttttgacagaaatgcagacaaacccaagctacaatgacgaagtagggacctgtggttgactttccacagtaatagaactgaagggtgactgtgaagtataatctacctaggttgtaattgacttatctcacagggatttactagttttaccatgtttgcatgataaaatattacttagatatataatagaattatattttatcattctataactaactggaaattaatcaatttgtccaaattaacagtttatttatcactgttcactttgtgtgtgtgaaaccatagccagagtgctggtaaagtttatttctcttctcaagcagtgatgtagtagaaaaggaagacccactaga

SEQ ID NO: 76240 - DNA, 1039 bp, Homo sapiens
tattggctttccattcttggaagtgctcctagggtcaataatacagcctaggcctacagtttaagacactcttggttgctttatacaggctcatttagaataaatttcatgcattgggggaagttaattgtggtatcagcttattatgaagttgttagagaaagtttgcttacattaacaaactggtgttctactgagattaatctcttcatttctatcatatgctccacataagacaaataaaacattttaaatgaaaatcaccatagatttctccatagctagtaaaagaactcaccccagattctgcaggagggaatagtatactctacaatacaatggcttgggaagaataagaaaacacattctgagtcaatgaagaatgaatatctgactgtcctgtacagaagtgagatattggactgcattacgaatacttacagcaaaggctaaactcttcttcaggcaaattttattttcaaagacgtctatatataaacatgttatttagacttcttaacaaaacattattggccacacacctctcacctgcataaatttacttgacagaaacatctgaattatgaatgtttaggtagcttacacttttagcatttaatacatttgaaaatgttatgtaagatcagtaagttttaagatcgctccattatagagaaagatacaggaagaactaaagagatttttctgaacttcctaaaaagaaatttctaaaaaggcaatgtacatatctcagtagtatgaacctaacagataaatatttcataataaaacaaaaagaacctcaaattggctaagaaaggtcataaaaatgactcaattgttaagttaactgataaatattaattgcagcccattatgtgtcagattctaggagtcccaacctggtaaaacctcaagtattgctcaacagattttggrtgggaggagccatctctctaaagagacagcactttgctgaataaggagcgaagtggctagtcatatctttgaatgcatcctctatatctaattattctca

SEQ ID NO: 76241 - DNA, 628 bp, Homo sapiens
ttgtatagtttatgttcgatgtgtatatagccattaattttaatatagtcgcccttactctcaggaacacctgctacctgaacaatccagttttaaaaccaactctccaagaattatttcctacttcttcttcctggttttcagggcattgcttaagcactgctttgtataagattcacgtgcctcctgtagttccaactgcwgcaggaggatttcttgagcccaggagtttaaggccagcctgggcaacatagtgagaccctatctaaataatgataataaaagtaatatgtttttaagttacaattaccattatattggttgaacatttgaaagattctagatgctttacagactatgactattggcctgcattacatgccatgaattctaataattgtgtgctgataagatgacattctgggtttcaaaggaaagatattccatttagaattagaaccccagggctcaggtgctaactatgttacttgggcaagtcacataactctgaaagctactgtatttccttctcgggaaagggagggtgataataattaccatacctttcttgcacctcaccaaatgaacaaacatctgcgagtggttgtcaggtgctgggaatagaagg

SEQ ID NO: 76242 - DNA, 582 bp, Homo sapiens
caaatatgtggttcttcatccactctctcatttagatatcactgcaactcaatttgagccccagatttttatgccatttgaaacttatgagctgctggtggtcttctttgagcatcagccagattagtacatgttctcaaaattccttccctttcccattggtccaatgctgagatatgcggtggctaagctaggcttcccttccgtgaagctggagcttagataagatttgaatccagctgccataactcttagtcaatgactcctcctatgctgcttgtccacactagacacccartaaatagttgctgattgatctgctgagatacagaaagatggaccagaccaaagcaaatgactttgtaactgatgaggagtgggcagagatgtaccagaaaggtggatgaggctgttggtgcatgtggccagaaatgaaataaagggctgagctgggagataatgaatagactccgttctactgaaagtccagaagtggtaagtcatattgcatgtttaaaatggtaagattcaagagtggtttctttccagacaagaaatgttcaaaccattcaggttttaagt

SEQ ID NO: 76243 - DNA, 582 bp, Homo sapiens
caaatatgtggttcttcatccactctctcatttagatatcactgcaactcaatttgagccccagatttttatgccatttgaaacttatgagctgctggtggtcttctttgagcatcagccagattagtacatgttctcaaaattccttccctttcccattggtccaatgctgagatatgcggtggctaagctaggcttcccttccgtgaagctggagcttagataagatttgaatccagctgccataactcttagtcaatgactcctcctatgctgcttgtccacactagacacccagtaaatagttgctgattgatctgctgagatacagaaagatggaccagaccaaagcaaatgactttgtaactgatgaggagtgggcagagatgtaycagaaaggtggatgaggctgttggtgcatgtggccagaaatgaaataaagggctgagctgggagataatgaatagactccgttctactgaaagtccagaagtggtaagtcatattgcatgtttaaaatggtaagattcaagagtggtttctttccagacaagaaatgttcaaaccattcaggttttaagt

SEQ ID NO: 76244 - DNA, 582 bp, Homo sapiens
caaatatgtggttcttcatccactctctcatttagatatcactgcaactcaatttgagccccagatttttatgccatttgaaacttatgagctgctggtggtcttctttgagcatcagccagattagtacatgttctcaaaattccttccctttcccattggtccaatgctgagatatgcggtggctaagctaggcttcccttccgtgaagctggagcttagataagatttgaatccagctgccataactcttagtcaatgactcctcctatgctgcttgtccacactagacacccagtaaatagttgctgattgatctgctgagatacagaaagatggaccagaccaaagcaaatgactttgtaactgatgaggagtgggcagagatgtaccagaaaggtggatgaggctgttggtgcatgtggccagaaatgaaataaagggctgagctgggagataatgaatagactccgttctaytgaaagtccagaagtggtaagtcatattgcatgtttaaaatggtaagattcaagagtggtttctttccagacaagaaatgttcaaaccattcaggttttaagt

SEQ ID NO: 76245 - DNA, 730 bp, Homo sapiens
ttatgtaatacaagaaataggatattacattaacaccttgaaagaggcctaaagcaaaagatattatctcgtacctcaattataccagatgcctggaaaagtgaagccatatattgatgacactactcttgcttttaaaacttgacaagattgagtggaaatttaaaaatctgagtagcctcactcagagacattttcatgcaatttaaaggcggaatggagtaattaccaaaaattaaatggaattcttatcatatgtccatgtcttttgagttgtatatcttttttttctgtaaggagtccatggccagagattagggtgtgaactgtaatattatgatataatatatattttatctctgccctgggttcctggcacacagcttctaaaatycttatagtttctgaagtgataagtgtctttttacatgctaatgaaatgcctggaggctgagggcacttggacagccttgggatgagtggcctgttatcaggaaaatcaaccatgtaattagaagattagaactttcagccccaccttcaacctccggagaggaaagagaggctgaaggttgagtcgatcaccaatggctagcgatgtaaccaatcataatgaagccgccataaaaacccaaaagacagggttcaaagagcttacagatagctctttggaggttcctggagagtgtcatatgatggaaaaggcatggccgctctttgcgcctttctg

SEQ ID NO: 76246 - DNA, 675 bp, Homo sapiens
aaataaatccaatacgggcataaacaatgagtaggctacagattatggcatgccacaaaagtgatttaaaggttaaaaagtagggggaaagcctgataaaaattatttgaaacagctgtttttatgataagatttagaaaagattagaacaatcattgtttcaaattggcactatttggtaaaagttccattacaataaatcctttaaatttttgtttaaatagaacatgatatgaactgtcatataagatagtagttaacaataatagcaaagatttagagaatactttatgtgtcacagtctgtttaaagtgctttaaacgtataactcatttaatcttaacagytctatgggatgttctagtatctccattgtcctaggaaactgagttaatggcaaggtcacaccaggtacaggatggagctggggttaaaactcaggctggctccagagcccactttctaaatcactaatgccacaccatttgctgatagtgagtgctctgtcaccaaagatgttcaaataggagttgcctgggtgacagaaggggaggggcacaaaggtgttccagccagagggaatgaccagtgagaactgagagagagcggtcagatgcggctgaagcatatgctgcagtgggaaaggctggaaaataaagcagggaacagagggca

SEQ ID NO: 76247 - DNA, 566 bp, Homo sapiens
tcagtgtcctgagtggtcacattgctaggatctagaggaattatggctggaaacaggatatctgactgttggtctagtgtggtcaccatctccccagagatgcaatgtctggagtgtccatttccggcccagatcagcttctacacaaatggaagagccagaaggcagatcacatctagctctttgttttcttcaccttttgggttctagctggagttggggacaaggccagtaggctttgtgactcataccacctgcactccagtggagtcctgggtggagaattcttctaaggtatggaaaggacaaatggtctccgagcacctctgccgtggaggggagtgagaagtagaggatacagattccaaatcagaaaaacaagtgcccttctcaagacagtgattacattacctctggagggaaagaggaatacgaratggagggtggtggaggaaacttctatgtgatctacagacctaaagcaaatactgttcaatgttgttatctgacaaagcaggataatgggtacaaaagcatttgttatattcttctgtatacctttgtgt

SEQ ID NO: 76248 - DNA, 599 bp, Homo sapiens
attgagtctgtgaggtggaggttgcagtgagctcagatggtgcctctgcactccagccaggggacaaagtgaaactccgttttttttttttttwaaaaaaagtcccaaatctcattgtctaaattaggtatgggtgagattctgggtacaaaccatcctggggcacggccgggtgcggtggctcacgcctgtaatcccagtactttgggaggccgaggcaggcatattacaaggtcaggagatcgagatcatcctggctaacgcggtgaaaccccgtctctactaaaaataaaaaaaattagccgggcgtgttggcgggtacctgtagtcccagctactcgggaggctgaggtaggagaatggcgtgaacctgggaggcagagcttgcagtgagcggagatcatgccactgcactccagcctgggcaacagagcgagactccatctcaaaaaaaaaaaaaaaagaacaaaccatccctgggcaggattcttctccatccatgactgtgaaactaggatacaagtccattgtacctcccgtctcctcctctcttgccatgtctggctcaagtatctcaattcctgttgcataaactttct

SEQ ID NO: 76249 - DNA, 572 bp, Homo sapiens
tggactcctctgactctagattccaaaacaaaggatttctctggaagttcatgaagttccagtaaaactgtttggaattttactcgttttatgttctccttgattaagaggttgggactttttaaaactcttttcagatgatttctgtttgactctttactgacctacttctgagtgtatgtgtgagagacactgaacagcctaactcctgtgtctacaagcttgagatgagatccccatcatctcttctccaagctttcagccctctaaccractcccccactccaaaaaatccttgatcagcccctaaactaatgtttctaaaacttttctgtgcataccacctggggatcttgttaaaaatgcagagtctgactcagtacatctggggtgtggtctgcaagtcagcatttctaacacacccccagccaaagccattgcctcagctcggaggaccactgctggagtagcaaggtcctactcctccactagtggacccaaaagatgtcacccaagggacaaacacgatgctccattgatctgcaggaataaagtatctgaattttaggtta

SEQ ID NO: 76250 - DNA, 669 bp, Homo sapiens
cctatagctccctgcatttctcacggacaagttcatttccctctctgctttggtctccctgttctttttctcccatcctccaaacctcccatcagaaaaattcttccaaactctagtgagctgaatcgtgtctccatcaaattatctcctcctggaacctcggaatttaaccttacttggaaagagggtcttcactgatgtcattgaagtacggattgagatgaggtcacgttggattaggatggacccyaaatccaatgagagtgcctgtaagagacagaagaggacagagggagacacagggcagaggccgacgtgaggatggaagctgagattgcagtgttgtgtccgcaagccgaggaacaccaagggttgccggccaccagcagcagctgggagagaggcatggaaaagattctcccttggaggctccagggggaaccagccctgccgacaccttgatttctgactgctggcctcctgacctctgagagaataaagttctgttgttctaagccactcagtttgttaagacagccccaggaaattaattcataaaccaactggcaaaactctggacagacggggaccaatgactgagccttggctgggagggcgtctgcaagcaactgtgatggactagaatccctgcaggtcctcacgggagct

SEQ ID NO: 76251 - DNA, 625 bp, Homo sapiens
atcaggtagagtatgagaataatttattgtggaagtaagacttgctttgtgtataagcagaatttgggactctggaggcagaaaagtaatttaaaaaatatagaccaggatgatgagatgatggggcctatggctgattttctagcctggtttttgtcaccagtgcttttcatcctgactcctatctcactgtgtattgacaaatgcccttgtgtttggcttgggcaaaggggatgtgttggtttgctctccataattctacatgtcaagtgttggctgtttggcagtggtggggaatggcaaagccttccaggagtctgagcactggtaagcattctcaaaagcagtggttttattatgaagcaatttagataaaaagccaaactccttcaatttaaagccatacaactggaggcaattaaacctgcatgattaaatttcagaaattaaaaacctataaaaagcatcctascaaaaggatctgtcttgcacacattttgatcattaatctgaaagctctttggctgtccaataccacctcatcctttccttcatctttttgattgctcaggcagtttataagacatgtagcacatggaaaatcaaaccaaggtagtgcagcatc

SEQ ID NO: 76252 - DNA, 582 bp, Homo sapiens
atgaaagaagacactgagatttagactgtcataagaactacatttttttggctcaattttccttcttcacaaataataacaactattgtattagctggtttcacatgacaggcaatattctaattgctttggattctaacttrttgaatccttataatgacattaggacattctactattacctccacacaaatgtgtaaactgaggcagaaagagattaagtaacttgcccaagatactgtagttattgtgtgtatgacccataacttcaactaaggcagcttgggtctggagctgggttcttaaacatttctctatgccattgaaggcacaagtgagttaaaaggaggatggcaaaactggcgcctctcaaaaatttttggaagtttcagtatctaagcagtttattatctcttattactttagcttttcactgagatcactttaccgataattcgctagacttctcatcttttaataaatttaaaacaaatctctttcccatagcacacaactttgcaaactttaaatacttctaataatgagagataggctctacttttttaagataaaattttaaag

SEQ ID NO: 76253 - DNA, 582 bp, Homo sapiens
atgaaagaagacactgagatttagactgtcataagaactacatttttttggctcaattttccttcttcacaaataataacaactattgtattagctggtttcacatgacaggcaatattctaattgctttggattctaacttattgaatccttataatgacattaggacattctactattacctcyacacaaatgtgtaaactgaggcagaaagagattaagtaacttgcccaagatactgtagttattgtgtgtatgacccataacttcaactaaggcagcttgggtctggagctgggttcttaaacatttctctatgccattgaaggcacaagtgagttaaaaggaggatggcaaaactggcgcctctcaaaaatttttggaagtttcagtatctaagcagtttattatctcttattactttagcttttcactgagatcactttaccgataattcgctagacttctcatcttttaataaatttaaaacaaatctctttcccatagcacacaactttgcaaactttaaatacttctaataatgagagataggctctacttttttaagataaaattttaaag

SEQ ID NO: 76254 - DNA, 582 bp, Homo sapiens
atgaaagaagacactgagatttagactgtcataagaactacatttttttggctcaattttccttcttcacaaataataacaactattgtattagctggtttcacatgacaggcaatattctaattgctttggattctaacttattgaatccttataatgacattaggacattctactattacctccacacaaatgtgtaaactgaggcagaaagagattaagtaacttgcccaagatactgtagttattgtgtgtatgacccataacttcaactaaggcagcttgggtctggagctgggttcttaaacatttctctatgccattgaaggcacaagtgagttaaaaggaggatggcaaaactggcgcctctcaaaaatttttggaagtttcagtatctaagcagtttattatctcttattactttagcttttcactgagatcactttaccgataattcgctagacttctcatcttttaataaatttaaaacaaatctctttcccatagcacacaactttgcaaactttaaatacytctaataatgagagataggctctacttttttaagataaaattttaaag

SEQ ID NO: 76255 - DNA, 725 bp, Homo sapiens
gcaatggattggatctattgaggtgcagctggtactaaaccaattgatcggtataacgtcaaaaatcctgtttgtcaggtaagcacactttaagaaattagataaatcatttcaaagtgacagtctgtcattttaattaaaataatagaaaaaatggtatcttcccttatttctttttattccttttccttcttccttattactcattgctttataaatctcattttttaatcttaattttttttcatttttttttggaaggctctgattttatgaataaactttgtgatgtaatgtatacttgtattatttaggcctaattttagcctagaagaggaaaacttaaaaatatattaacgttgagtaaagtcataaaaattatattaacagtttctttatgctccaatcttttaaaaagtcttaaaaggcaaaactcaaatgttgaactatgactgacctttttgtttacctcctgctctttttctttctaaaacgttaataatctagtaatgtgttcaaataatgtattcattttgtcttttccaatgatcttaaccataattctaatattaaaatgagaaaatataaattaattattttctatgaccataactagctgactcctgattgtatgagcttatgttttaaaatacattttctagccaggtrcagtggctcacgcctgtaatcgtagcactttgggaggccgaggtgggtggatcccc

SEQ ID NO: 76256 - DNA, 934 bp, Homo sapiens
tatgtcttcctcagcgaccaaatatgatttaaaatatcttggagtcaaagactgcagtagagtggtattataaatttgtgaataaagaatcagtttaatttttcacattaaatcctggttctagtttgacgatttaaattatgacctttttcaaaggttgtaaatactgcacggagaatgtattttttagacgttcctttaataacttaaaagacaaagcatacacaaccagcatattataggcatgtaaatacatgtgttcttaaatggatcttcacttggaagaaagtttttcgtccttctcagaaggagattagacacaacatatggtaaagccaaaagcaggagcttatagatttgcatgaaatgaaggcgttcttcagacttcttcataacccacgtgacatctgtttttaaaaacacgttaacattaaaaacttttttttaaaaagagttttatccccaaacttccaccatgcagtcccatttttggtctctagactctggtaartataaccagtactaaaatgttaatgagaatgaaacaatactactagaaatacgagtgtcagtattaaatggaataataaatgctatgcaaacaagagatcactgcgggaggaaaaaagcagcagctctgagttacttaccagcacttccttttcccactggtattttctacacttccgagactccgtttctgtctgagcacggcaacacaatcattcctgtcagggtgttcacttgcttttattgtctgcatacatttaattgttgtaagaaacttggcacagtctggaaatccacatgaccaagcgagatcttcagctgtttgcccgttcttattacataaactgaaaacaggataaaaacggagtgaaatgaaacattgaacttaagtctttttttttatatcttacaagggaattttggg

SEQ ID NO: 76257 - DNA, 580 bp, Homo sapiens
ctccaattaaaaacatgttttaaaagacagatgggccggatgcagtggctcatacttgtaatcccagcactttgggaggctgaggcaggtagatcacctgagtcaggagctcgagaccagcctggaaaacatggtgacatcctgcctctattaaaggtataaaaaaaaattagccaggcatggtggcacacgctackcgggaagctgaggcaggagaattgcttgaacccaggaggcagaggttacagtgagcagagatcgtgccattgcactagagcctgggcaacagcgcaagactccatctcaacaacaacaaaaaaaggacagatgaaggttttcaactttcagtaaaggcagaggagcttgttacagattcgcctccccacaagagcagttagaaaaactggataaaaatgtgccccgcccccaatcaaaaacaattgttggaaggtaattggagacctcagtcaggacttgagtgaccaggcctaggaggtgatcctgacagtctgtagtgctttcccacatttggtgattggtcaacagtagagggctaagaggctaagaaactgagtatgaa

SEQ ID NO: 76258 - DNA, 400 bp, Homo sapiens
agatgttcaaataaacattgatgaactcttgtctcttgcagggtagatgcccaaggactcggaatggacttccttcttacaactccaccccatctgcttcctcagaaaagttcatcgtctaattacacctgcttcctgcccttctcaacatgaaacataatcaccaacacaagggcaattagatggccaggcaccaaggaaaatgattccctgggccaatcctcaccacaaccctaggaggtagatattctkattattctcattttacagatgacgaaatagaggcaaaaagaaatgagggggccgggcgcactggctcatgcctgtaatcccagcactttgggaggatgaggtgggtggatcacttgaagccaggagttcaccaacctggacaacatgg

SEQ ID NO: 76259 - DNA, 689 bp, Homo sapiens
aaaaaaaaaaaaaattggtttacttactacaagttttctcagagccttattaagccaatgtgcattgtgaacacaggaggtagtggagatagttaaagtatgcagcattttctatttttgactatagtttgcttgattgattttttttttttttttttagacagaatcttgctctgttgcccaggctggagtgcagtggtctgatctcagctcactgcaagctccgcctcccgggttgacgccattctcctgcctcggcctcctgagtagctgggactacagttgcctgctaccacgcccggctaattttttgtatttttagtagagatgaggtttcaccgtgttagccaggatggtctcgatctcctgatcttgtgatccgcccgcctcagcctcccaaagtgctgggattacaggcgtragccactgcgccggccacttgattgattttaaatgaagcatccagcagtgttagtgtgaaacttcattaggtagtacttttcagaccttaacttgcatatgaattgccaagggaacttactaaaatgcaaattctgatttaggagggaagagtgcctagggcagggacctgagatcctacatttcatcttcttttttcttcttttatttgaaacaaggtctcactctgtcatccaggctgaggttcagtggcatgatcacagctcact

SEQ ID NO: 76260 - DNA, 689 bp, Homo sapiens
aaaaaaaaaaaaaattggtttacttactacaagttttctcagagccttattaagccaatgtgcattgtgaacacaggaggtagtggagatagttaaagtatgcagcattttctatttttgactatagtttgcttgattgattttttttttttttttttagacagaatcttgctctgttgcccaggctggagtgcagtggtctgatctcagctcactgcaagctccgcctcccgggttgacgccattctcctgcctcggcctcctgagtagctgggactacagttgcctgctaccacgcccggctaattttttgtatttttagtagagatgaggtttcaccgtgttagccaggatggtctcgatctcctgatcttgtgatccgcccgcctcagcctcccaaagtgctgggattacaggcgtgagccactgcgccggccacttgattgattttaaatgaagcatccagcagtgttagtgtgaaacttcattaggtagtacttttcagaccttaacttgcatatgaattgccaagggaacttactaaaatgcaaattctgatttaggagggaagagtgcctagggcagggacctgagatcctacatttcatcttcttttttcttcttttatttgaaacaaggtctcactctgtcayccaggctgaggttcagtggcatgatcacagctcact

SEQ ID NO: 76261 - DNA, 2415 bp, Homo sapiens
taaggaaagcatcctggtttcaaacattagcaattcatgcacatttgaaacaacaatagcatgcatgccaagcgaaacatatacaaaagctttaccagccaacaaacaccagtttgtagtctctgttayaggtgtagattatttaaataaaaaatattttaccatattattctctattacatataataactaataggattctttaatccaagaaggccttccttaaatagttattgtctcatttcccttacagcctatggaaaatgagaagctttgtttaaagctggaaattattattattaggttgtgattacaacaacatatgtcaagcataaacccgggaagaattttgttttagagaatttaccttcatgcattcagggaggtattctatcatttctgtaattggacatttattgcctggagaattatgactgaaaatcttaagacattcatcccatctgtaaaaaataaataagtaagataagcacaggtcttcatccttctgttctgtacaacagctgaaactcaagattatttctttaggggaaacctaaacttaagcatattcatgaaatgcaatgctcacccttggttccaatggaaccaacatgtaaagcaagatcaactcagtaataggatccttgcccattaatggacattaggaatgtgggcaaatttcaggatggctattataatcattgttctgtctctttatctaaatgccattcaaagaagctgggactatatcttctttttctcctgaagttatgaaatggtcagtacttacagagctgaccacgttgggtagagattccacattcacatgcctacaccatcagtgtagtactggtcccatatttaataactaatacatgtgtacatcctgtattgagttaaactacaaattaacacatgtaaagtgcattgataagcatagcctctgccagaacattccagattttgcccattttcttcatcaccatccaactgaacagggtaagacggtgcttaccataccaaggaggaactaaatctatggcaggaggcaaagaatggcccattatctccaagatcttatctaattttctgttaaactctatcagtaaaacccatctagtatatctacattatcaaaagaaaagtttggattgaacactttcattaaaagtgctttaaagggatgatcagtcggagattttttagactgcccatgctcaaaaacacaggcttgatgtgccttgaatatgagattgttcgctctgtgtccactactaggtgacactgggccctcgtgcataactatcagtgattattttagaaagtgatattataaagatattatgagaagtgagactaactatcctctaacttcatcactaaaattccttggagtatggtttagaaacccaccaacacctgaacccctggagtctcacaagagtgatgtgaagcttggttttatgtgcccacattttattttttaagaaatataaactaaagatcagagaggttaagcaatgtgcctgttgtcatccaaaagaattcatttataaatttaggtagacatttagaaataactgaaggagtataattggattgtttgtaacacaaatgataaatgctccatgatgtgattatcatgcattgcatggctgtatcaaagcatctcatgtacctgatacatatacacacctactatttacccacacaaattaaaaataaaaatggccaggcacagtggctcatgtctgtaatgccaatactttgggaggccgaggtgggcgaatcacttgagcccaggagtttgagaccagcttggctaacaaggtgaaaccacgtctcaatgaaaaatacaaaaattagctgggcatgctggctcatgcctatagtcccagctactcaggaggctgaggcatgagaattgctgaagcccgggaggcggaggttgcagtgaacagagatcacaccactgcactccagcctgtgcgacagagctagaccttttctaaaaataaataaataaaaataaaaaataaaaaacctttaaaaaattgatgtaaacaactgatattttaaattttgattaatggctgaaaatcatttcttttctcttattttgtctcagacttcaaatcatcccaacaccagagaacactaaatgacagtggacaggaagacagtgtaccttttgctcctgatgatcgtaagaacaacctccttcctcttattgtgaagtgcaaggtgcaaaaaggaggcctgctgcttgttcaggactatgtcagcattgtggctcagaagaagcgcaacggctttggcgtggccttcccttgcagcaaagtgaagtgcagtgttcttttgaagaaaaacagacacagaaaacgtggtgacagtgtctaatctgtcttatttcac

SEQ ID NO: 76262 - DNA, 890 bp, Homo sapiens
gatcaggtcttgttatggtctgaatgtgtgtatcctcctaaaattcatacgttgaaatcctaatccccagtatggtaatattaggagatggggactttggaaggtaattgggttatgagaccagagtccccatgaaggggattagcgcccttataaaagaggtcccagagagacccttacgcttctgccatgtgaggacacaagaagaagttggctgtctacaacccagaagacatcccttactagaacttgaccatgctggcaccatgatctcagatttccagcctcaagatctatgagaaataaatttccattgtttataagccatccagtctacagcaatttgttatagcagcctgactggacaaagacaggcctgaagtataccctctgcacacaagctttttccttaggctttacttttggaaaatcccaggctaagacatacagatacatggacattctctaatatcattctgtcgtatccccataccatctttacacaccctgcccccaaatagtttgacagcmtttcattatcactgaacagaaaaaaaaaatccatagtttcacttttactttgacctctaagagtagaggaattaactagaaagggcaaaagaggtaccttttgtagaattagaggtaaggtcttcgcctatggcactgagattaactgagtgatacaatattctcttgcatgactgcatttccagcagaatggtttgttcaaaaggaaaatgcaagttctgatagggagcctggggaaaggcctgcaggaaacttgaaagcttgctcatgaggaaatatggtacgagcacattactctattgatttttactaaatataaggaatcttccaacagctagatttactttgactgatacatt

SEQ ID NO: 76263 - DNA, 665 bp, Homo sapiens
aaactaaaagggccagatagctaaagagtggtgggtttttgttttgttttgccttaggtgatcaataaaaacaaataaagttcttaaacaagtttcagattttgattatctaggccaggggctggcaaattgtttctgtaaagccaaatagtaaatatttcaggctttgcwggccacactgtttctgttcagctccactactggagcacaaaagcagccatagacaatatataaataaattagtgtgactatatttatggatactgaaatgtgttccaataaagttgtacttatggatacgaaaatgtgaatttcatataattttccattgtcattaaatatttttctttggattttttccaaccatctataaatacaaaaaatcattgctagcttgtaggctgcacaaacataggccgcagaccaaatttgacattcatgctagagtttgctgagccctaatctaggtaaattgttctttggaatattgtcagtaccaagaagtgtcctaaacacccacaaaataaagtccaaacatcacaaatagcatgccaaggctttcattatctgaactgaatcttttctcccattaccatgctccaatcatcctctatccaggtgtatccagtttttcatcattcccaggactgtcatatcaccatgca

SEQ ID NO: 76264 - DNA, 871 bp, Homo sapiens
cagtgttttaagatatagcagaagttggatctttttttggatacagaagtcaaagtgctgtaacttaacagcatttcaggtgcagttaataagatatttacattgccgaaagtcctaccattctctctaacacatcataaattaaaacactgtgattcggtgtttagtagttactgactgtagctcttcaaaccattttattacagtggttaggttatgctttgtgtatgtctaattgctagaattccagtaacagaactgtgaccaaaagcataaaaactgtgataggtcatatggcaaacttatcaaagtaagacaatgaacttttctgyttatcaaaaaaaaaggtaaatgcaaatatcaattttggaaattcagtataagtataaataatctccttacatttaaatgctatgcaacaaaacaaacacaacataagaacaaccacacaataatttcttgccaactattttaaaagactattaacacatgtttccaagattggtttctagatacagtactgataactgatttggtaactttcaccactgcattcttcaaaccagcgcaacaactgtatatattttattttcaattgcacacatgaaggcccaacagtgattttaaaatcactaaaaaatttaactttttgtattcctatccaagtgaatgtcacttaattttaataatggtaaacacaactaaaataatttgagaaaatcccagtcaatatcatttttttctttacttttcttttttcttttctttcctttttttttttttttttgagtcaggatcttgctgtgtcactcaggttgaagtacagtggtgcaatcatagctcactacagactcaaactcctagactcaag

SEQ ID NO: 76265 - DNA, 545 bp, Homo sapiens
tcacacaaacaaagataattttgttttggctgggtttatagtttgctaaccttctatgccaaacccttacatctcaaaatacctatcagagataaaaataaaacccagacaaaaatgtatactgacattgctgaagatatttctatttttatcttacctataattttgaagctagcttgtttattaaagatgtacttaagtcacaygaaattgaaaattgctttaacttatttacttaatttaccagtgctcttttatttataagccaattttgtaggcataacatataataaatgtacctgcatataaacacatctaaacatgtatataaactcataaacaatagcttttaccttggaactctagccacgtgacagcagtacaagctccccagcctatgaacatgttctcaaagctaaacctcgtttacctcattaccccaatagataatccaattgagtctatgaaccaaaattttgggtaaagcagtttccatgacagttttatttttaaaagcgaaacttctccaaactccaaagaacact

SEQ ID NO: 76266 - DNA, 1088 bp, Homo sapiens
gcatacagaatccagactgtataaaatttttcatatcaaatagtctaagtttatcaacagatgaattataaaaaactaaaaaatggatgggggtctgtatgctaaaaataatcataaaagctatatcaatctttttaaagaacatattgtttaaatacacacacttgggtgatactctgaaaaaatagctgtttacatggtagattattttttataattaaatgcttcagaatatcaactacaacattctacattttcatgactctcttaaggaaccagattttctcttgtttggtgcataagatccatgtaaattagaatttttgctacatggattcttgatactaggaggaaacaccagcatgtaagttattatcaggagatctcataatttttatatctatctcttggtacgtttaacatcatttcttttcttttttcttctaattagcagaaccattcatctttgtggaacttgctcttttgtcttcaaatacaactgaaactagtactccccattcacagtcttgtgcccattttgcaggcttggcaagtcaaggtgtataaacccatggctacagtaactgatacagaaaagagaaagagattcacttgctcaacaaatacttgtgacaaaattagaccaatcagagttcttccaagggcatttttccactaaaatagaatgccattttcccactggcattgataggctattaggatgtgagttgggttctgccagtagccttttcaccaagcatgtggacagagagtttaagcacgagagaaacatagccttgacattattaatttcatgaattcagcagtgcctaaactatggacgatagacttcccagttatagaagccagaaaattttgtttggtattattacttgtatctaaaagattttcagtaacatatttaagtatatttgcagatttctaggacattaaacaatatggaaactayggatatcataagctaagactacctcattgctaaagactgtaaggcatgaattttatgcaatgtgagagaatagaattggaagaagatttgagaacatatcttcatatgaaagcacaga

SEQ ID NO: 76267 - DNA, 698 bp, Homo sapiens
ctgtctccctggagccggtggaggatgctgaagaatggaatctgaagatgccctgagaatgtttggggatcatgagaagtttatgagctccacacatctccagcaaagagcaacacagaagatgggcttttgtgtgttaggcaaagaggatggcaggaggccaggaggctgttctgaaggatggcagtaccctgaagactcatcacatacattggatgtgtaatgttacctccctatctctgtgccatacacacccccaamcctccaatacaccaggtgtgatcccatagccagctcctcccttcaccttctgatgccagactggcagaaacagtagtaggaggctccccaccataaggaacccaactggagtgaaaaaccccagccccactgctaggctatcaggtgcccgtgcaaaccagacagatacccctgccttgagccattctgtagccacctgctgcaaacaacctgcatcaccacttttacctatccccagtgctccccagctgtgttagtcttactttgcaagtcctctgtccaaaagagactctctcagaggatcatcctgtagacagagagatccaagattaaaatacatttttaaagggcattgtcaagactacatggagagaaattgcatgaaagacaaaaaaaaaaaagcccaaatcaaagatgcagttgccactggctctctg

SEQ ID NO: 76268 - DNA, 698 bp, Homo sapiens
ctgtctccctggagccggtggaggatgctgaagaatggaatctgaagatgccctgagaatgtttggggatcatgagaagtttatgagctccacacatctccagcaaagagcaacacagaagatgggcttttgtgtgttaggcaaagaggatggcaggaggccaggaggctgttctgaaggatggcagtaccctgaagactcatcacatacattggatgtgtaatgttacctccctatctctgtgccatacacacccccaaacctccaatacaccaggtgtgatcccatagccagctcctcccttcaccttctgatgccagactggcagaaacagtagtaggaggctccccaccataaggaacccaactggagtgaaaaaccccagccccactgctaggctatcaggtgcccgtgcaaamcagacagatacccctgccttgagccattctgtagccacctgctgcaaacaacctgcatcaccacttttacctatccccagtgctccccagctgtgttagtcttactttgcaagtcctctgtccaaaagagactctctcagaggatcatcctgtagacagagagatccaagattaaaatacatttttaaagggcattgtcaagactacatggagagaaattgcatgaaagacaaaaaaaaaaaagcccaaatcaaagatgcagttgccactggctctctg

SEQ ID NO: 76269 - DNA, 586 bp, Homo sapiens
ccctctaggagaaaccactgcaggagaactcatgcttgcctatgcatgttacaaaagtctttatcaattcctctattataacattgttagacaacattgttactgtttgcccacacttctctcctttgctggactctgagttccagtcttgatatctgaccatattcatcaaagccctggcacatagcaggggctcagtgagcatttgctggactgartggaatggaatgttaaagaagagacataacatcaaatccataagtgatggataagacccaatggtatgttctgacaagatttagaataggcctatatagtgtattagtctgttttcacattgctaataaagacatacctgagagtgcgttatatatttatttatttatttattttatttccataggttattggggaataggtggtgtttggttaaatgagttagttctttagtggtgatttgtgagatcttggtgcacccatcacccaagcagtatacattgcaccctatttatactgttttatccctcacccccttcccaccctttccccaaatccccaaagtccattgtgtcattcttacgtcttt

SEQ ID NO: 76270 - DNA, 586 bp, Homo sapiens
ccctctaggagaaaccactgcaggagaactcatgcttgcctatgcatgttacaaaagtctttatcaattcctctattataacattgttagacaacattgttactgtttgcccacacttctctcctttgctggactctgagttccagtcttgatatctgaccatattcatcaaagccctggcacatagcaggggctcagtgagcatttgctggactgaatggaatggaatgttaaagaagagacataacatcaaatccataagtgatggataagacccaatggtatgttctgacaagatttagaataggcctatatagtgtattagtctgttttcacattgctaataaagacatacctgagagtgcgttatatatttatttatttatttattttatttccataggttattggggaataggtggtgtttggttaaatgagttagttctttagtggtgatttgtgagatyttggtgcacccatcacccaagcagtatacattgcaccctatttatactgttttatccctcacccccttcccaccctttccccaaatccccaaagtccattgtgtcattcttacgtcttt

SEQ ID NO: 76271 - DNA, 586 bp, Homo sapiens
ccctctaggagaaaccactgcaggagaactcatgcttgcctatgcatgttacaaaagtctttatcaattcctctattataacattgttagacaacattgttactgtttgcccacacttctctcctttgctggactctgagttccagtcttgatatctgaccatattcatcaaagccctggcacatagcaggggctcagtgagcatttgctggactgaatggaatggaatgttaaagaagagacataacatcaaatccataagtgatggataagacccaatggtatgttctgacaagatttagaataggcctatatagtgtattagtctgttttcacattgctaataaagacatacctgagagtgcgttatatatttatttatttatttattttatttccataggttattggggaataggtggtgtttggttaaatgagttagttctttagtggtgatttgtgagatcttggtgcacccaycacccaagcagtatacattgcaccctatttatactgttttatccctcacccccttcccaccctttccccaaatccccaaagtccattgtgtcattcttacgtcttt

SEQ ID NO: 76272 - DNA, 647 bp, Homo sapiens
ttgcaaactgttcatttaagataatgaggatgaaaacaatagagttcagtctcactcttgcaaaactgccctgtgacaaagctgtwgttaaatggggtccacaattaactccatgatatgctataattagagtaactctacagtgtaaacctgggtttccacagttcttataccctagatgggtacaataacacttggtagaagtaatgaggagggttcccacccactaaccccttccctgcttggcattagtaatactagttactacttagcactttccacatatcaggcattgttctaaacatttttacacatattggttcatttaatactcacaactttctgaggaaggtgctgcattatcctaatttttatattaggagactgatatacaaaatagttggaggatttgccaagggcagacttctcaaaggctgaggcaaggagcagaactcaggcagcctggccgcccagtcaagcccctcagctgctgtactctgtggcccagcatggtatatacaatgttcggtgctctgttctcacagtctaatttgcactagtacatggtcaggtagttcagtcatctcattttacagaagagaatacaaaggcaaaaagatgctaagtggctttcaaaaactcaaatg

SEQ ID NO: 76273 - DNA, 528 bp, Homo sapiens
tgcatgtgccatctgcccctgttgggaccctgagccagtacagtgatactgaatctttaaaaacttaaaccagggtattcacgcatttaattttggtctacttgccttttctagttgtcctcttcccttcccctccagtcttatgacctgtgagggtgtaagaatatgtataaagagayatacacaggatttcaggaggtaatttatccaggagtacaactctccaacctgggatataaaataaacgaatagagtaaacctagaggtgcctatttgggcattaaaatccatgtgaaactggcacacagatttgccttatattagtgggagaagattatctgctaacatctttactccctatttccccacaaaaccattgaaagtgtatcatcacctatcaacattttataaagaaatctgagcagagggctaaaagaagcgaaccttacttatatctgatgacgaaactctaaagatgtacaaaagctctggaagtggggtgggggttggggaacaagcttagagtcc

SEQ ID NO: 76274 - DNA, 633 bp, Homo sapiens
cagagagatggtgaatatagaaagacttcttggtggaacatatgctttagagatcacatccaaaacctttatggagcatctgacctagacttccagggacaaaacataaaagtgcaagacacttatattcacagtttttgtgaagcaaaatcattttcatatattaagtgttcygatacagaagaaacactgactttccccttctgtgtcaaagaaaatcttataaaacatcctggtaggtgtcttgataggcttgatacaagaaacatggtattttcccctcatctttcctttcttttcccttccttcttcttttctcccccctgcttctttcccttgtacttttttttttttttaattttaaataacaagacttcttagttctttgaacaagtgaactatttctttggggaactgcccctcagctatgccaactctttgataagccagtcatagagccctgtctcacagcggtggctgtgtgaccttgctgatccagacagggtgtattcttaagggtaacaatgatctaaggaaggtttagaaagaaatacagtatccaaaaatagttgtaaaacacgaattgatacttccagagttggatttttatggaccaatcactcatgttatact

SEQ ID NO: 76275 - DNA, 997 bp, Homo sapiens
attagcctcattggtctggctgttgggaaggaaaaagtaagtaattttttttttttttttttttttttttttttttttttggaaacagagtctcgctctgtcccccaggctggagggcaggggcccgatctcggctcactgcaaactttgcctcccaggttcatgcccttctcctgcctcaccctcccgagtagctgggactacaaacccccccccccccccccggctaattttttgtatttttagtagagacaaggtttcactgtgttagccaggatggtctcaatctcctgacctcgtgatccgcccgcctcggcctcccagagtgctgggattacaggcgtgagccactgtgcccggccagtaatttctattatgttaaatttactgtacctaacttggctgtggaggcattgagagtactagagggattttttccttctgaaaaatggttttctggatgcttgtttttttccttactcctttcacattgctcctgttttatatacaaattcttgccttcatcttttcattgtttgtttgtttggtttggtgtttttttttttttttttgagaccaagtctcactctrtcacccaggctggagtgcagtggcatgatcctggctcactgcaacctctgcctcctgggttcaagcgattctcctgcgtcagcctcccaggtagctgagattacaggcacctgccaccactcccagctgatttttgtattttttttttttagtagagatggggtttcactgtgttggccaggctagccctgatctcctgacctcaagcagtctgctcacaggtgtgagccaccgcgcccagcccgtcttttcattgttaatattaaggtttctttttagctcagctgtgctcctgatgcctcctcctttccccaccacacacagtgcatctcgtgggaggtgtgtggaagtcagtatccatgttcgttccctttaaatatgtgcttggaaacatgtcacttgcttt

SEQ ID NO: 76276 - DNA, 632 bp, Homo sapiens
tcctcttctcataaaccttgaaaaggtaaatgagataactttgatgtgatgctttgcatgcagaagcagagcacaaaataaatacaaggcatggcttttatcactagcagttaaatgacccagctaggccacagcatcaaagggataccataaccattttttaaaaagaataagaggtagtttccgatataagtaacaagaggcgggaaattatttttatcagctgactttacctattttaaaaggagaaataaaaacattaaatgtaggattatcatatgatccagcaatrtcacttctgggtatatacccaaaagaagtgaaagcagggacttgaacagttatttgtagaccacattttagcagcattacttacaatagccaaacgatggaaacaactcaaatgtccattgacacatgaatggataaatacagtgtaatataaaccacattggaatatatgatgcaatatcattcaccgttaaaatgaaagcagattctgatacatgttacaacatggatgaatcttgaggacattatactaagtgaaaatgaaacagtcacaaaaaggcagatgctgtaggattccacttatataaggtacctagagtagccatagagacagaaagtag

SEQ ID NO: 76277 - DNA, 632 bp, Homo sapiens
tcctcttctcataaaccttgaaaaggtaaatgagataactttgatgtgatgctttgcatgcagaagcagagcacaaaataaatacaaggcatggcttttatcactagcagttaaatgacccagctaggccacagcatcaaagggataccataaccattttttaaaaagaataagaggtagtttccgatataagtaacaagaggcgggaaattatttttatcagctgactttacctattttaaaaggagaaataaaaacattaaatgtaggattatcatatgatccagcaatgtcacttctgggtatatacccaaaagaagtgaaagcrgggacttgaacagttatttgtagaccacattttagcagcattacttacaatagccaaacgatggaaacaactcaaatgtccattgacacatgaatggataaatacagtgtaatataaaccacattggaatatatgatgcaatatcattcaccgttaaaatgaaagcagattctgatacatgttacaacatggatgaatcttgaggacattatactaagtgaaaatgaaacagtcacaaaaaggcagatgctgtaggattccacttatataaggtacctagagtagccatagagacagaaagtag

SEQ ID NO: 76278 - DNA, 602 bp, Homo sapiens
cttatcagtgggagctaaatgatgagaactcatggtcataaagaagggaacaacagacactgggttctacttgagggtggagggtgggaggaggcagatgatcagaaaaaaaataactattgagtagtaggcttagcacttgggggatgaaataatctatacaacaagcacaagtttacttacataacaaacctgcacatgaactcctgaacctaaaataaaaggtttttaaaaaagaaatgacaggttacaagggaaaagaccaccaaagaaaggactacgtctcccctaatagctcccagtttccaagccccatcaatgaatattgagttccaattcactttgtagttcctcactcttaaatatgagttgacacccaatgatcactaacatttgaagaaagtctctaatacaaaagacagacaaaatgaagaaaaacaattgtggaaatagaraacgaaaggagcagcagaaaactaagaaaagtaataactcagaaatataacacattacatccataaaacgagaacatgcacatgtatacagatgttcctctacttatgaaggggttatgtcccaataaactcatggtaagttgaaaa

SEQ ID NO: 76279 - DNA, 1022 bp, Homo sapiens
attgttttgaggttttgaattacatgtctgaacattggtttctgtagactgagagtgaatgacttccacggaaggctataagaaatggctttcttgtaaataccttcagaggcaataacacacatcccacagtcttacccaaaccaataatctattttatgtctaagtatattttgagaattctccaagacttttgacttactcttagtgatacatcagaagcactttatagactytttaccaaatttgttactaaggagacatctgggatcattcttaagagagctgaatgaccgctgacttgggacacttctgtatagaaaggatcatttctttcaaatttgttccacatttctttccagtatttttattgttcaatagaggccatatgaaactttagggcatgttccttttgtgacaacctttgtcctttgagtcttaacacaaaatcagattgtcctcttctttaatcctatatatattttttgagatagagcctcactctgtatctcagactggagtgcagtggcatgatctcagctcactgcaacctctgcctcctgggttcaagtgattctcatgcctcagcctactgagtagctgggattacaggtacacaccgtcatgcccagttaatttttgtatttttagtagagacagggtttcaccatgttggccaaactggtctcgaacttctgacttcaaaagatctgcccatgtaggcctcccaatgtgctgggattacaggcatgagccacagtgcccagcctaatcatatttttaataaaattgtattttatttgttggataactagttgagaagcagggaaggatcatagttttacagattgaagacaacaaaattacttcactcaactatttactaaacattgaaagtttacaagagtttctgagtatcccatttgctgtaacagaattctaccctacctaactccaggaaacttctcaaggaattacagaaagtctttgaaatcctttagagttatagtatactgtgttta

SEQ ID NO: 76280 - DNA, 1022 bp, Homo sapiens
attgttttgaggttttgaattacatgtctgaacattggtttctgtagactgagagtgaatgacttccacggaaggctataagaaatggctttcttgtaaataccttcagaggcaataacacacatcccacagtcttacccaaaccaataatctattttatgtctaagtatattttgagaattctccaagacttttgacttactcttagtgatacatcagaagcactttatagactttttaccaaatttgttactaaggagacatctgggatcattcttaagagagctgaatgaccgctgacttgggacacttctgtatagaaaggaycatttctttcaaatttgttccacatttctttccagtatttttattgttcaatagaggccatatgaaactttagggcatgttccttttgtgacaacctttgtcctttgagtcttaacacaaaatcagattgtcctcttctttaatcctatatatattttttgagatagagcctcactctgtatctcagactggagtgcagtggcatgatctcagctcactgcaacctctgcctcctgggttcaagtgattctcatgcctcagcctactgagtagctgggattacaggtacacaccgtcatgcccagttaatttttgtatttttagtagagacagggtttcaccatgttggccaaactggtctcgaacttctgacttcaaaagatctgcccatgtaggcctcccaatgtgctgggattacaggcatgagccacagtgcccagcctaatcatatttttaataaaattgtattttatttgttggataactagttgagaagcagggaaggatcatagttttacagattgaagacaacaaaattacttcactcaactatttactaaacattgaaagtttacaagagtttctgagtatcccatttgctgtaacagaattctaccctacctaactccaggaaacttctcaaggaattacagaaagtctttgaaatcctttagagttatagtatactgtgttta

SEQ ID NO: 76281 - DNA, 1022 bp, Homo sapiens
attgttttgaggttttgaattacatgtctgaacattggtttctgtagactgagagtgaatgacttccacggaaggctataagaaatggctttcttgtaaataccttcagaggcaataacacacatcccacagtcttacccaaaccaataatctattttatgtctaagtatattttgagaattctccaagacttttgacttactcttagtgatacatcagaagcactttatagactttttaccaaatttgttactaaggagacatctgggatcattcttaagagagctgaatgaccgctgacttgggacacttctgtatagaaaggatcatttctttcaaatttgttccacatttctttccagtatttttattgttcaatagaggccatatgaaactttagggcatgttccttttgtgacaacctttgtcctttgagtcttaacacaaaatcagattgtcctcttctttaatcctatatatattttttgagatagagcctcactctgtatctcagactggagtgcagtggcatgatctcagctcacygcaacctctgcctcctgggttcaagtgattctcatgcctcagcctactgagtagctgggattacaggtacacaccgtcatgcccagttaatttttgtatttttagtagagacagggtttcaccatgttggccaaactggtctcgaacttctgacttcaaaagatctgcccatgtaggcctcccaatgtgctgggattacaggcatgagccacagtgcccagcctaatcatatttttaataaaattgtattttatttgttggataactagttgagaagcagggaaggatcatagttttacagattgaagacaacaaaattacttcactcaactatttactaaacattgaaagtttacaagagtttctgagtatcccatttgctgtaacagaattctaccctacctaactccaggaaacttctcaaggaattacagaaagtctttgaaatcctttagagttatagtatactgtgttta

SEQ ID NO: 76282 - DNA, 1022 bp, Homo sapiens
attgttttgaggttttgaattacatgtctgaacattggtttctgtagactgagagtgaatgacttccacggaaggctataagaaatggctttcttgtaaataccttcagaggcaataacacacatcccacagtcttacccaaaccaataatctattttatgtctaagtatattttgagaattctccaagacttttgacttactcttagtgatacatcagaagcactttatagactttttaccaaatttgttactaaggagacatctgggatcattcttaagagagctgaatgaccgctgacttgggacacttctgtatagaaaggatcatttctttcaaatttgttccacatttctttccagtatttttattgttcaatagaggccatatgaaactttagggcatgttccttttgtgacaacctttgtcctttgagtcttaacacaaaatcagattgtcctcttctttaatcctatatatattttttgagatagagcctcactctgtatctcagactggagtgcagtggcatgatctcagctcactgcaacctctgcctcctgggttcaagtgattctcatgcctcagcctactgagtagctgggattacaggtacacaccgtcatgcccagttaatttttgtatttttagtagagacagggtttcaccatgttggccaaactggtctcgaacttctgacttcaaaagatctgcccatgtaggcctcccaatgtgctgggattacaggcatgagccacagtgccyagcctaatcatatttttaataaaattgtattttatttgttggataactagttgagaagcagggaaggatcatagttttacagattgaagacaacaaaattacttcactcaactatttactaaacattgaaagtttacaagagtttctgagtatcccatttgctgtaacagaattctaccctacctaactccaggaaacttctcaaggaattacagaaagtctttgaaatcctttagagttatagtatactgtgttta

SEQ ID NO: 76283 - DNA, 1022 bp, Homo sapiens
attgttttgaggttttgaattacatgtctgaacattggtttctgtagactgagagtgaatgacttccacggaaggctataagaaatggctttcttgtaaataccttcagaggcaataacacacatcccacagtcttacccaaaccaataatctattttatgtctaagtatattttgagaattctccaagacttttgacttactcttagtgatacatcagaagcactttatagactttttaccaaatttgttactaaggagacatctgggatcattcttaagagagctgaatgaccgctgacttgggacacttctgtatagaaaggatcatttctttcaaatttgttccacatttctttccagtatttttattgttcaatagaggccatatgaaactttagggcatgttccttttgtgacaacctttgtcctttgagtcttaacacaaaatcagattgtcctcttctttaatcctatatatattttttgagatagagcctcactctgtatctcagactggagtgcagtggcatgatctcagctcactgcaacctctgcctcctgggttcaagtgattctcatgcctcagcctactgagtagctgggattacaggtacacaccgtcatgcccagttaatttttgtatttttagtagagacagggtttcaccatgttggccaaactggtctcgaacttctgacttcaaaagatctgcccatgtaggcctcccaatgtgctgggattacaggcatgagccacagtgcccagcctaatcatatttttaataaaattgtattttatttgttggataactagttgagaagcagggaaggatcatagttttacagattgaagacaacaaaattacttcactcaactatttactaaacattgaaagtttacaagagtttctgagtatcccatttgctgtaacagaattctaccctayctaactccaggaaacttctcaaggaattacagaaagtctttgaaatcctttagagttatagtatactgtgttta

SEQ ID NO: 76284 - DNA, 1022 bp, Homo sapiens
attgttttgaggttttgaattacatgtctgaacattggtttctgtagactgagagtgaatgacttccacggaaggctataagaaatggctttcttgtaaataccttcagaggcaataacacacatcccacagtcttacccaaaccaataatctattttatgtctaagtatattttgagaattctccaagacttttgacttactcttagtgatacatcagaagcactttatagactttttaccaaatttgttactaaggagacatctgggatcattcttaagagagctgaatgaccgctgacttgggacacttctgtatagaaaggatcatttctttcaaatttgttccacatttctttccagtatttttattgttcaatagaggccatatgaaactttagggcatgttccttttgtgacaacctttgtcctttgagtcttaacacaaaatcagattgtcctcttctttaatcctatatatattttttgagatagagcctcactctgtatctcagactggagtgcagtggcatgatctcagctcactgcaacctctgcctcctgggttcaagtgattctcatgcctcagcctactgagtagctgggattacaggtacacaccgtcatgcccagttaatttttgtatttttagtagagacagggtttcaccatgttggccaaactggtctcgaacttctgacttcaaaagatctgcccatgtaggcctcccaatgtgctgggattacaggcatgagccacagtgcccagcctaatcatatttttaataaaattgtattttatttgttggataactagttgagaagcagggaaggatcatagttttacagattgaagacaacaaaattacttcactcaactatttactaaacattgaaagtttacaagagtttctgagtatcccatttgctgtaacagaattctaccctacctaactccaggaaacttctcaaggaattacagaaagtcttygaaatcctttagagttatagtatactgtgttta

SEQ ID NO: 76285 - DNA, 656 bp, Homo sapiens
aatgggaaacatgtttccttccttccccttcactataatgacctccctcctacacacaaatacacaccctacaacttgtcctaatcttcttgtgacatcacatcatgatattttagaaggtgtgtagcaattcccacaacacaagaaatatagctgtacatataaatatatgtatagctagcacaatttgttggctcagtttgtttggcaactaaataaaaatagcattttcttcccctagggagaacatttgaaaaatagaaaaaaaaaacctgtgagtgccctctacagctgtggggaccaatccctaccatccccatcaaattgaccatcctcccactaccatcattatttttgttataccatccttgttccaayagtacaagggccaaggccgtctacaaatctctgaacttatgccacataaatgtagaatgggatgcccttctagagattaaattagtgatttcctttttttccataaaataagttagcaggtgcctctggactgaaaaagaagacttgtcttattctaggaaagttcacaaaagtgatatcctttaaatacacaagaatagggcaactagacactttcttaattgtttcaagtataaggaatatctttagaagcaatttacaaataatattttttacag

SEQ ID NO: 76286 - DNA, 1198 bp, Homo sapiens
atgaaacaaaaaaaaaaagctcatttctaaattttctagagtcattacatttccatcctgcactaagcaggaaaagtgccgggtagaggatgctggaaaaactctacaagcatgtctagaaacagcaatatttctatcacggaatatatagccatatgggtgtctaattgtagggaaatctgaataatgtagtctagctgaaggagaaagcattcaagaagaaagagaaatttctttggtggagagcaatctccaaagatatttctgagaagttcttgttagcctgtttaatcattttcttacctaactgaaataataaacctgtttaaagaatataaaaaatgcmaatctacaattaatacatttcatcttcactatattcttttgacatgaatctctttagaaatttactgaataaatgtagatttcatttctaacatctacattttttgtttatgttattcagaggaaagaactgtaatgatgtttctttagcatatgtcttttcttcttaatataattaagtggcttttgaaaacaagatgatattagtgatttgagactatttataatcccttgatatggttatgaacttaagatgcttctagtgaaattagaagttaactcaatgattatcacagaacagtttgagtcattaaaacattacctttaatggaaatattgctactgaaggaataaatcacaatgcagcagaaccaattcagtcattaaaagaatcaaataactgcatcattaaaagttgactatgctgttaagctgaacaatttattttgaagctttataatggatcctgtgaagttcagggcagagatacttggacatgtctcatcttggcacacagagatgataatattttcatgggattctggtgtaaatggtaaagctctttatgtccatcccaagtcttgccaaggtgccctgaggtttgcgtagtcaacactttagtaatgtagatggaaacctgtggtctagagaagagttccaaattgctttctattgtgatgctgtatagatatcaccacaaagatgcttggatgctatttcataatttaaaaaaaggaaaacatacactgacatatattgtcttggcttgctgagtgagagataataatgcagaaacaaattcaactctatttttatatagttagccataaaatttaataatagaataaaataa

SEQ ID NO: 76287 - DNA, 1198 bp, Homo sapiens
atgaaacaaaaaaaaaaagctcatttctaaattttctagagtcattacatttccatcctgcactaagcaggaaaagtgccgggtagaggatgctggaaaaactctacaagcatgtctagaaacagcaatatttctatcacggaatatatagccatatgggtgtctaattgtagggaaatctgaataatgtagtctagctgaaggagaaagcattcaagaagaaagagaaatttctttggtggagagcaatctccaaagatatttctgagaagttcttgttagcctgtttaatcattttcttacctaactgaaataataaacctgtttaaagaatataaaaaatgccaatctacaattaatacatttcatcttcactatattcttttgacatgaatctctttagaaatttactgaataaatgtagatttcatttctaacatctacattttttgtttatgttattcagaggaaagaactgtaatgatgtttctttagcatatgtcttttcttcttaatataattaagtggcttttgaaaacaagatgatattagtgatttgagactatttataatcccttgatatggttatgaacttaagatgcttctagtgaaattagaagttaactcaatgattatcacagaacagtttgagtcattaaaacattacctttaatggaaatattgctactgaaggaataaatcacaatgcagcagaaccaattcagtcattaaaagaatcaaataactgcatcattaaaagttgactatgctgttaagctgaacaatttattttgaagctttataatggatcctgtgaagttcagggcagagatacttggacatgtctcatcttggcacacagagatgataatattttcatgggattctggtgtaaatggtaaagctctttatgtccatcccaagtcttgccaaggtgccctgaggtttgcgtagtcaacaytttagtaatgtagatggaaacctgtggtctagagaagagttccaaattgctttctattgtgatgctgtatagatatcaccacaaagatgcttggatgctatttcataatttaaaaaaaggaaaacatacactgacatatattgtcttggcttgctgagtgagagataataatgcagaaacaaattcaactctatttttatatagttagccataaaatttaataatagaataaaataa

SEQ ID NO: 76288 - DNA, 2313 bp, Homo sapiens
tccatatgaatttttaattgagccatacttagttttggagagaataatttggcacatagatttaattataaatggttgatacagactcttgaggacaaagagaccataatttacaaccttatattcaaaacacaccaactagatttgataatgggtccgtcaattaatatgtgatgtctcacactgggaagttctttacaagcctcatagcattcagaaaacaaaaccaaaaaaccgatggaaattgcattcataataaactacaacaagaaatcttgctcatggtcctttcagtcagaacagcccacttttttgataattacaaacagacatctcaggggagttgtatatatgggagaataaagatgacatgctatgatcagtgttcctttaaaattgaataattctttccatcctacaccttgatatgttaaattatatacatgcaaacatttacagaaacgtgcacacttataaattaatttgacttgacagaagttaaatttcactgatatgtctattaatatttaattgagaggttaataaatcagccaatcagaataaatttgaggtcattctagaaacatgttggaaatattttctttctttgtatcagtattatttttcatatggatggggtttcattatgttgccaggctggtcgtgaacttctgtgctcaagcaatcctcctgtttctacctcccaaagtgctagacttacaggcatgagcgactgcacctggccttgaaaatcttttcaagaaatgtagataccccaacaaaaatttctagacattgacatatgctaatgggcggttctccaggagcatatggaatcagttggctcagttcataatcgtgttcctacaatagtaaaatttccagaagaactggtacagacatcttttttattttttaaatgacaactttcaaatgacattaattcaaatatagtacaaaccgtgggttgttactcaaataccttatctctgtaacctaattttaatactgatgttcatttaaaacataaatttgctttcttcctaatagctcatggtgagacaggggtggaggtttgtatatataatttacatgggcaaagatttatagcatgctgttaagttttttatgagaatctttgaaattgtaagaattaccaacattttttcatgtcaaatgtgactgtcaaaataacaacttcagaacttatctcctcccggatcctcctagcctagatcctagatgcatgcttggtcatgtaaccagtgctgcagggatttatgtgagaggagctcaatatcccagaaggwactagctaattttgactggttttacatttttaatattttttctttttttgaaccacacttttattccatttgttttttgtagctataaagaataagtctaaacccctttctcatagtagctcttcagatatttggaaatgcttttgtatctaccaaattctcttgctattactctatgacatatagcatcaccctctgcctttctttagtattttaatgttttctttaattctgggatatagaattaaagattcatgctgttgcaggtatggtaaaatctattcataatatagttcaaataagattgtttttggtacttgtgatggttaacattgagtgtcaacttgattggattgaaggatgcaaattattgtctctgggtgtgtctgtaagggtgttgccaaaggagattatcatttgagtcagtggactgggaaaggcagacccactcccaatctgggtgggcaccatctaatcagctgccagtgtggccagaatagaagaacgcagaataacgtggaaagactagactggcttagtcttctggcctccacctttctcctgttctgaaagcttcctgccctcaaacatcggattccaagttcttcagctttgggaccttcaaccacagactgaacgctgcagggtcagcttccctacttttgaggttttggaactcagactggcttccttgctcctcagcttgtagtcggcctgttgtgggacctcatcttgtgactcaatactccttaagaaactccacttgatacatacatctatcctattagttttgtccctctagagatccctgactaatacagcacttctctggacatacaatgaattctagttttcttaaaccctaggtaagtttaaggattattactatgaaaataacttttcctatcttgtgttaggacagttgatttttccattacatgtgctcttctcacctataattttattgctttctgccctttgtaccattctcttattcattaac

SEQ ID NO: 76289 - DNA, 2313 bp, Homo sapiens
tccatatgaatttttaattgagccatacttagttttggagagaataatttggcacatagatttaattataaatggttgatacagactcttgaggacaaagagaccataatttacaaccttatattcaaaacacaccaactagatttgataatgggtccgtcaattaatatgtgatgtctcacactgggaagttctttacaagcctcatagcattcagaaaacaaaaccaaaaaaccgatggaaattgcattcataataaactacaacaagaaatcttgctcatggtcctttcagtcagaacagcccacttttttgataattacaaacagacatctcaggggagttgtatatatgggagaataaagatgacatgctatgatcagtgttcctttaaaattgaataattctttccatcctacaccttgatatgttaaattatatacatgcaaacatttacagaaacgtgcacacttataaattaatttgacttgacagaagttaaatttcactgatatgtctattaatatttaattgagaggttaataaatcagccaatcagaataaatttgaggtcattctagaaacatgttggaaatattttctttctttgtatcagtattatttttcatatggatggggtttcattatgttgccaggctggtcgtgaacttctgtgctcaagcaatcctcctgtttctacctcccaaagtgctagacttacaggcatgagcgactgcacctggccttgaaaatcttttcaagaaatgtagataccccaacaaaaatttctagacattgacatatgctaatgggcggttctccaggagcatatggaatcagttggctcagttcataatcgtgttcctacaatagtaaaatttccagaagaactggtacagacatcttttttattttttaaatgacaactttcaaatgacattaattcaaatatagtacaaaccgtgggttgttactcaaataccttatctctgtaacctaattttaatactgatgttcatttaaaacataaatttgctttcttcctaatagctcatggtgagacaggggtggaggtttgtatatataatttacatgggcaaagatttatagcatgctgttaagttttttatgagaatctttgaaattgtaagaattaccaacattttttcatgtcaaatgtgactgtcaaaataacaacttcagaacttatctcctcccggatcctcctagcctagatcctagatgcatgcttggtcatgtaaccagtgctgcagggatttatgtgagaggagctcaatatcccagaaggaactagctaattttgactggttttacatttttaatattttttctttttttgaaccacacttttattccatttgttttttgtagctataaagaataagtctaaacccctttctcatagtagctcttcagatatttggaaatgcttttgtatctaccaaattctcttgctattactctatgacatatagcatcaccctctgcctttctttagtattttaatgttttctttaattctgggatatagaattaaagattcatgctgttgcaggtatggtaaaatctattcataatatagttcaaataagattgtttttggtacttgtgatggttaacattgagtgtcaacttgattggattgaaggatgcaaattattgtctctgggtgtgtctgtaagggtgttgccaaaggagattatcatttgagtcagtggactgggaaaggcagacccactcccaatctgggtgggcaccatctaatcagctgccagtgtggccagaatagaagaacgcagaataacgtggaaagactagactggcttagtcttctggcctccacctttctcctgttctgaaagcttcctgccctcaaacatcggattccaagttcttcagctttgggaccttcaaccacagactgaacgctgcagggtcagcttccctacttttgaggttttggaactcagactggcttccttgctcctcagcttgtagtcggcctgttgtgggacctcatcttgtgactcaatactccttaagaaactccacttgatacatacatctatcctattagttttgtccctctagagatccctgactaatacagcacttctctggacatacaatgaattctagttttcttaaaccctaggtaagtttaaggatkattactatgaaaataacttttcctatcttgtgttaggacagttgatttttccattacatgtgctcttctcacctataattttattgctttctgccctttgtaccattctcttattcattaac

SEQ ID NO: 76290 - DNA, 2313 bp, Homo sapiens
tccatatgaatttttaattgagccatacttagttttggagagaataatttggcacatagatttaattataaatggttgatacagactcttgaggacaaagagaccataatttacaaccttatattcaaaacacaccaactagatttgataatgggtccgtcaattaatatgtgatgtctcacactgggaagttctttacaagcctcatagcattcagaaaacaaaaccaaaaaaccgatggaaattgcattcataataaactacaacaagaaatcttgctcatggtcctttcagtcagaacagcccacttttttgataattacaaacagacatctcaggggagttgtatatatgggagaataaagatgacatgctatgatcagtgttcctttaaaattgaataattctttccatcctacaccttgatatgttaaattatatacatgcaaacatttacagaaacgtgcacacttataaattaatttgacttgacagaagttaaatttcactgatatgtctattaatatttaattgagaggttaataaatcagccaatcagaataaatttgaggtcattctagaaacatgttggaaatattttctttctttgtatcagtattatttttcatatggatggggtttcattatgttgccaggctggtcgtgaacttctgtgctcaagcaatcctcctgtttctacctcccaaagtgctagacttacaggcatgagcgactgcacctggccttgaaaatcttttcaagaaatgtagataccccaacaaaaatttctagacattgacatatgctaatgggcggttctccaggagcatatggaatcagttggctcagttcataatcgtgttcctacaatagtaaaatttccagaagaactggtacagacatcttttttattttttaaatgacaactttcaaatgacattaattcaaatatagtacaaaccgtgggttgttactcaaataccttatctctgtaacctaattttaatactgatgttcatttaaaacataaatttgctttcttcctaatagctcatggtgagacaggggtggaggtttgtatatataatttacatgggcaaagatttatagcatgctgttaagttttttatgagaatctttgaaattgtaagaattaccaacattttttcatgtcaaatgtgactgtcaaaataacaacttcagaacttatctcctcccggatcctcctagcctagatcctagatgcatgcttggtcatgtaaccagtgctgcagggatttatgtgagaggagctcaatatcccagaaggaactagctaattttgactggttttacatttttaatattttttctttttttgaaccacacttttattccatttgttttttgtagctataaagaataagtctaaacccctttctcatagtagctcttcagatatttggaaatgcttttgtatctaccaaattctcttgctattactctatgacatatagcatcaccctctgcctttctttagtattttaatgttttctttaattctgggatatagaattaaagattcatgctgttgcaggtatggtaaaatctattcataatatagttcaaataagattgtttttggtacttgtgatggttaacattgagtgtcaacttgattggattgaaggatgcaaattattgtctctgggtgtgtctgtaagggtgttgccaaaggagattatcatttgagtcagtggactgggaaaggcagacccactcccaatctgggtgggcaccatctaatcagctgccagtgtggccagaatagaagaacgcagaataacgtggaaagactagactggcttagtcttctggcctccacctttctcctgttctgaaagcttcctgccctcaaacatcggattccaagttcttcagctttgggaccttcaaccacagactgaacgctgcagggtcagcttccctacttttgaggttttggaactcagactggcttccttgctcctcagcttgtagtcggcctgttgtgggacctcatcttgtgactcaatactccttaagaaactccacttgatacatacatctatcctattagttttgtccctctagagatccctgactaatacagcacttctctggacatacaatgaattctagttttcttaaaccctaggtaagtttaaggattattactatgaaaataacttttcctatcttgtgttaggacagttgatttttccattrcatgtgctcttctcacctataattttattgctttctgccctttgtaccattctcttattcattaac

SEQ ID NO: 76291 - DNA, 2313 bp, Homo sapiens
tccatatgaatttttaattgagccatacttagttttggagagaataatttggcacatagatttaattataaatggttgatacagactcttgaggacaaagagaccataatttacaaccttatattcaaaacacaccaactagatttgataatgggtccgtcaattaatatgtgatgtctcacactgggaagttctttacaagcctcatagcattcagaaaacaaaaccaaaaaaccgatggaaattgcattcataataaactacaacaagaaatcttgctcatggtcctttcagtcagaacagcccacttttttgataattacaaacagacatctcaggggagttgtatatatgggagaataaagatgacatgctatgatcagtgttcctttaaaattgaataattctttccatcctacaccttgatatgttaaattatatacatgcaaacatttacagaaacgtgcacacttataaattaatttgacttgacagaagttaaatttcactgatatgtctattaatatttaattgagaggttaataaatcagccaatcagaataaatttgaggtcattctagaaacatgttggaaatattttctttctttgtatcagtattatttttcatatggatggggtttcattatgttgccaggctggtcgtgaacttctgtgctcaagcaatcctcctgtttctacctcccaaagtgctagacttacaggcatgagcgactgcacctggccttgaaaatcttttcaagaaatgtagataccccaacaaaaatttctagacattgacatatgctaatgggcggttctccaggagcatatggaatcagttggctcagttcataatcgtgttcctacaatagtaaaatttccagaagaactggtacagacatcttttttattttttaaatgacaactttcaaatgacattaattcaaatatagtacaaaccgtgggttgttactcaaataccttatctctgtaacctaattttaatactgatgttcatttaaaacataaatttgctttcttcctaatagctcatggtgagacaggggtggaggtttgtatatataatttacatgggcaaagatttatagcatgctgttaagttttttatgagaatctttgaaattgtaagaattaccaacattttttcatgtcaaatgtgactgtcaaaataacaacttcagaacttatctcctcccggatcctcctagcctagatcctagatgcatgcttggtcatgtaaccagtgctgcagggatttatgtgagaggagctcaatatcccagaaggaactagctaattttgactggttttacatttttaatattttttctttttttgaaccacacttttattccatttgttttttgtagctataaagaataagtctaaacccctttctcatagtagctcttcagatatttggaaatgcttttgtatctaccaaattctcttgctattactctatgacatatagcatcaccctctgcctttctttagtattttaatgttttctttaattctgggatatagaattaaagattcatgctgttgcaggtatggtaaaatctattcataatatagttcaaataagattgtttttggtacttgtgatggttaacattgagtgtcaacttgattggattgaaggatgcaaattattgtctctgggtgtgtctgtaagggtgttgccaaaggagattatcatttgagtcagtggactgggaaaggcagacccactcccaatctgggtgggcaccatctaatcagctgccagtgtggccagaatagaagaacgcagaataacgtggaaagactagactggcttagtcttctggcctccacctttctcctgttctgaaagcttcctgccctcaaacatcggattccaagttcttcagctttgggaccttcaaccacagactgaacgctgcagggtcagcttccctacttttgaggttttggaactcagactggcttccttgctcctcagcttgtagtcggcctgttgtgggacctcatcttgtgactcaatactccttaagaaactccacttgatacatacatctatcctattagttttgtccctctagagatccctgactaatacagcacttctctggacatacaatgaattctagttttcttaaaccctaggtaagtttaaggattattactatgaaaataacttttcctatcttgtgttaggacagttgatttttccattacatgtrctcttctcacctataattttattgctttctgccctttgtaccattctcttattcattaac

SEQ ID NO: 76292 - DNA, 1611 bp, Homo sapiens
aagcagcagagtctaaacatctctacggggaaaagcacagaaagaagggaaattgtcccttgatgaaaaaaaaacaacaaagaaagaatcccgtgataaatttttcacaatccttatctgagattgccccacctcaaatactaccaacatcaatcactatgttttcttcttttttgaatattccagttcttgtgcccccttatgctttgaacctaattttgtctgaacacttaccaccctccagtgcaatgattgtttgcttattgttgcctcaaccccgtcccattagactgtaaaatggacaaggataggaatggtgtcatacaagttacaataccaacttctggcacagttccaagcagtgaaaatgtggtctataaatattggtttaaacaaagtactaaatgaatgtttacctaattcaagtctatttcacccctacctaaagtacagccacttcacatttccagattcttcattactctccgtgctacacccccttcctactgagatgttcttaaatgaccatgatcctgcatggccaccagtgtaattctttcttgtggtctccccagggccctgtgaaggacccttagagacctccaatctattctcttctataaacaaacctaccatcatttcctttaagaaaataaagcaattatcaatgttgattcaaataataagatacaaggcagaatcttctaatttgattttgcattttctaaacaaatgagaggctagaacctgtgagaaaagctttatacaaattgggttttcttttaaataggattgccttatagtaatccaatttgatgtcagatcctcaatgagtcaggagcctttttcatctccactggaaccctgtgacattgagattggagggctgcccattgacatcctcatgggccccacttccacctggatcctttctgggacaccgtgtcattgccagaagaaagtggtcggcttttccaagagtctttgtgtgtgtgattttcagatatgtggaatataaatacattcacgttcacctctttgaaaagctcaaccctgaaaaataaaaattaattgtgcaagtaaaattataaaataaaacaaaactacttttcattcaaactacttttgatactcaaaaacttggctttcttcttttatttttctgtgtctctgccccatatttttttgattaatgtctaattgcaaagataaacaaaaagtggagtagaaaacgcaacatgttaggaaccccaagtggtctacataccgactcaaagaagccagagcagttttagtagcttagcttagagttttttatcctgattatttattccctatagagaacagtggtagaaatactggaaagagtttctatggggtggtgagcactcaygataatttttacttttttctaaaagtcatgaaaaatacaaagcatgcaagattaaaaaggtgaatactgatcgttcaatgccatcagtcagcagccagttttgaagcttgtctttcacccaatagtctagaatcctgctgtcaggcctctggatctggccaccctctagaaggtgactttggaagtgtgttttactccctatgttctccagttaaaga

SEQ ID NO: 76293 - DNA, 749 bp, Homo sapiens
attttgaggtatcaggctaagggctggtccaagtccagaggtgattgattttctacaaaattaatcaaagagagtttacaaatctattgagtttatgtaaattacgagacagaagaatgatttcaaagaatagttttaaagagtataatgaagcaatagtgaatcagttcaattttggacattgacaaaattgtgaaaaaagataaacccttacgttttaagtcaatactctgatcactgatagaaagcagatataactgaatttagtccaaacttgttgagcgaaacatactttttaattctattttcccccagagttcagaggtcaaagtgcttctaaaactttataaaaatattcaaataaacatatgccaggaaactacaaattgtgcttattttaatactgtttmcaatatcaaagtaactaaaggatattcatgcaattcaaaactaaggatctcagatttatagtactgtaaaatgatttcttttacatacatctatgctaaatgttgagttcttgcaggagaaattgagaactgatgtagcaacttatccaaataagatacttaaccaaccctagtatggcttctagtagtatgaggtcatgtcgctcggatgacccagctcccttttgagttccggtctagaaaagctcagcactgtccaaagaatttactctttgttccagccaacacctgacatagacatctgacagcttttcttagagtgtttatgaaaagaggatt

SEQ ID NO: 76294 - DNA, 967 bp, Homo sapiens
tgagatactatttctaacatatcaaattgcaaagatcaaatatttggtaacccactgtttggggtgaggaaagaaagagagcactttctgttccccaggcagagctggtccacgctaggagggtctgtgtgggcagtgggctgggggctggatgccctgtgcagtggaggcagccagcacagtcgtgggcagagccctgctggcacttgggagcattcagagggtcagctgtgtcttcagcagccccaagtttcagcactaggccatgcaatgccacattatcaattaaataggcttccagcattcatccaggaacttccaggagaaaagtgtgtttgcagatccaaaggaatgacaaaatatgaagccctaaatcattaataaataaggacctggttctattttatgtagctgtgcaaagtctctctgcacattctggtcatggggcatgtaagtgatgagtccagggacacatagcaaaagacaaggcaggatttaaacaaactcagattgattttgtatgcttgttccataaatctggggttctcagggggctcacaaagggagatcttaaagtgcagattccccgctccaccccatgactgtttttcatcaccacacctctyacacccaatgtgtggggtttttcttacaccaatcaattcaccgattctacagacaccagctggtgtcctacaattcaatccagttctgacacagtctacctggagttaacatcagatcccacaagttaaaggccctgcaaggctgcccctgcttcagataccaatagctagttctggacctctcctatttctgaccaactaattataaattgggtaaaatcttggctatcaatcccatgacaccctccctaggttcaataatttgctagaatggctcacagaactcaggaaaacagtgcacttgttattactgatttattattcaaaaaatacaactcaga

SEQ ID NO: 76295 - DNA, 733 bp, Homo sapiens
ggcaagatcctgttccccatcccccttaaaaaaaaaaaacagctgatagtgtgggaggagagtgagaccccacctcaccccaccaaggacatggtcaagctatgaaagacaaatgcaaattgctaggcaagaggctaggagataaaaggggagggtttgtttaagggggaagagagaaagaactctctctttccaaagaagagaatagagccagcaaaatagtagggtctcatgggctgtgtatttgacccctcttcacaacccaaaatcttcagtaaaataaatacgtatactcacaaaacatgtcatgagggggtttacagcagaaactaacataggaaaccaaggggatatgtttgttccatgttgttcagggaagaaacagtatacatggaaacaagagtccaggagccagaggaagatgttagaatctcagtcccatragttggtaaatatctaggggaggagtttagacctccacaggccattggattggtggggggttgagctaattgtacctagatcttcaaaatgcaaggactgacacgtgggcttgaagacatctctggggatgcagcaggagtctcctgcagtgtgcctggcccacctgaggatggccctgaagggtctgggtcacaaggcaaaggatttaacctggagaatgaaaggagaatggaaggtggaaatgaggcaacagcctgcagcaggagaaatatttagtgtaaaggcagga

SEQ ID NO: 76296 - DNA, 550 bp, Homo sapiens
gttgggggtgggggtggcggccagcatagctggaagatcctgaggactctctgccccactaaaggttaaagactactggatccttagcaatccttgtgttgttcttggtcatatagatgaggacactgarccccttacatgatttgttgggcttccccacatctggcatacatagcacgcatgtatacagtaggtgctgtatgtgtggttgagacatttctagtctagggaggtagttcaggtgaatgattaagacctgcagttgactcgatccaggttcaaacgtaggtggttttataggctgtgtgaccttgggcaagttgcttaacctcttttttttttttggacagggtctctctgcagtccaggctggagtgcagtggtgtgagcttggctgactgcaacctcgacctcccaggctcaagcaatcctcccacctcagccttagctgggactacaggtgtgcgccaccacacccagctaatttttttactttttgtagagacggggcggattcggggggtggttcactgttactcaggctgttctt

SEQ ID NO: 76297 - DNA, 603 bp, Homo sapiens
tgtggatatttcccaaataaggaagggaagggggatgtgagttacagtggtgggacgtgtggtttcgaagggtggaatgggtgcagagttagcaaccaagggaacagatgtgagttattgattagaactgataggaaggttgtttacactaattaggggcaaggaggcatggagaacaagaaagttgagtttgagaacaaagaataaggaagttaacaagctaaacctttgaagaggaatttattatatcttatatgtagaagggtttttctgatgttatcttctagaatttttatagtttcaggtcttagatttaaatccttgatccattttttttttattgagactttttttttaatgagccattctcttgcctcagcctcctaagtagctgagactacaggcccctgcaaccacgcccagctaattttttgaattttaatagagacagggtttcacggcgttagccaggacratctcgatctcctgacctcatgatccgcccgcctgggcctcccaaagtgctgggattacaggcgtgagccaccatgcccagcctccttgatccatcttgagttgatttttgtctaaggtgagagatga

SEQ ID NO: 76298 - DNA, 709 bp, Homo sapiens
atctaaaatgagctactactaggccaagtgggatggctgacacctgtagtcccagctctcaggaggctgatgtgggaggatcacttgagtccaggaggtagaggctgcaatgagccatgatcaccccactacactccagcctgggcaacagaccctgtctcaaaggggagaaaaaaaaaaaaaaaaaaaaaarggagctactactactcaattcaattctgactgactgatgctctgtgggaattcaagcgcaaggtgaccaatcttatgttttgcaagtgatgtcggaaactgggattttatgtaaaatctctatttcaattatgtaggaaaacaaaacaaaaagagaactataactgcaagtcaggtttgacctatgaaatggtagtttaggacttctgacctagatcatctgtgtggtcaattgccaaataatgacattttaaaatcacagcgtccataaagtctttttaccatagaagagactatgatgcgtgccacattaatgtgagcagtatacatgtttgtgtatagtgcatatacacaggaaactaaaaaaatcattcatccatccatcttgtttcttctctgaattgaaacctttttgatagattcatttcttctttacttggtgaggtaattataaagagctgcactatttgcgttagattttcctagagaagaaaccctgctgtaaaatttttaaaaa

SEQ ID NO: 76299 - DNA, 636 bp, Homo sapiens
atgattgagtcaaccacaaatggtattgtcaaccatggctgttgaattaatgagaacaattaaaactcatttttcagaggtcaaaagatgctcacttttgtgatttcatgtcagatgattgatgacttttttttttttttttttttgagacggagtctcactctatcgcccaggctggagtgcagtggcatgatctcggctcactgtaacatctaccgctcagattcaagcaattctcttgcctcagcctcccgagtagctgtgattacaggcgcctgccactgcgcccggctaatttttgtagtttttagtagaggtggggtttcgccrtcttggctaggccagtcttgaactcctgaccttgtgatccacctgcctcggcctcccaaagcgctgggattacaggcatgagctaccacgcccagcctgatgaccatttttccacccttcattttgacatttttgatattgaaaaccacctgcaacagaacaccatttaagatcaatgactagtgtcagaatgaaagagataacactgttcatatttgagaggcagaaccttagaagaaactgggtgttaagacgatttgtgttagaattctagctgtgtgattagctctgtgaccttggagatat

SEQ ID NO: 76300 - DNA, 664 bp, Homo sapiens
ctttgtaggaacatggatgaagctgggaactatcattctgagcaaactatcacgaggaccataaaaccaaacaccacatgttctcactaatatgtgggaattgaacaatggaaacacttggacacagggaggggaacatcacacatcagggcctgtcatggggtggggggaggggggagggatagcattaggaggaatataattacattatttacctaatgtaaataatgagttaatgggtgcagcacagcaagatgacacatgtatacatatgtaacaaaccagcacattgtgcacatgtaccctagaacttaaagtataataaaatacataaataaataaaatgatagacttggacaaatgatgtctaagctctcttagttccaactttctaaaatcttagcattttaggaaatcttgcagccccaaaacctctagacaccatgaaatcaaatactaaattgtgtaatctagattcctatattggtagttcagaggaagagagaatggatggggaattttgcagaaataaaaagaaaacatcaaatgcggctcttcyatgacctgctaggatctgcttctaccaaatcatggatatagaaataggcccagctgcacaccactctttctaattatcctgttcttccaattcctcttttatgca

SEQ ID NO: 76301 - DNA, 925 bp, Homo sapiens
catgtggaaaaattcacaaacaattcaagatagaatctctgtaacccttctttgtaggacacatgtgcaataggaatctgaggtctctacaatgtatattcccaatgattattgtgatcaatcctggggcaccatctattctaggtttcagggagcaatttcttattctctcttttcaatgaaggtgtctcgacataccaaccgttcatatcatgttcatagcgtgatcttgaacacaaaaccacacagcctctcattctggaagggcaagaagctgagcctctgctaggaagtgtttctctgtcagactctccagctagagtctagctgctctttgcagaggcagctccaggcgaaggactttcttgttgtttgtagccacaagtccgacaactactttccatggtgtctctcttcaggggtgttactattcagcattgctcttgcatatcctcccatcagagtagttcaatagactctttggtgtctgctgaagtctggctttctgggctccctctcaaaaacggcatatttagccttactcttggcatcacctctgcagggcgtcggacagcactgcacccatggctttgcataagttctcaacccttcagaggaatgaaggaagctgcaattgcccccaattcataagccaagggtctaggcactgccttcttgttgaatgctgaccaacattcaaatttaagtattcttgcctatctgataagcaaaaatgttcctgatgttttaacttggaagaaattatttcaatatcatgatttccataatttctatcatttggtgttcttataaaagctatctctcatcttattctggagatcwttccttcacataggaacctctacatgacacagaaaagaaaagatagatgggcggcgagagtctagatttatattctagctgt

SEQ ID NO: 76302 - DNA, 592 bp, Homo sapiens
gaatacttatcaaatgccttgtatgtgcttggtgccagatacagctgtgacacagggaagaagacagacttgatccctgctgtcatttagctgtgagactcatgagggataataaccaataatcacatcagtaaatgactacaaattgtaataagtgctgtgaaggaaacactaaggcattgctacagaggataacaggaggaagctaagacctcactgagcctgtggctccggccgctgagtgatggtcccttctgtctgccagggtgggatcgggcactcatccagttgcaggtgcgagcactattgagtagcacagggtctcaagctgtggccatggacttgggcaacaggaaattagaaatatcctctggaaagctggccagatttgcaaatggctctgctgtaatacagtcaggtgacactgcggtaatggccacagccgtcagtaaaacaaaaccttccccttcccagtttatgcctttggtggttgactacrgacaaaaggctgctgcagtaggtagaattcccacaaaccctctgagaagagagattagtacttctgataaagaaattcttacacgttgaatag

SEQ ID NO: 76303 - DNA, 692 bp, Homo sapiens
agagagatgtacaagaggagcggaccttgagcccaggtgggctgtgcgctctgcgaccctgaggccatctaagggaagctccgccatccagcgccagtgccagatctgcagctgcaaactgtgcgtggggcactggcagcagtgagggcgagtgggggaaggagcagcccctgactctgcctccatgcttctccagctacctgatactagccacacagactccagggccagagcctcagcgtgaagccgggccatccgcgaagccacccaggtggccgcggagtgctcttgccagcaccctatctcccttccgaggaggagcggggygggctgcaaggccagacaggctctccttctcaggccgggctggcggcgctcctgagatcctggggccgcccgggcgatcccaagaggacctgcgagcccatttgcgcccgcccagagctgcagccccacctgccggcgcgcgcctccagggagcggcttccgggagccgggcagcaaccgccgtgcaggcgcgcgcccaacggcttttcaagtctcactcggtctgagaggtcggaggctgcgagtgtcgctgctgaaggctgtggtggaccgggctggatcgcggattgtggagtagatcatagatttgggatcgcggattgggggttgaatcgcggatttggggttggatcagggatttgggg

SEQ ID NO: 76304 - DNA, 756 bp, Homo sapiens
aacagagtgagtttggctatttcaagaaatcctatccttcagagagaaaagatttgccactctgaagatattcaaaagaagttgatgctgactctacagacaattccaaaagagagatttctccacagcctccaccactggaagctccccaagcaggaggaagataccttattttgatgtgtatccacagtgcctggtacagcagctgtcgcataagccaaatcccagggcgagcttcttgggcagtgagctgtgcagccactcagggactggaaggaccctgcacttggtgttttgctctgctgtcattatcttggaattcttcataatttaacaaagagccttgcattttcattttgacctgggactcacaaattaagtagccattatcattcaataactattaatatttttaaaactgaagtaaaccattccggttctggattctactcataggaaacaagatagagaaagcaaggagcccaaaccctaagtttgaatggtattcccagcatttaccaatgttctagtttgggttaataatctttaatattaaagttaaataatcttctacactaggagtccccaacccctaggctgcagactggtccaagtctgtggcctgttaggaacctggctgyatagcaggatgtgagcagctagcaagagagcgactcaccatcactcacattaccattgagctccacctcctgtcagatcagcagcagcattagattctcataggagcatgaatcc

SEQ ID NO: 76305 - DNA, 756 bp, Homo sapiens
aacagagtgagtttggctatttcaagaaatcctatccttcagagagaaaagatttgccactctgaagatattcaaaagaagttgatgctgactctacagacaattccaaaagagagatttctccacagcctccaccactggaagctccccaagcaggaggaagataccttattttgatgtgtatccacagtgcctggtacagcagctgtcgcataagccaaatcccagggcgagcttcttgggcagtgagctgtgcagccactcagggactggaaggaccctgcacttggtgttttgctctgctgtcattatcttggaattcttcataatttaacaaagagccttgcattttcattttgacctgggactcacaaattaagtagccattatcattcaataactattaatatttttaaaactgaagtaaaccattccggttctggattctactcataggaaacaagatagagaaagcaaggagcccaaaccctaagtttgaatggtattcccagcatttaccaatgttctagtttgggttaataatctttaatattaaagttaaataatcttctacactaggagtccccaacccctaggctgcagactggtccaagtctgtggcctgttaggaacctggctgcatagcaggatgtgagcagckagcaagagagcgactcaccatcactcacattaccattgagctccacctcctgtcagatcagcagcagcattagattctcataggagcatgaatcc

SEQ ID NO: 76306 - DNA, 1512 bp, Homo sapiens
aatggaaaacattttccttgcactaaagctaggagcataagacactgagaatctgaaggagactaggtaacaccaaaacagttacagcatcccaaggccatattagtggataagttcttatttcagagacaaaatcgggcacacacttcccattaacacaaaaccaacctcacctcctcactaatgcagagtgggcaattccagatgtccacgtgcttgtgggctgtgggtggctttccttgcatctcagctggcagatggcctattgcggaactttatgatcatgtgatttaatacttaataaactcatatatatatatatcttctatttgttctgtccctctagagaaccctaactaatacagacaccaaaggaaatggtcaagaaaaagaaaacagaaaggggtcgggggtggggagcgtagaattcagacacttccagaggctccacaattgtctctgaggatctctaagaagcctgtctgctctctaggaagtcagcccgctccccgccaaacctgcactctctcccaggttctggtctggctgcataagatcctcaggcaagggtggccccagagggctagtggctctcctgagctcttcccacaggaatccccgctctgcagacaggacacagtggctttctcatgggtgacatggaattatgagcccaagcatgccagtgacatccctgctcatggagctgtagccctgttgcgggccacagggcactgccccccatgggaccttgagtgggctgggtgctaccttcagagggtctggaggatccagcacagaagcccagccagggatgactgacacctggccctggcccctggctcagaaaccctccaaccatgccaccatccagacaaggccaagtctagaaatgatctcctgattacaactggattatattcctggtttcttctattgttgttaagaacatctgtttaatgtaaaccataatttttgaacctgattttgacattaaaaaaaattggctgggtgcggtggctcacacccgtaatcccagcaytttgagaggccgaggcgggcggatcacctgaagtcaggagttcgagaacagcctggccaacatggcgaaaccccatctctattaaaaatacaaaatcagccaggtgtggtggcacatgcctgtaatcccagctacttgggaggctgaggcaggagaatcgcttgaacccaggaggtggaggatgtagtaagttgagattgagccatagcattccagcctgggtgacaagagtgaaactccatctcaaaaaaaaaaaaatatatatatatataggagaaataacaaaaaaggaagtggcctctttcattaccagaggtgaggcagacacacagagcctttgccttactttgcagccctctgcagcatctggcactgggttcaaggcacactgttggagctcacattggtgtcaggcacacattcaagctagaaatgtccctctggcaaggcttatcttttaataatacaaa

SEQ ID NO: 76307 - DNA, 643 bp, Homo sapiens
aacacacattttttaaaatacaaaatatacaactgaaagcagcaattcttctcttaaaaacaaacgttggccgggcacggtggctcacgcctgtaatcccagcacttcaggaggccgagacgggcagatcaagaggtcaggagatcgagaccatcctggctaaaacagtgaaaccccgtctctaccaaaaatacaaaaaattagccgggtgtggtggccggcacctgtagtcccaactactctggaggctgaggcaggagaatggcgtgaacctgggaggcgttgtaggattttctggacaggacagagttcctagagaatggtatgaatattaaagaaaagtgtaacttctctaataatttgacagcatgttgtattcacacatgcttcgaacattttctagattcttgcgtacatgccatgttatatttcatcagccctgtgagattagaacagcagatattgttatttccattttatgggtgtgaawtatagagttcaggggaattaggggttttatcggagatgacccacttgtcacctgatggagctcagccagaaaccaggccttccagactccgttagaaagtccagtacttatttcattgtagtgtctaagttctgtccaaatttattaaggtca

SEQ ID NO: 76308 - DNA, 735 bp, Homo sapiens
taggggtgacatcagagttgggacctggagtgccagtgcactgggtgcaaatgtcctccctctgggactcagtttctccactgcccagcccagctggatttttaccctgctgctttgagaactcaggagccaatgccacatccatggcccaggaagatggggattgcaaagtggctagagacaagcagacaatgtcgtgattttcagcgagggaggcagggcctgtgagtaggaagccaaagagctggtggcttcagacagtgctcacaccccctctgcaggccagtgctagacaacccaggaccttcctgtcccaggcttgctagctccgtgggggacatgaggccaccctgaaggtcagtgatcagacaggacctcatcyatggtcatccatccactcactgatgaatttgtctcaaacttgctttgggatacccaccacgtgcccagcacatcccaggccctgggggcactgccatgggtatggagaccctgtcccaaggctcctggccttgcggggaggcagagaagagacaggagaacctcagtcggtgacaggggctgtgagaaagtagccccagcgatgtgatgtggagggacgcccctcccgcaggtgggtctgtgtgacctggcctgagactgtctggcgagctgaatgggggcgggggcgtcagccacgcgcaggagggagggggctcccggcagagatgggcgcgaatgcgcagccacagcggt

SEQ ID NO: 76309 - DNA, 1494 bp, Homo sapiens
cagaagcagcagaaggtgcccaggtcatggaggcctaggtttgaacccatctgctatggtctgagcatgtccccccacaaatttatatgttgaaacataattgttgactggtatatattgaaacgtaattgccagtgtgattgtattgagaggtggagcctttcatgggtagtaccctaaaaaayggaattcgttcccctataaaagaaagaggtatgagggagctgttgtccttcccccatgtgaagatgcaggagggaggcaccctctgtggagcagagagcaacttgatcttggacttctctgcctctagaactgtgaggcatacatttctactacttataaattatccagcctcaggtattttgttatagcagcagaaacagactaagacacactccttcctctctgggagactcttacagtcctaggattgctctgggcctcagacaccagatggggctctcaacgccagagctggccaaggcaggcgtccagtatgccttcactttcttcccttcttgggcacccgacatgtgtctttgactttcagaaatcatagcaggggtcctggtcctcttctgctgggtggcgctgtctggggctggggcctgcagaagggtgcgcttttgtcctgcctgtttccagtttccttagggccttactgcccagggtcctgccaccaatggtgccccaaactgccacgccccataagcctgtccaggaagcgtcctacagactcatctgtgaaaggctcatgaatgtgaggggtcaccttggtttatgaatttggaatacgctaactcaggcaccgctgttgccagttcaatgccttccggacccacaccagcatcctaattggggaatttctgctttacgtgcagtggatgtcgctaagcgtgggacgcagtgcagactcttggaatcagctaattagtgcccctgcagaggaaatatctacctgggtcatttggtcaggaagttgtttagttgtttgttttaaaatccagacagtgttcaaaagtgccaatctggctaaataatacatagtaaaatgaccactgctctctgtgacggtttaagcacctgcacagtgccattggctgagtccctgtggcctcaggtaattcccacagcagctgccatcaatttacagatggggaaactgaggctcagggacacaaggggacatcccagggccatgcagccagtgtgggccttgagctcagcctgctgtctggggtttgtgcggttgacagtctgggctatttttgagcgtggactgctctcactctctgtctttgtgggcctctctctgctcacagcctcccatctgtccatcacgtggaccacccaataaacacatgctgagcagccgtgggtttcaggcctgagctaggctcagccaggagtgcctctctgttaacccccaggccttctctgtccagcctgggtccactgtcaagaggccaccactgccctgagcagcaccct

SEQ ID NO: 76310 - DNA, 591 bp, Homo sapiens
ctgcctctgcctcccagagtgttgggattataggcgtgagtcaccatgccaggcctaggtttccttcmgctctgatctttgtagcagtctccgggaagggggtcacaggccggggcactgattacaccctccccaccgcaccctgtgccccgccccctttcccacccctgccaaaagaggacctcttgggcggggcagtccagggaggcctggggctgcccttggttgtttggtgaccccattccttctgcgtgctcgggctgcagctcatacccccgacaactccttcatgggcttcgtgtccgaggagctcaacgagacggagaagcggctcatcaaaggcggcaaggccagcaacatggccgtggtgtacggcaaggaggcgagcatctggaaggtgagcgcggcccctgcgcgcgggaagcaccagcctgctcggcacaggcccccgcctgggtcccgcatctcctccttccaggatgcggtgccctcctcccgccccagccctgcatgctggaaatgtctcccatgaaccagttcaggacaaaaagttcctaactgctatttaaagacacccagcctaggagctga

SEQ ID NO: 76311 - DNA, 591 bp, Homo sapiens
ctgcctctgcctcccagagtgttgggattataggcgtgagtcaccatgccaggcctaggtttccttcagctctgatctttgtagcagtctccgggaagggggtcrcaggccggggcactgattacaccctccccaccgcaccctgtgccccgccccctttcccacccctgccaaaagaggacctcttgggcggggcagtccagggaggcctggggctgcccttggttgtttggtgaccccattccttctgcgtgctcgggctgcagctcatacccccgacaactccttcatgggcttcgtgtccgaggagctcaacgagacggagaagcggctcatcaaaggcggcaaggccagcaacatggccgtggtgtacggcaaggaggcgagcatctggaaggtgagcgcggcccctgcgcgcgggaagcaccagcctgctcggcacaggcccccgcctgggtcccgcatctcctccttccaggatgcggtgccctcctcccgccccagccctgcatgctggaaatgtctcccatgaaccagttcaggacaaaaagttcctaactgctatttaaagacacccagcctaggagctga

SEQ ID NO: 76312 - DNA, 959 bp, Homo sapiens
cctgttcagctagagacctcaaagaaactgcttccaaaaaaagacatctttgccctggtgtttgtaaccaaaggaagtcagaggtggctggatggagagaaaaatgaaagcagcatcttgggagagatgccttccagagtacaggggatcaggtggccgagaagcagaggaggaaggaggggagatggaaggtcaggtcatttatcatccttccagggagcaggagctggggacccagggcaaggcgttgggtgaactttgtgctaagcgggtctgtcttattctgcattccccagaaagtggagcctgaggctaaggcttaggtgctattttagtagagtgtagtcccaggaagcgaggggtgaaggatcaagggaatgaagcaggaaggaggcaaaggcagctggttcaggcccggggcaaacccaccctcatccctggaggaaacattccaggccctcagacagtcatctgggtgagcttgggtggaacttttcaatccgtaggtggcaacccatggataaattgtgaagccaactcagggagtcttgactagcctttttggttcgtgtacaattttttgtagaaacatatgctttcatttctcctgggtaaatgcccaagaatatmatggctggttaatactgtagaagtgtgtttaactttttttaaaagttattacgaggctttcaattcttgaacaaattcatcaatgcttgggatggtcagtcttgtaaatttcagccgttctaacaggcatggaatggtgtcttcttgtggtttaaactagcattttcctaatgactaatgatgaagatatttttgtgtgtttatttgtcttccatatatctttttttttttttttttggtgatgtgtctttttaaaaacttttgcccattgaaaatattaggttgtttattttcttactatggagttgttagagttctttatatatcct

SEQ ID NO: 76313 - DNA, 959 bp, Homo sapiens
cctgttcagctagagacctcaaagaaactgcttccaaaaaaagacatctttgccctggtgtttgtaaccaaaggaagtcagaggtggctggatggagagaaaaatgaaagcagcatcttgggagagatgccttccagagtacaggggatcaggtggccgagaagcagaggaggaaggaggggagatggaaggtcaggtcatttatcatccttccagggagcaggagctggggacccagggcaaggcgttgggtgaactttgtgctaagcgggtctgtcttattctgcattccccagaaagtggagcctgaggctaaggcttaggtgctattttagtagagtgtagtcccaggaagcgaggggtgaaggatcaagggaatgaagcaggaaggaggcaaaggcagctggttcaggcccggggcaaacccaccctcatccctggaggaaacattccaggccctcagacagtcatctgggtgagcttgggtggaacttttcaatccgtaggtggcaacccatggataaattgtgaagccaactcagggagtcttgactagcctttttggttcgtgtacaattttttgtagaaacatatgctttcatttctcctgggtaaatgcccaagaatataatggctggttaatactgtagaagtgtgtttaactttttttaaaagttattacgaggctttcaattcttgaacaaattcatcaatgcttgggatggtcagtcttgtaaatttcagccgttctaacaggcatggaatggtgtcttcttgtggtttaaactrgcattttcctaatgactaatgatgaagatatttttgtgtgtttatttgtcttccatatatctttttttttttttttttggtgatgtgtctttttaaaaacttttgcccattgaaaatattaggttgtttattttcttactatggagttgttagagttctttatatatcct

SEQ ID NO: 76314 - DNA, 604 bp, Homo sapiens
atgcctggctaattttttatatttttagtagagggggatttcaccatgttggccaggctggtctcgaactcctgacctcaagtgatccacccgccttggtctcccaaagtgctgggattacaggcgtgagccactgcacccagcctaaagaaaataattctaatgtcttaccattaagtgtgatgctttaaagaatgtgacagaatttaaaaagtttattgatttgtttcaaattctacattgaaactaacttttaaaatatataatagtggtacacatgtggggggtacattatgawgcttttttttttggtagggttttggtagatgtttcatattggtttaagaacgtttctatctattcttgtttgctgagaatttttaaaaatcacaattgggtattacattttattaaacaccctttttgcatctaataggatgagcatatggactttctcctttaatgtttcaatgtggtggatttctttagcagatattttagtgttcgactgtctttaaattcctgagttaaagtcttcatgttcataatgaagtgtttatgtccagattgcctgatttgctttgctaattttgatttgagattt

SEQ ID NO: 76315 - DNA, 1383 bp, Homo sapiens
gccttcagggtgtaagtggggctggggagcctcgggagaggaagggtggtgtttggggagtccaggccagttcttaaggcagacggctacgggccacgtccgctggcagagctcagcttcagataaacccagggatgaagaaaaactcaagccgctcaccctctgggtgcctcaaagtctttctatctgtaacataggctaatgaaattaccttccttgtagggacttaggagtaaatgagatgatctgggtatagcctttgcaacagtatctggaacttaggaattgctcaataggggccaggcgcggtggctcacgcctgtaatcccaacactttgggaggccaaggcgggcagatcacctgaggtcaggagttcgagaccagcctggccagcaatggtgaactcttgtctctactaaaaatacaaaaaattagccgggcgtggtggcgcacgcctgtaatcccagctactcaggaggctgaggcaggagaatcgcttgaacctgggagagggagatggcagtgagccgagatggcgccattgcactctggcctgggcgacgagcgaaactccgtctcaaaaaaaaagagaaagtgctcaatagatgctagccacaatttttgttaatattctatcagcgcttccctgagtgcagatatcaaacccaccacagagtgtacagtgatcctactacagaaatagccacttaccgtgggagggaggatgaattacttaacctctgtgctgctgttcttgagcataaataatgtacctattttgcctggcggggtggctcatgcctgtagtcccagcactttgggaggccaaggcaggaggatcgcttgaggtcaggagttcgaggccagcctgggcaccatagcaagatcccgactctacaaaaagtaaaaaaattagttgggcctagtagtgtgcacctgtagtcccagttactgaggaggctgaagtgggagggccacttgagctcctcagcctcctggttgaagctgcagtgagctgtgattgggccactgtactctagccagggcaacagagtgagatcctgtctctaaaaataaagtacctattttgtggggttacttgggggactgacagataacagagctcaagtgctctttaaggactttgaaccagattgctgcatccaaatcctggccccaccccacctagctgtgtgaccttgggcaaactacttaaagtcgctatgcctctgttcctcctcgtagcatgagggcatgtagtagttctcactactaggattataaggcattgctagagaatactttttataaaggagtatcatggcttcatcaaatagaacaaacacgtgtccatggttttatttaactcattaattcaygag

SEQ ID NO: 76316 - DNA, 687 bp, Homo sapiens
gctggtggtggctgtggaaagtaaggtggtgactacaacaaaaatggatttatctgctacccatgcaggtgtttgtcacacttgaactatcacatcccattattatattatgtgatataagacatacaagaagtggaacattattccttgctctggaaaatgttccaatctaattagacaagatttctgagaagaataataacaggaacatacaatcaaagtrccagtatcagtggtcagctgtggtggctcacacctgtaatcccagcactttgggagacaatggtgggaggatcacttgaagctaggagtttgagaccagtctgggcaacagagcaagaccccatctctacaaaaaaaattaacattaaaaattagccaggtgtgataacgcgcaactgtcatcctagctactttggaggctgaggcaggaggaccgcttaacccctggagtttgaggccacagtcagctatgattgaacccctgcactccagccgggtgacagagtaagaccttgtctcaaaaaaaaaaaggcaacatcaattgtgtgctataaataaagcaatgtcgtatagtggaaaagagtataggatgcggaataaaaagacatctttaagtcccaaagactgacacttaggtgctgtgtgctcttagtcaaatcactgaaactctagatataaagttta

SEQ ID NO: 76317 - DNA, 680 bp, Homo sapiens
atatgcctggcaatggtaattggaggtcttttagcaacatgacccatgatataaacattgttcttagttaaataaaatatcatcaattattgagacattataatttttgcattcttaaacaattttgttacacattataaatcattgatatatgacaaaagttttatgaggggacctgggcaagatggctgaataggaacagctcctatytgcagctcccagtgagatcaatgcagaaggtaggtgatttctacatttctaactgaggtacccagctcatctcattgggactggttagacagtgggtgcagcccacggaggacgagccaaagcagggtggggcatcaccttacctgggaagcacaaggggtcagggaactccctcccctagccaagggaagccatgagagactgtgtcttgaggaatggtgcattctggcccagatactacgcttttcccatggtcttcacaacttgcagaccaggagattcccttgggtacctacactaccagggccctgggtttcaagcacaaaattgggtggctgtttgggcagacaccgagctgctgcaggaggttttttttcacaccctggtggcacctggaatgccagcgagacagaatcattcactcccttggaaaggggcgtaagccagggagccaagtggtctagctcagt

SEQ ID NO: 76318 - DNA, 828 bp, Homo sapiens
agtcctgctctgtcgcccattctggagtgcagaggtgcagtctcggctcactgcaacctctgcctcccgggttcaagcgattctcttgcctcagcctcccgagtagctggaattacaggcatgcgccaccatgcctcactaatttttgtattttcagtagagacggagttttgccgtgttggccaggctggtgtggaatgcctgacctcaggtgatccacctgcctcagcctcccacagtgctgggattacaggcatgaaccaccgcacccagcccccaagattattttaagtaactccttgttttggattagaagtcttctaggctttggagacatttaatcattgtgtatggctagaatgatttggttatgcagaaataaatttgaataaaaaacatttcgtggtcaaaaataaaggtgttatactaatatacaactaagagtgggtttaaaatgtgggttataaagttagtgtttctttaacttagtgtttctttaaatttttaggtttgattttactttatgtagtagcctttttgttttcatagatggagcaaatccaaattgataaaataacattctaatttcagatttctttttcaatttttagttgttgacctcctgtactggagagacattaagaagactggagtggtgtttggtgccagcctattcctgctgctttcattgacagtattcagcattgtgagcgtaacagcctacattgccttggccctgctctctgtgaccatcagctttaggatatacaagggtgtgatccaagctatccaraaatcagatgaaggccacccattcaggtgagatgg

SEQ ID NO: 76319 - DNA, 503 bp, Homo sapiens
aaatcctcatattaaaagacattaagggaatggagaaaaatagtgaactttccattgcagcaaatgctaacaagtattttgatttgaaatctagtaattaaaggaaagtaaaaatagtcttatacatatttgaattatatgtcatgaaataaactatccacacacagcactgaaattatgcttagtacatcaattaattttgtcttatcatacacagatctatttaatatcactgtgaaaacttatttaagagtttaaatacaatatatcctatgtaatgtggctatattaatattttcagatagtttaggcagaactgtactgactctgtcattgtctgaatgctctctttcmaaatactggagaaaggttttactattaaccgtttatttattttatgtggtcctacaatatttctcaacttatttatttctttagtagtcatcattatatatataatattatcaaaatatgcttttcaagtactgtatttctgtgtttgg

SEQ ID NO: 76320 - DNA, 503 bp, Homo sapiens
aaatcctcatattaaaagacattaagggaatggagaaaaatagtgaactttccattgcagcaaatgctaacaagtattttgatttgaaatctagtaattaaaggaaagtaaaaatagtcttatacatatttgaattatatgtcatgaaataaactatccacacacagcactgaaattatgcttagtacatcaattaattttgtcttatcatacacagatctatttaatatcactgtgaaaacttatttaagagtttaaatacaatatatcctatgtaatgtggctatattaatattttcagatagtttaggcagaactgtactgactctgtcattgtctgaatgctctctttcaaaatactggagaaaggttttactattaaccgtttatttattttatgtggtcctacaatatttctcaacttatttatttctttagtagtcatcawtatatatataatattatcaaaatatgcttttcaagtactgtatttctgtgtttgg

SEQ ID NO: 76321 - DNA, 720 bp, Homo sapiens
tgcatctagattcaaaaaataggagtagatatttccaacttacagttatcttaatcattggactgtgcccagagtctattcatagtgctgttgcttccagcatatatttcactatggatcgaactccaattatgctttctataattttctttaagtgctaacaagcaatgatactcaaatatgtatattgagattctcattttcaactgctttctgaacatatgtgccaagatatcttctgaaattgaagatgctttaaaaacatttatgacattccccttccaattattatttttgttattattgaggcagagtctcactctgtcatccaggctaaagtgcagcggtgcgatctcggctcactgcaacttccacctcctgggctcaagcgattctcctgcctcagtctcctgggtagctgggattacagtcatgcgccaccaaacctgactaatttttgtatttttagtagagacggggttttgccatgttgaycaggctggtcttaaactcctgacctgaagtgatccgcctgcctctcttgcaatattttattcccgtcttactttcctattttttagtgatcattaaaaatccagaagcatatattaggtacagtgtggcaaaaaatagaaatgatcaaatcattttgagggcatcaatgaaagctttcagtgaagttggttgaactgcgccttgcaggaagaggaagaagaattc

SEQ ID NO: 76322 - DNA, 720 bp, Homo sapiens
tgcatctagattcaaaaaataggagtagatatttccaacttacagttatcttaatcattggactgtgcccagagtctattcatagtgctgttgcttccagcatatatttcactatggatcgaactccaattatgctttctataattttctttaagtgctaacaagcaatgatactcaaatatgtatattgagattctcattttcaactgctttctgaacatatgtgccaagatatcttctgaaattgaagatgctttaaaaacatttatgacattccccttccaattattatttttgttattattgaggcagagtctcactctgtcatccaggctaaagtgcagcggtgcgatctcggctcactgcaacttccacctcctgggctcaagcgattctcctgcctcagtctcctgggtagctgggattacagtcatgcgccaccaaacctgactaatttttgtatttttagtagagacggggttttgccatgttgaccaggctggtcttaaactcctgacctgaagtgatccgcctgcctctcttgcaatattttattcccgtcttactttcctattttttagtgatcattaaaaatccagaagcatatattaggtacagtgtggcaaaaaatagaaatgatcaaatcattttgagggcrtcaatgaaagctttcagtgaagttggttgaactgcgccttgcaggaagaggaagaagaattc

SEQ ID NO: 76323 - DNA, 554 bp, Homo sapiens
agctgcttctaaaagtaatagtactgatgaaaataataaaatcccacacatattgattgataatggaagtcttttttcttttcccctttagcagatattaaaatatatttgatacgtattttattatgtattcttttgtatcttccaaatataatacaaattataatttcaagattcatcaatctgctttgtacattggtagtcaactaatttttgtttctgtatactattccagtgactggaccatagtatatttattcaacatgtacttatacattatttggttaatggacatttagactktttctgggggtttttaattaaactcttatcaacagtgtgtattagtcagttttcatgctgctgataaagacatacccaagactgggaaatttacaaaagaaagaagtttattggacttacggttccacatggcagaggaggcttcacaatcatggcagaaggcaaggagcagccagtcatgtcttatgtggatagcagcaggcaaaaagagagcttgtgcaggaaaactcccccttacagtaaccatcgga

SEQ ID NO: 76324 - DNA, 554 bp, Homo sapiens
agctgcttctaaaagtaatagtactgatgaaaataataaaatcccacacatattgattgataatggaagtcttttttcttttcccctttagcagatattaaaatatatttgatacgtattttattatgtattcttttgtatcttccaaatataatacaaattataatttcaagattcatcaatctgctttgtacattggtagtcaactaatttttgtttctgtatactattccagtgactggaccatagtatatttattcaacatgtacttatacattatttggttaatggacatttagactttttctgggggtttttaattaaactcttatyaacagtgtgtattagtcagttttcatgctgctgataaagacatacccaagactgggaaatttacaaaagaaagaagtttattggacttacggttccacatggcagaggaggcttcacaatcatggcagaaggcaaggagcagccagtcatgtcttatgtggatagcagcaggcaaaaagagagcttgtgcaggaaaactcccccttacagtaaccatcgga

SEQ ID NO: 76325 - DNA, 554 bp, Homo sapiens
agctgcttctaaaagtaatagtactgatgaaaataataaaatcccacacatattgattgataatggaagtcttttttcttttcccctttagcagatattaaaatatatttgatacgtattttattatgtattcttttgtatcttccaaatataatacaaattataatttcaagattcatcaatctgctttgtacattggtagtcaactaatttttgtttctgtatactattccagtgactggaccatagtatatttattcaacatgtacttatacattatttggttaatggacatttagactttttctgggggtttttaattaaactcttatcaacagtgtgtattagtcagttttcatgctgctgataaagacatacccaagactgggaaatttacaaaagaaagaagtttattggacttacrgttccacatggcagaggaggcttcacaatcatggcagaaggcaaggagcagccagtcatgtcttatgtggatagcagcaggcaaaaagagagcttgtgcaggaaaactcccccttacagtaaccatcgga

SEQ ID NO: 76326 - DNA, 554 bp, Homo sapiens
agctgcttctaaaagtaatagtactgatgaaaataataaaatcccacacatattgattgataatggaagtcttttttcttttcccctttagcagatattaaaatatatttgatacgtattttattatgtattcttttgtatcttccaaatataatacaaattataatttcaagattcatcaatctgctttgtacattggtagtcaactaatttttgtttctgtatactattccagtgactggaccatagtatatttattcaacatgtacttatacattatttggttaatggacatttagactttttctgggggtttttaattaaactcttatcaacagtgtgtattagtcagttttcatgctgctgataaagacatacccaagactgggaaatttacaaaagaaagaagtttattggacttacggttccacatggcagaggaggcttcacaatcatggcagaaggcaaggagcagccagtcatgtcttaygtggatagcagcaggcaaaaagagagcttgtgcaggaaaactcccccttacagtaaccatcgga

SEQ ID NO: 76327 - DNA, 2373 bp, Homo sapiens
tgcatctcttcaatctggacgtttatctgtaacctttccaatgttctttataataaacgggtaaacataaatatttctctgacttctgtgatccactctagcaaattaatcaaacatgaggaaggggtcataaaaactctgattcacagctgagtggttagaactacaggtgataacctattacttgcatttggcatctgaaacggcagtcctgtgggactgagccctcaaactgctatctccaggtagatgagtcagaattgaatggaatcaaaggacacccagcattcatgtttgttgaagaagtgattgctttggtgtgtggttttgtgttgaatggtgtgtaacaggaaaaaatccattttttgtgtgtattacagaataggaaaggtagtatacctaaaaaaacagcctaagttatttaaaatgaatttctctaacacctagaaatatttcctttccctgctaatgactgaatttcattgtcattaggtaattaatgagttttaccccaaaccaaaaagcttttcttacctgaattagtcatcaatgacaaaggtgtttattttaatacaaaaatacaacttatatcattgaattaaacagttcgctgatgtgtttggggcagtaaatggaatgtgaaaccctgcaaagtcaaaggaactcaggaaaatgcaaaggcttgataattgcccagaggctaaagttgaaactaaggcaatggtcatttggtttttacatttaaaaaaatgattcacatttctcaaacacactctctgctctccgtaaagcactttttagcattttctatccacctgtccttatatccatctatgacgttctaagtatgaatatgaatttcctggctttaaagagcaagttttgatgtcaaagctattttctacaaacacattcaaacatagttcctgtgtcatgttagcactacgtgaatatatgcaatttcttcagagagagtgtaacataaatatgatattctcattccaaaagtgaattcgtgagaatgttcctaaactatttgagtgagagataaatccctaaataaatattttttaaatcaagactatatgtcttaatacgcaaaggttcggtattacctacagctttcagaaaatagggtgaaattttcttacagtatgaagacagttttataacctgggatccagaaataccaaaatcctgtacctgaccatccccatgttctctgacagggctctggaggaaaatgcatgagcaagaaacaatgaatgaagaaaaccaaggtaacactttattaacttctggattggaggcacaaattttggtgcagtatatgttagtaacccagggcatgttatatagaacatccctttttaagctagctagtaactggtggcatctgtcaatatcagagagagggtaccagagagaaagatagtacataatgagaatatatttgttcgcgatgtctgatactgacctctgctagaaataattctcctgaaatgacccaatccttggttgctgtcacatgggaaaagagagagcaaagggagtgagaggaaaagctcaagctcttaccacttgcattggttctacccatcagtgagaaggcctagttggtgtcctcgaatctgaccaaccccagacagcacattcatgattggactgggagggaataagaaagaattgcagaacattggatttctttcttgctttcccttttcttttcaagacacaggatcttactctgttgttcaggctggggtacagtggtgtgatcatagctgactgcagacttgaatttctgagtccgagtgatcatcctgcctcagccttcctagaagctgggactgcatgtacacatcactgtgccctgctaattgtttgttttatttagagatgtagtcttgctatgttgccccggctgggcctgaattcctgatctcaagtgttcttcccaccttgacctctcaaagtgctgggattacaggcctgagccacaatgcctagccttggattcctttcttgaagacaaaaatgataaaacctgcaaaagatttacacttgcrctcagtttgtaattccatagcattaagtttctttgttgcttttttatgaatttaaggatgataattagcagaagaaaaacttaaaagataccaaacaatacaaattgcattctgtcctcatgctacatcaacaataaaaattgaggcaattatgctgatttaattttttttaagtacatagttaacataatctacatcagtgacccttgcctttttggggtcatgatttgcttgagaatcttatgaaagatatagagttttatcaaagaaaatatgagattttactacaacccaacaaacgcac

SEQ ID NO: 76328 - DNA, 2373 bp, Homo sapiens
tgcatctcttcaatctggacgtttatctgtaacctttccaatgttctttataataaacgggtaaacataaatatttctctgacttctgtgatccactctagcaaattaatcaaacatgaggaaggggtcataaaaactctgattcacagctgagtggttagaactacaggtgataacctattacttgcatttggcatctgaaacggcagtcctgtgggactgagccctcaaactgctatctccaggtagatgagtcagaattgaatggaatcaaaggacacccagcattcatgtttgttgaagaagtgattgctttggtgtgtggttttgtgttgaatggtgtgtaacaggaaaaaatccattttttgtgtgtattacagaataggaaaggtagtatacctaaaaaaacagcctaagttatttaaaatgaatttctctaacacctagaaatatttcctttccctgctaatgactgaatttcattgtcattaggtaattaatgagttttaccccaaaccaaaaagcttttcttacctgaattagtcatcaatgacaaaggtgtttattttaatacaaaaatacaacttatatcattgaattaaacagttcgctgatgtgtttggggcagtaaatggaatgtgaaaccctgcaaagtcaaaggaactcaggaaaatgcaaaggcttgataattgcccagaggctaaagttgaaactaaggcaatggtcatttggtttttacatttaaaaaaatgattcacatttctcaaacacactctctgctctccgtaaagcactttttagcattttctatccacctgtccttatatccatctatgacgttctaagtatgaatatgaatttcctggctttaaagagcaagttttgatgtcaaagctattttctacaaacacattcaaacatagttcctgtgtcatgttagcactacgtgaatatatgcaatttcttcagagagagtgtaacataaatatgatattctcattccaaaagtgaattcgtgagaatgttcctaaactatttgagtgagagataaatccctaaataaatattttttaaatcaagactatatgtcttaatacgcaaaggttcggtattacctacagctttcagaaaatagggtgaaattttcttacagtatgaagacagttttataacctgggatccagaaataccaaaatcctgtacctgaccatccccatgttctctgacagggctctggaggaaaatgcatgagcaagaaacaatgaatgaagaaaaccaaggtaacactttattaacttctggattggaggcacaaattttggtgcagtatatgttagtaacccagggcatgttatatagaacatccctttttragctagctagtaactggtggcatctgtcaatatcagagagagggtaccagagagaaagatagtacataatgagaatatatttgttcgcgatgtctgatactgacctctgctagaaataattctcctgaaatgacccaatccttggttgctgtcacatgggaaaagagagagcaaagggagtgagaggaaaagctcaagctcttaccacttgcattggttctacccatcagtgagaaggcctagttggtgtcctcgaatctgaccaaccccagacagcacattcatgattggactgggagggaataagaaagaattgcagaacattggatttctttcttgctttcccttttcttttcaagacacaggatcttactctgttgttcaggctggggtacagtggtgtgatcatagctgactgcagacttgaatttctgagtccgagtgatcatcctgcctcagccttcctagaagctgggactgcatgtacacatcactgtgccctgctaattgtttgttttatttagagatgtagtcttgctatgttgccccggctgggcctgaattcctgatctcaagtgttcttcccaccttgacctctcaaagtgctgggattacaggcctgagccacaatgcctagccttggattcctttcttgaagacaaaaatgataaaacctgcaaaagatttacacttgcactcagtttgtaattccatagcattaagtttctttgttgcttttttatgaatttaaggatgataattagcagaagaaaaacttaaaagataccaaacaatacaaattgcattctgtcctcatgctacatcaacaataaaaattgaggcaattatgctgatttaattttttttaagtacatagttaacataatctacatcagtgacccttgcctttttggggtcatgatttgcttgagaatcttatgaaagatatagagttttatcaaagaaaatatgagattttactacaacccaacaaacgcac

SEQ ID NO: 76329 - DNA, 2373 bp, Homo sapiens
tgcatctcttcaatctggacgtttatctgtaacctttccaatgttctttataataaacgggtaaacataaatatttctctgacttctgtgatccactctagcaaattaatcaaacatgaggaaggggtcataaaaactctgattcacagctgagtggttagaactacaggtgataacctattacttgcatttggcatctgaaacggcagtcctgtgggactgagccctcaaactgctatctccaggtagatgagtcagaattgaatggaatcaaaggacacccagcattcatgtttgttgaagaagtgattgctttggtgtgtggttttgtgttgaatggtgtgtaacaggaaaaaatccattttttgtgtgtattacagaataggaaaggtagtatacctaaaaaaacagcctaagttatttaaaatgaatttctctaacacctagaaatatttcctttccctgctaatgactgaatttcattgtcattaggtaattaatgagttttaccccaaaccaaaaagcttttcttacctgaattagtcatcaatgacaaaggtgtttattttaatacaaaaatacaacttatatcattgaattaaacagttcgctgatgtgtttggggcagtaaatggaatgtgaaaccctgcaaagtcaaaggaactcaggaaaatgcaaaggcttgataattgcccagaggctaaagttgaaactaaggcaatggtcatttggtttttacatttaaaaaaatgattcacatttctcaaacacactctctgctctccgtaaagcactttttagcattttctatccacctgtccttatatccatctatgacgttctaagtatgaatatgaatttcctggctttaaagagcaagttttgatgtcaaagctattttctacaaacacattcaaacatagttcctgtgtcatgttagcactacgtgaatatatgcaatttcttcagagagagtgtaacataaatatgatattctcattccaaaagtgaattcgtgagaatgttcctaaactatttgagtgagagataaatccctaaataaatattttttaaatcaagactatatgtcttaatacgcaaaggttcggtattacctacagctttcagaaaatagggtgaaattttcttacagtatgaagacagttttataacctgggatccagaaataccaaaatcctgtacctgaccatccccatgttctctgacagggctctggaggaaaatgcatgagcaagaaacaatgaatgaagaaaaccaaggtaacactttattaacttctggattggaggcacaaattttggtgcagtatatgttagtaacccagggcatgttatatagaacatccctttttaagctagctagtaactggtgrcatctgtcaatatcagagagagggtaccagagagaaagatagtacataatgagaatatatttgttcgcgatgtctgatactgacctctgctagaaataattctcctgaaatgacccaatccttggttgctgtcacatgggaaaagagagagcaaagggagtgagaggaaaagctcaagctcttaccacttgcattggttctacccatcagtgagaaggcctagttggtgtcctcgaatctgaccaaccccagacagcacattcatgattggactgggagggaataagaaagaattgcagaacattggatttctttcttgctttcccttttcttttcaagacacaggatcttactctgttgttcaggctggggtacagtggtgtgatcatagctgactgcagacttgaatttctgagtccgagtgatcatcctgcctcagccttcctagaagctgggactgcatgtacacatcactgtgccctgctaattgtttgttttatttagagatgtagtcttgctatgttgccccggctgggcctgaattcctgatctcaagtgttcttcccaccttgacctctcaaagtgctgggattacaggcctgagccacaatgcctagccttggattcctttcttgaagacaaaaatgataaaacctgcaaaagatttacacttgcactcagtttgtaattccatagcattaagtttctttgttgcttttttatgaatttaaggatgataattagcagaagaaaaacttaaaagataccaaacaatacaaattgcattctgtcctcatgctacatcaacaataaaaattgaggcaattatgctgatttaattttttttaagtacatagttaacataatctacatcagtgacccttgcctttttggggtcatgatttgcttgagaatcttatgaaagatatagagttttatcaaagaaaatatgagattttactacaacccaacaaacgcac

SEQ ID NO: 76330 - DNA, 2373 bp, Homo sapiens
tgcatctcttcaatctggacgtttatctgtaacctttccaatgttctttataataaacgggtaaacataaatatttctctgacttctgtgatccactctagcaaattaatcaaacatgaggaaggggtcataaaaactctgattcacagctgagtggttagaactacaggtgataacctattacttgcatttggcatctgaaacggcagtcctgtgggactgagccctcaaactgctatctccaggtagatgagtcagaattgaatggaatcaaaggacacccagcattcatgtttgttgaagaagtgattgctttggtgtgtggttttgtgttgaatggtgtgtaacaggaaaaaatccattttttgtgtgtattacagaataggaaaggtagtatacctaaaaaaacagcctaagttatttaaaatgaatttctctaacacctagaaatatttcctttccctgctaatgactgaatttcattgtcattaggtaattaatgagttttaccccaaaccaaaaagcttttcttacctgaattagtcatcaatgacaaaggtgtttattttaatacaaaaatacaacttatatcattgaattaaacagttcgctgatgtgtttggggcagtaaatggaatgtgaaaccctgcaaagtcaaaggaactcaggaaaatgcaaaggcttgataattgcccagaggctaaagttgaaactaaggcaatggtcatttggtttttacatttaaaaaaatgattcacatttctcaaacacactctctgctctccgtaaagcactttttagcattttctatccacctgtccttatatccatctatgacgttctaagtatgaatatgaatttcctggctttaaagagcaagttttgatgtcaaagctattttctacaaacacattcaaacatagttcctgtgtcatgttagcactacgtgaatatatgcaatttcttcagagagagtgtaacataaatatgatattctcattccaaaagtgaattcgtgagaatgttcctaaactatttgagtgagagataaatccctaaataaatattttttaaatcaagactatatgtcttaatacgcaaaggttcggtattacctacagctttcagaaaatagggtgaaattttcttacagtatgaagacagttttataacctgggatccagaaataccaaaatcctgtacctgaccatccccatgttctctgacagggctctggaggaaaatgcatgagcaagaaacaatgaatgaagaaaaccaaggtaacactttattaacttctggattggaggcacaaattttggtgcagtatatgttagtaacccagggcatgttatatagaacatccctttttaagctagctagtaactggtggcatctgtcaatatcagagagagggtaccagagagaaagatagtacataatgagaatatatttgttcgcgatgtctgatactgacctctgctagaaataattctcctgaaatgacccaatccttggttgctgtcacatgggaaaagagagagcaaagggagtgagaggaaaagctcaagctcttaccacttgcattggttctacccatcagtgagaaggcctagttggtgtcctcgaatctgaccaaccccagacagcacattcatgattggactgggagggaataagaaagaattgcagaacattggatttctttcttgctttcccttttcttttcaagacacaggatcttactctgttgttcaggctggggtrcagtggtgtgatcatagctgactgcagacttgaatttctgagtccgagtgatcatcctgcctcagccttcctagaagctgggactgcatgtacacatcactgtgccctgctaattgtttgttttatttagagatgtagtcttgctatgttgccccggctgggcctgaattcctgatctcaagtgttcttcccaccttgacctctcaaagtgctgggattacaggcctgagccacaatgcctagccttggattcctttcttgaagacaaaaatgataaaacctgcaaaagatttacacttgcactcagtttgtaattccatagcattaagtttctttgttgcttttttatgaatttaaggatgataattagcagaagaaaaacttaaaagataccaaacaatacaaattgcattctgtcctcatgctacatcaacaataaaaattgaggcaattatgctgatttaattttttttaagtacatagttaacataatctacatcagtgacccttgcctttttggggtcatgatttgcttgagaatcttatgaaagatatagagttttatcaaagaaaatatgagattttactacaacccaacaaacgcac

SEQ ID NO: 76331 - DNA, 2373 bp, Homo sapiens
tgcatctcttcaatctggacgtttatctgtaacctttccaatgttctttataataaacgggtaaacataaatatttctctgacttctgtgatccactctagcaaattaatcaaacatgaggaaggggtcataaaaactctgattcacagctgagtggttagaactacaggtgataacctattacttgcatttggcatctgaaacggcagtcctgtgggactgagccctcaaactgctatctccaggtagatgagtcagaattgaatggaatcaaaggacacccagcattcatgtttgttgaagaagtgattgctttggtgtgtggttttgtgttgaatggtgtgtaacaggaaaaaatccattttttgtgtgtattacagaataggaaaggtagtatacctaaaaaaacagcctaagttatttaaaatgaatttctctaacacctagaaatatttcctttccctgctaatgactgaatttcattgtcattaggtaattaatgagttttaccccaaaccaaaaagcttttcttacctgaattagtcatcaatgacaaaggtgtttattttaatacaaaaatacaacttatatcattgaattaaacagttcgctgatgtgtttggggcagtaaatggaatgtgaaaccctgcaaagtcaaaggaactcaggaaaatgcaaaggcttgataattgcccagaggctaaagttgaaactaaggcaatggtcatttggtttttacatttaaaaaaatgattcacatttctcaaacacactctctgctctccgtaaagcactttttagcattttctatccacctgtccttatatccatctatgacgttctaagtatgaatatgaatttcctggctttaaagagcaagttttgatgtcaaagctattttctacaaacacattcaaacatagttcctgtgtcatgttagcactacgtgaatatatgcaatttcttcagagagagtgtaacataaatatgatattctcattccaaaagtgaattcgtgagaatgttcctaaactatttgagtgagagataaatccctaaataaatattttttaaatcaagactatatgtcttaatacgcaaaggttcggtattacctacagctttcagaaaatagggtgaaattttcttacagtatgaagacagttttataacctgggatccagaaataccaaaatcctgtacctgaccatccccatgttctctgacagggctctggaggaaaatgcatgagcaagaaacaatgaatgaagaaaaccaaggtaacactttattaacttctggattggaggcacaaattttggtgcagtatatgttagtaacccagggcatgttatatagaacatccctttttaagctagctagtaactggtggcatctgtcaatatcagagagagggtaccagagagaaagatagtacataatgagaatatatttgttcgcgatgtctgatactgacctctgctagaaataattctcctgaaatgacccaatccttggttgctgtcacatgggaaaagagagagcaaagggagtgagaggaaaagctcaagctcttaccacttgcattggttctacccatcagtgagaaggcctagttggtgtcctcgaatctgaccaaccccagacagcacattcatgattggactgggagggaataagaaagaattgcagaacattggatttctttcttgctttcccttttcttttcaagacacaggatcttactctgttgttcaggctggggtacagtggtgtgatcatagctgactgcagacttgaatttctgagtccgagtgatcatcctgcctcagccttcctagargctgggactgcatgtacacatcactgtgccctgctaattgtttgttttatttagagatgtagtcttgctatgttgccccggctgggcctgaattcctgatctcaagtgttcttcccaccttgacctctcaaagtgctgggattacaggcctgagccacaatgcctagccttggattcctttcttgaagacaaaaatgataaaacctgcaaaagatttacacttgcactcagtttgtaattccatagcattaagtttctttgttgcttttttatgaatttaaggatgataattagcagaagaaaaacttaaaagataccaaacaatacaaattgcattctgtcctcatgctacatcaacaataaaaattgaggcaattatgctgatttaattttttttaagtacatagttaacataatctacatcagtgacccttgcctttttggggtcatgatttgcttgagaatcttatgaaagatatagagttttatcaaagaaaatatgagattttactacaacccaacaaacgcac

SEQ ID NO: 76332 - DNA, 662 bp, Homo sapiens
ttcttccagaaggaggtgtggcyggtcatggagtttataccagctgccctgtcctggtggtaccaaagccatccccaagctcttgcacccatagcacacactccttgctaaaagcctaggaggactgtgatgggtcaaactgtgtcccccaaatccatctgctgaagccctaactcccagcaccttagaatgtgactatttggagatagggtctttaaagaggtgagtaagggctgggggcggtagctcatacctgtaaatcctaggacttagggaggccgaggcaggtacatcacctgaggtcaagagtttgagaccagcctggccaacatggtgaaacctcgtctctactgaaaatataaaaattagccaggcatggtggcacctgcctataatcccagctatttgggaggctgaggcaagagaatcatttgaacctgggaggtggaggttgcagtgagctgagatcacaccattgccctccagactggacaacagagcaaaaatactgtcaaaaaaaaaaaaaaagaggtgagtaattaaaatcagattactagggtgggccctagtctgacaggtgtccttacgaggaggggagattagacatgcacagaaggccgaccacatgaggacccagggagaagatgtccatctgcaagtca

SEQ ID NO: 76333 - DNA, 662 bp, Homo sapiens
ttcttccagaaggaggtgtggccggtcatggagtttataccagctgccctgtcctggtggtaccaaagccatccccaagctcttgcacccatagcacacactccttgctaaaagcctaggaggactgtgatgggtcaaactgtgtcccccaaatccatctgctgaagccctaactcccagcaccttagaatgtgactatttggagatagggtctttaaagaggtgagtaagggctgggggcggtagctcatacctgtaaatcctaggacttagggaggccgaggcaggtacatcacctgaggtcaagagtttgagaccagcctggccaacatggtgaaacctcgtctctactgaaaatataaaaattagccaggcatggtggcacctgcctataatcccagctatttgggaggctgaggcaagagaatcatttgaacctgggaggtggaggttgcagtgagctgagatcacaccattgccctccagactggacaacagagcaaaaatactgtcaaaaaaaaaaaaaaagargtgagtaattaaaatcagattactagggtgggccctagtctgacaggtgtccttacgaggaggggagattagacatgcacagaaggccgaccacatgaggacccagggagaagatgtccatctgcaagtca

SEQ ID NO: 76334 - DNA, 662 bp, Homo sapiens
ttcttccagaaggaggtgtggccggtcatggagtttataccagctgccctgtcctggtggtaccaaagccatccccaagctcttgcacccatagcacacactccttgctaaaagcctaggaggactgtgatgggtcaaactgtgtcccccaaatccatctgctgaagccctaactcccagcaccttagaatgtgactatttggagatagggtctttaaagaggtgagtaagggctgggggcggtagctcatacctgtaaatcctaggacttagggaggccgaggcaggtacatcacctgaggtcaagagtttgagaccagcctggccaacatggtgaaacctcgtctctactgaaaatataaaaattagccaggcatggtggcacctgcctataatcccagctatttgggaggctgaggcaagagaatcatttgaacctgggaggtggaggttgcagtgagctgagatcacaccattgccctccagactggacaacagagcaaaaatactgtcaaaaaaaaaaaaaaagaggwgagtaattaaaatcagattactagggtgggccctagtctgacaggtgtccttacgaggaggggagattagacatgcacagaaggccgaccacatgaggacccagggagaagatgtccatctgcaagtca

SEQ ID NO: 76335 - DNA, 696 bp, Homo sapiens
gggccattgtcatcttggcctttccttacactgtgtatctgttaagagtgcaagaaacaggtacgaactgtctcccgggctccccaatttcccacccatccctggcaccgcaggaaatctctgtttctaccggagcaggaacaaaacagttggtcgagagtgtgcagtttttagctgtggttgggttggggtgggggtgctttagcaggtgctggcacctgccccggccccgccatggggggtgccccgggagtgaggctgcccaaaagtggtgtgtgcttacaatcctgtgaccataaagttcagaggatgggaaagatagagatgaatgctggagaaagagagaaaaggaaatggccgcaaccagacagtgtgaaggggatggggtaggaaaaggcagaacaagaggctggggggtcaggttgaaaggtccygggaaagcaataaaagacgtcgcagccccagagtatgtgtgaaacgcaagaaggaagcagaccccacgtgcaggccgtgaggctcagcgctcagtcttagccgcagccgtggtgcaccttaactttcactctgctctgcaccctttctccctccagcccccagcgtgcacccctaaaagaatcgagctgcaaattcctgacagacccctcacaagctgctcagatgctcgggggtagggttaactagagaattggggggaag

SEQ ID NO: 76336 - DNA, 1779 bp, Homo sapiens
agtatttttctttgaaaaacacctattctttgaaaaaattttttattttttgagacaaagtcttgctctgtcgcccaggctggagtgcagtggcatgatcttggctcactgcagaggtctcagctcactgcagccttaacttccctgggtcagatgatcgtcccaagttagccttcctcatagctgggaccacaggcatgcaccaccacacccggctcatttttgtattttttatagagatggggttttgccctgttgcccaagctggtctcaaacccctgggctcaagtaatctgcccgtctcagcctcccagagtgctgggattacgggtgtgagccatcatgtccagcccaaaaatgtttttaaggctgcatatgaaatgtattattgttttaacttccattgtcaatatatgagtggtttttttactatgcccttcctattgctaaatgctatcatttttatagctttattgacrtataattgatgtacaataaactccacgtatttaaactgttattgaatgagttttgacatgtgcttgcactagtgaaactgtcaccacaacaatcaagataaggaatacttctattccttccaaaagttccttactgcctctttgtaatatcccttattctttcttccacccccatccacaggcaagtattgatcagctttttatcactagacattggcaggaattttctaaaattttatagtaatggaatcatatcgtatgcacttttgggggcgggttctggcttctttaactcagcatagttattttgaggttcatccatgtcgctgaatgtatcaatagttaactcctttttattgctaaatgatattccattttgtggctgtaccacagtttatccattcacatgttgatggatatttaggttgtttccagtttggggatattataaataaagctatgaatatttgtatatacaagtatttatgtggacataagcttttatttttcttatggaaatatctagtagaatggccaggtcataggtcatatgataaatgcatgtttgtcttttttttttttttttttgagttcttttaaactttggggaaaaatgggatagaattcacatagcataaaattcactcttttgagcatacaattcagtggcattaatacattcacagtgtgcagttatcacctctgtcttatcccaaaacattttcatcattccacaaggaaccctgtacccattaaatactccctgtctctctggtaccccatccccagtccctgaaaaccacgaatctgcttcttctctatggatttgcctgtcttgaacatttcgtgtaaatggaattatacaatatgtgagcttctgtgtctggctttctcccttagcctaatgtttttgaggttcatgcgcattgtagcatgtataagcactttgcctttgatggctaagaagtatggtatgtatatatcacattgtatctgtatatccatttatgggcatttgggctgtttctaccttttggctgttgcaaatagtaatgctgtgaatgtttttgcaagtatttgagcatttgtattcaattcttttgggtatatacctaaaagtaggattcctgggttagatggtgtttctatgtttaacattttaaagaaccaccatactgttttccgcagtggctgacgttttacattcccatcagcaatatgcaaagttccactttccccacattcttctgaacacttattttcttttttttaaaaaaaattatagccattctagtaggtg

SEQ ID NO: 76337 - DNA, 1779 bp, Homo sapiens
agtatttttctttgaaaaacacctattctttgaaaaaattttttattttttgagacaaagtcttgctctgtcgcccaggctggagtgcagtggcatgatcttggctcactgcagaggtctcagctcactgcagccttaacttccctgggtcagatgatcgtcccaagttagccttcctcatagctgggaccacaggcatgcaccaccacacccggctcatttttgtattttttatagagatggggttttgccctgttgcccaagctggtctcaaacccctgggctcaagtaatctgcccgtctcagcctcccagagtgctgggattacgggtgtgagccatcatgtccagcccaaaaatgtttttaaggctgcatatgaaatgtattattgttttaacttccattgtcaatatatgagtggtttttttactatgcccttcctattgctaaatgctatcatttttatagctttattgacatataattgatgtacaataaactccacgtatttaaactgttattgaatgagttttgacatgtgcttgcactagtgaaactgtcaccacaacaatcaagataaggaatacttctattccttccaaaagttccttactgcctctttgtaatatcccttattctttcttccacccccatccacaggcaagtattgatcrgctttttatcactagacattggcaggaattttctaaaattttatagtaatggaatcatatcgtatgcacttttgggggcgggttctggcttctttaactcagcatagttattttgaggttcatccatgtcgctgaatgtatcaatagttaactcctttttattgctaaatgatattccattttgtggctgtaccacagtttatccattcacatgttgatggatatttaggttgtttccagtttggggatattataaataaagctatgaatatttgtatatacaagtatttatgtggacataagcttttatttttcttatggaaatatctagtagaatggccaggtcataggtcatatgataaatgcatgtttgtcttttttttttttttttttgagttcttttaaactttggggaaaaatgggatagaattcacatagcataaaattcactcttttgagcatacaattcagtggcattaatacattcacagtgtgcagttatcacctctgtcttatcccaaaacattttcatcattccacaaggaaccctgtacccattaaatactccctgtctctctggtaccccatccccagtccctgaaaaccacgaatctgcttcttctctatggatttgcctgtcttgaacatttcgtgtaaatggaattatacaatatgtgagcttctgtgtctggctttctcccttagcctaatgtttttgaggttcatgcgcattgtagcatgtataagcactttgcctttgatggctaagaagtatggtatgtatatatcacattgtatctgtatatccatttatgggcatttgggctgtttctaccttttggctgttgcaaatagtaatgctgtgaatgtttttgcaagtatttgagcatttgtattcaattcttttgggtatatacctaaaagtaggattcctgggttagatggtgtttctatgtttaacattttaaagaaccaccatactgttttccgcagtggctgacgttttacattcccatcagcaatatgcaaagttccactttccccacattcttctgaacacttattttcttttttttaaaaaaaattatagccattctagtaggtg

SEQ ID NO: 76338 - DNA, 566 bp, Homo sapiens
aaagaaggacaaaaacaattttatttacctgtttttgtttagggttcatcggttatttttttttttaaaggggaggaaaggtttcagctgtctccgaggaataagactacaaacaacggtcaatgcagtagcaatgaacatccttaccactcagattgttatttctaaatattatttcccactaaaatgaaatatggctccttagagaaatagctgactctatgtctggggcaggaaacaaatgatgtaagcctgaaacacttttttcttatcagaaagcaaggcagctatcaaagacaatggagttattgcctacaaatatctataaaaaaaattaccagagaaaccaatgagggtcctgtcagagggacacagaagctgacccagaggggcttactctgaccaaagagggggaaagatactgtaatagatttaaacaaatccaacccatgggctcatatattacctttgtaggatgctagggaaccaatatatagatcattttataaggaggtgytaggaagctcttctttattttttgagacaagttttgctctttttttttt

SEQ ID NO: 76339 - DNA, 1093 bp, Homo sapiens
agataaagtcaaacttttcttgagttagacatgcttggtaatttatacacaagcaattgggtctagacgccagtgatgaaaaatgtgattctcctaatgttatgtttagtaagatgttttcttggratgagagggtataaagattaatgtctgatcctgaaagaattgggatcctacttacttgacccagcatgtgatatgtctgaacccatgggttttaaaaaatacattcatgacatattatcaatgttaaatctagtatattaacagagaaatctaaaagttgtaattagtgagattttattatggccacttactccattttttctttaaagctgtgtttcgtaatattattttttaaattaatgacctctgatgaaaactatagactaaatcttcagaaaaattcagagatgcacactctcatataattttacacacaacttcaggagttttatatccactagaattcttccacagatcctagactgagaatatctgttcaagataaatctatccaattcatgtgtcttaaatagaaatgatttatgttacttgtcatgtctctcgttatgatattttatatccagactctaattatcaaaagggaggaataaaggaaatgctcaagagatccatcttattcaaacgaaacctctttttcccctccttctcttcaggctattatctctagaccagagctctattgttcatcctgtactgtccattggctgccaaccagacaagggatgctaatctaggccattgtacaatttcatccctctctgggctgttatgtaattaaaataacttcagtgtgctctcttgaacatttttttctacaggcaattgtaaaaatatagaagttaaaaagcaaatgaaggaagaaaaatataatttgttttctttacttttctattgcaaaagacattacttattgtggacttgttatttatttaatttcaaaattggaatatagtttcttttgtattttgtactgcagaaaaatatctattgatttaaagtggtcattttccaagaatgcttcaaggcagttgaattttaaacatttctaaagcaactagttttcata

SEQ ID NO: 76340 - DNA, 1235 bp, Homo sapiens
ttgttatcataaatccatcccagctccatttcaagactctcagggtttcagcagaacatctaacacgaaatgaatatatacattcaaggagctggcatgttgtatcacaagggagaagggaaaacacccattgttacagcctcagagctgattgaaaaagaatgcaataaagaatatcagaggttctcagaccagaatcatgattctcattattatcccacaggaggagaaaagggacagtcacccagaattagagagggctctagaagttttgaagtgttgacacctaagcgtccacaaaactgctcggaatagttttattttagaagtatcctgcccagcctgagtctgagaaaccagcaatgcaaaggctctgttaattattatttcacttatctgagacttggtttctttatctrtgaaataaggctaagcaaggctcccatatggtattattgtgaggatcaaatgtgataatgtaggttatcactggcagctatatgtggtaatgagcactgcaccaccctgtggggtcaccttgagtagattcaggtctgcagagggtaaacagactccctgatttaaaggttctccaaagccctgcaaccctgaggtctccacctgacctacctatccaactaatagtctaccattagaatcaaggcactgcagggagacaaataaagggagggaggacattgctttcagaaatcccagtgattacgcatctaggcagagagccttcatttaggaactccggaatctggattcaaatctttacgttgtcactgctccaaaagcgctttttcaactctaaagtgcagattccaattcagcaggaccaaatgcgagctgagattctgcatttctcatagcactcagggatggcattgctactcatccgtggaccacattttgagtggtaagatcctgtaagaccatggactctcaaatcattgaaatgactgggcctcagttccttcacctatgaagtaaggtgataaatgaaatgtgatttattgtcttctctggggatcaaatatgtcattactgtgtgatagtactttatccaaatttaaaacagctttttacaaaattcatttttcttgagagatcagatagcaggctcccattagcttgtcactggggatcttgttgacttaagtcttacacagtctgtctcccttgggaaaatagtgagtggggaagtttctgtgagagacaggggtgatgca

SEQ ID NO: 76341 - DNA, 1262 bp, Homo sapiens
tctgtgcacattgtgtggtttaggagagatttataaagacagtgccccccaaaaacaatgagtgagacgaaggactatagttwttttttaaaaaattattaacctggatgcaggaatattgtgctactttaaattttgttttgttttattttattaaaagagagaaagggccaggagcggtggctcatgcttgtaatcccagcacttttggaggctgaggcaggtggatcatgaggtcaggagaccgagaccatcctggctaacatggcgaaaccctgtctctactaaaagtacaaaaaaaaaattagacggatgtggtggcaggcacctgtagacccagctactcgggaggctgaggcaggagaatggcgtgaacctgggaggtggagcttgcagtgagccgagatcgcaccactgcactccagcctgggcgacagagcaagactccatctcaataaaataaaataaaataaaataaaataaaataaaataaaaataaaagagagaaaaaggagggtggtaggtgaaaaacagaaggaaaaaaggcattatttcctaaactgcataaaactcagtgtttgtgctcaagcacaagcacacagaaaattaatattaagtctgaatattatagaaattgaacacggcacaaaagtgctgctgcaccctagccctgccaaacccaggaaaaggttaataggctccctccagacttcttgcaaaggtgcagcacgatggagaatttatagtgcccttgatctggccaagttgatcaaggtaaaaatcctgacattttatcttacctgtccatctgtcagaggcagatcactatgtttataaaactgaaatataataacaaagcacattcgttactttgaaatgagaaataactgtcacagaaattagaacattcagagtctatataagtacatactttacctgttggtatattatgaagatacaaaatgagagtcagaaacttgtttggtgagtctagaatatgaactagggaagctgcgtgcatagaatgtttagtggcctcagactgggacagttaaaagcttgcgaatgagaataaaatactcaaaagtcttgtggctagggatttctcactttgatttgaggaaaatgacagcattagtacttttttctgtttccattgttgattcatcttccataggtatgttaatgagtaccttaaaatcaagttacagttatgtaatcaaaccactgtatgatctcaactcagtgcagtataaacatga

SEQ ID NO: 76342 - DNA, 1262 bp, Homo sapiens
tctgtgcacattgtgtggtttaggagagatttataaagacagtgccccccaaaaacaatgagtgagacgaaggactatagtttttttttaaaaaattattaacctggatgcaggaatattgtgctactttaaattttgttttgttttattttattaaaagagagaaagggccaggagcggtggctcatgcttgtaatcccagcacttttggaggctgaggcaggtggatcatgaggtcaggagaccgagaccatcctggctaacatggcgaaaccctgtctctactaaaagtacaaaaaaaaaattagacggatgtggtggcaggcacctgtagacccagctactcgggaggctgaggcaggagaatggcgtgaacctgggaggtggagcttgcagtgagccgagatcgcaccactgcactccagcctgggcgacagagcaagactccatctcaataaaataaaataaaataaaataaaataaaataaaataaaaataaaagagagaaaaaggagggtggtaggtgaaaaacagaaggaaaaaaggcattatttcctaaactgcataaaactcagtgtttgtgctcaagcacaagcacacagaaaattaatattaagtctgaatattatagaaattgaacacggcacaaaagtgctgctgcaccctagccctgccaaacccaggaaaaggttaataggctccctccagacttcttgcaaaggtgcagcacgatggagaatttatagtgcccttgatctggccaagttgatcaaggtaaaaatcctgacattttatctyacctgtccatctgtcagaggcagatcactatgtttataaaactgaaatataataacaaagcacattcgttactttgaaatgagaaataactgtcacagaaattagaacattcagagtctatataagtacatactttacctgttggtatattatgaagatacaaaatgagagtcagaaacttgtttggtgagtctagaatatgaactagggaagctgcgtgcatagaatgtttagtggcctcagactgggacagttaaaagcttgcgaatgagaataaaatactcaaaagtcttgtggctagggatttctcactttgatttgaggaaaatgacagcattagtacttttttctgtttccattgttgattcatcttccataggtatgttaatgagtaccttaaaatcaagttacagttatgtaatcaaaccactgtatgatctcaactcagtgcagtataaacatga

SEQ ID NO: 76343 - DNA, 684 bp, Homo sapiens
agagggaggttgccagctgccttgaagaagagggaggggcagaaggaggcttagggtcctcaggcggcccttctgagaaaggaagagggaagggaggtgtaggcgaaggaggtgggcccgtctggaggaaggtaacttctcctcctttagctgggggtggggcagaacatgggattgtcctcagacccaggccctgctcttctctgaaaacactgccagygtcccctgcatactggctcctgcccaggtctcactcatgggaagcactgggtcaacaggaggtagggtggcacatggaagagcagctacctacacctcctcgttccctctgagtctcctctgtgcttccagctccctggggataacctccctgtcctgcctttgctgggcagcccacctggctctgggccagaggaatagcctgccttggacttgctgctcttgccagtatcttgactgcctcacaggtccctccatggcccctagctcttccatccccagtgcaaccaaatccctgtattcaatccctctggtggcagtgcctagagtggatttgctttccaaatggatggagagcaaagcctgaggatgagggctctggatcagcaaggtggcacttaccagaactgccaggtccctgtgctcctggggcagtcaatccactgaggaatgtgtcttttctgc

SEQ ID NO: 76344 - DNA, 738 bp, Homo sapiens
ctctcctctgaccctctgttccagccatctggggcttcttgatgttccccaacaggcctagcaggccctgtctcaggtctttgtgttgccattccccttggccgtgggtcttccccrgatgcaccaggacccacggctccccaggtgtcatctcatcataagaaccacccccaccaactgcttgcatggcttaccctgttttctcaatttgtttttctccatagcactactcttgtctgatgcaggtgcactctatagtttacttattttacttatttgtgctgtttgtctttcccctttctggctggaagttcctgaggtaggactgttatctatttttctcttggcagcatctcctgtgctagggggacgatctggatcagtgcctggcccatggaagactcctgacccaggcttgttcactgaatgaaggcattccacatgttctgtgatgcgggcaagtcattcattcatttatgcatttagaatgagctttgagaatatggcagcctacaaaatggacatggtcctgccttcagggagcttctggtccagcctatggcctcttgcctggaaagagatgttaccacgttattaggaggtagtgtggtgtggtaagtgctttcgtgggaaaagcagaggggattatgggagctcagagtggggtacccaacctggatgggaggtcagagaatgccacagaatctgtttggccttcaatcactaatctgtatagtt

SEQ ID NO: 76345 - DNA, 2115 bp, Homo sapiens
ttggctgacagcccctgcatcaacaccagccacgtgagcaagacaccttggacacacatgcggcctgtcaagcctccagctgcctgcagtccaagccaacacctggctgcactctcttgagagactccaagtgatgattgcccagtcaatccctctctaaatcccagcccaccaaatcgtaaacaaagtaaaagggcaatcgtttgatagcactgatttctggggtaattggttacgtagcaatagtaaccaaactagaccatgccagggatccctggaaggcagggagagggcagggtgagaatcttcatggtgggggttctggtagcctccctccctccctccctacttgctcaggtgagaggaattcgatttgttggaggaaagttcccctggtctcacctagccccttcattttggagatcaggatacagaggcaaagcagggaagtaatgagctgaggtttacaaggctaggacgtgaacatgccatttctcaccctagaatctggcaactccaagtccagggctccaatctgaacatatcagctggccattgggaagytcccaagtcaattctgggctttcttagtgctcccactgtaatctcaataacacagatgttttttccaattcaagttgtgaatcttaaagcaaatctgtcaattagaagagagtcatcaggttctgtagttaaggtcttccagtgctaattcaagcaatctgctttccatctagcagaagctacaccccacatgtgtgtcctgtgtgattgtaactttgtttttaaagcactacctggggaagcatttcttataaaaattgtcgaaacaacgtaacactctcacccacatgtatttcctttcagtttcaacccatccagtcctggcaactcctataagcatctgctgtgttacttttttccttcttctcctttaatgccagggacctcgtgctggggacctcggtagaccaggaagccacagttgggaatgcattcagagaccattagttcaggaagcacagtgaaatccaaagaaaccatgaaccagtgagttgggaaacactctatgaaaggccttttcaggcagtttctttcaggaggagtttgtttttggattaaaggagtttattcaggtattcacaaatacccaggctctcggcagcagctggaacgtggaaagccctcagtcataatcaatggctgtagagcagactggcatgttctgcttgagcaacacaaggatgaaaggggcataattaggggacacgccttcagaggagatgaaaggcccaagacatcctcaaaaacggaggcaaaatataccctgaagtcactagtttctttattttggaagtagcagttccaataaaagcctaggtgtcaaaggcattgggatgcagccaagccttggacgcggttgctttctttctttctcgcccctgccgctcttttctcgcttggggaagaaaactgatggaaatgtcactcctgtatttcctgcactcctagcaaatggtgtaaatgcctcgctccttaaccggggactccaggctgagctgacactttgatgggcttccaggcggggtgcatgagaggaccacaggggttaatggagtaggtcggatttgaaatcttcccccacatcagattcttcagggttttctcagtggctcatttgtattttggagtcagctggttacaaaacagcgcccttcctctgcttagagacctgagaaagcttaggacacttcacagtcctcttgcaagctcccttgccttggaaaattcttatttcctcattcaattcaatacagaagatgagctggttttcatgaacaaggggttttgtgctgagggcattgaacaatctatcccacccaccgttcattttcagatgggaaggggaagcccggctgagactgggtgacttgctctgagtggtagaactagagccaaagagaaatttgggagaagttttgacccccagaagagtgctttttctcctgtttgagctgttccttttccacttccctttatttttaatcctttaatggacatactctgactgtgttctgagcactcattaacacatatttaaataattatggaaaa

SEQ ID NO: 76346 - DNA, 572 bp, Homo sapiens
tttggtagaatgatttttttgcctttgggtagtatatacccaatgataggattgctgggtcaaatggtggttcagtgttaagttctttgagaaatctccaaactgctttccagagtggctggactaatttgcattcccaccaacaatgtgtaagtgttcccttttctccacaccctcaccagcatctgttatttcttggctttttggtaatwgccattctgactggtgtgagatggtatctcattgtggttttgatttgcatttctctaatgattagtgatgtggagtattttttcatatatttgttggctgcttgtatgtcttcttttcagaagtgtctgtttatatcttttgcccatttttaattggattatttgttctttacgctgtgtatctttgaattgtaacagtttttggaaattgaaacacatagactctgggcttatcagggttccaactgtatttcccagaaagcaaaaatatatatgccacaggcacccagtaagattactgaatgagttgatggctatacacttttagagctgaaatatacctcacaaaccctctagtct

SEQ ID NO: 76347 - DNA, 779 bp, Homo sapiens
atagtggtacccatgttgtggggctgcatggaggctgagtgagcatagtgagaatttggacatgaaatgctgagcacggtgttgggcacatgctgctgtccatcacctgttcacactcatcatcttcactatcacttagcacccccagcacacacacccctacctacaagccctgttgtaatccctgctttcagatgaggaaactgaggctcagggtggcacagcttttcagcagatggaacagagccttagccctccaggcagtctgacgttacacccagaaccttaatctctgccttagtccagcgtgatggggctgagggtgctgtgctgagactacagagccccaggttcaagttccagccttagacagccttgagcaactcaccttacccaccaccccatgcctcagtttcctcgtgcataaaattgggagctcttttaggcaatgttaagacttctcctagctctaacaatacgcaagcccaaagagggctgtgcacattatggcctttgttttccagattcgaatgtgccccccagatctccacgccgtgcaatttctcggacaaaccaactcacgtcttcttattggtcccatgcacccgtgggatcagcagatgtaacattctgacatcacacttagaaaacttcccccatctggatttctgcaacccacagggagtcatttgccaaacatatgttttacaaaacatgggcccactgcactctgactkgttgtggagtcgatacaacccaccttttccccaagcacatga

SEQ ID NO: 76348 - DNA, 647 bp, Homo sapiens
ggatcccttgagcccaggagttcaaggccagtctgggcaacatagcaagaccccatccctaaaaaaaaaaaaataagttttattaaatgtggcactttcccctagaagggcagtaaccccaggaaccagtctgcctcttttcgaataaaggagactttttaaaargaaaaaatttctttttagggtggggtgctctttatctagcatctttccttcctccttctctctgcaaaattcaacattcatgacagagggccacaccaaccacgggtttatagagagaggaactgaacagctgttgattcccatctggaatatatttaatgtttgcctgcttgtggagcatggtatttaaagggtgtggatggatgaatgtttaaaaaaaaacacacaaaactatgcacaagctgtatgagagatggctaggtccatctatgattttttttaaaagaagaattttaataccttttctttgacagtgaactgtatttagaaatatgatctttattgtgaaatgctcataaaatgcaaccaaactgcatgtttggccataggctagaataatatattaaaagaattaatggaaagtagtattgtctgggtttcatgaaactattccagataatattctccagcaaaacttatgg

SEQ ID NO: 76349 - DNA, 721 bp, Homo sapiens
tcattggagctgccttaggagctcacaaacaagaggcctgtgaagactgagtgctccctgcccccagcgctgcactcacagtgactccatgtccaactagttttctgtttgggattagaattccatgtaagatttcctctgggggatgcagtggcwaacgcctgtagtcccagacactggagtgagaggatcacttgagcccgggagttcaaggccagtctgggcaacatagcaagaccccatcccttaaaaaaaaaaaaaagttttattaaatgtggcactttcccctagaagggcagaaaccccaggaaccagtctgcctctttttgaataaagcagactttttagaaagagaaaatttccttttagggtggggggaaagttgattaccttaaaaataaagttggagggaggaactctcatgaactggtagctaaagtcttctatgtaaagataagaggagggaaatttttgccatttgggccatatgggaagtggagtcgtaggataaaatgggagcttatttctaagggattttagccacccttagcagggtgtgtttagtgtcctgaagttcacctgtatttatacatctcacttcagttagtaaatatttaagtgcctattgcaatctgggcactgtgctatgcactgcagacacatttgggagcaaaaacatcttaatccctgtcctgctggggatttttggcaaaacagataa

SEQ ID NO: 76350 - DNA, 721 bp, Homo sapiens
tcattggagctgccttaggagctcacaaacaagaggcctgtgaagactgagtgctccctgcccccagcgctgcactcacagtgactccatgtccaactagttttctgtttgggattagaattccatgtaagatttcctctgggggatgcagtggcamacgcctgtagtcccagacactggagtgagaggatcacttgagcccgggagttcaaggccagtctgggcaacatagcaagaccccatcccttaaaaaaaaaaaaaagttttattaaatgtggcactttcccctagaagggcagaaaccccaggaaccagtctgcctctttttgaataaagcagactttttagaaagagaaaatttccttttagggtggggggaaagttgattaccttaaaaataaagttggagggaggaactctcatgaactggtagctaaagtcttctatgtaaagataagaggagggaaatttttgccatttgggccatatgggaagtggagtcgtaggataaaatgggagcttatttctaagggattttagccacccttagcagggtgtgtttagtgtcctgaagttcacctgtatttatacatctcacttcagttagtaaatatttaagtgcctattgcaatctgggcactgtgctatgcactgcagacacatttgggagcaaaaacatcttaatccctgtcctgctggggatttttggcaaaacagataa

SEQ ID NO: 76351 - DNA, 721 bp, Homo sapiens
tcattggagctgccttaggagctcacaaacaagaggcctgtgaagactgagtgctccctgcccccagcgctgcactcacagtgactccatgtccaactagttttctgtttgggattagaattccatgtaagatttcctctgggggatgcagtggcaaacgcctgtagtcccagacactggagtgagaggatcacttgagcccgggagttcaaggccagtctgggcaacatagcaagaccccatcccttaaaaaaaaaaaaaagttttattaaatgtggcactttcccctagaagggcagaaaccccaggaaccagtctgcctctttttgaataaagcagactttttagaaagagaaaatttccttttagggtggggggaaagtkgattaccttaaaaataaagttggagggaggaactctcatgaactggtagctaaagtcttctatgtaaagataagaggagggaaatttttgccatttgggccatatgggaagtggagtcgtaggataaaatgggagcttatttctaagggattttagccacccttagcagggtgtgtttagtgtcctgaagttcacctgtatttatacatctcacttcagttagtaaatatttaagtgcctattgcaatctgggcactgtgctatgcactgcagacacatttgggagcaaaaacatcttaatccctgtcctgctggggatttttggcaaaacagataa

SEQ ID NO: 76352 - DNA, 721 bp, Homo sapiens
tcattggagctgccttaggagctcacaaacaagaggcctgtgaagactgagtgctccctgcccccagcgctgcactcacagtgactccatgtccaactagttttctgtttgggattagaattccatgtaagatttcctctgggggatgcagtggcaaacgcctgtagtcccagacactggagtgagaggatcacttgagcccgggagttcaaggccagtctgggcaacatagcaagaccccatcccttaaaaaaaaaaaaaagttttattaaatgtggcactttcccctagaagggcagaaaccccaggaaccagtctgcctctttttgaataaagcagactttttagaaagagaaaatttccttttagggtggggggaaagttgattaccttaaaaataaagttggagggaggaactctcatgaactggtagctaaagtcttctatgtaaagataagaggagggaaatttttgccawttgggccatatgggaagtggagtcgtaggataaaatgggagcttatttctaagggattttagccacccttagcagggtgtgtttagtgtcctgaagttcacctgtatttatacatctcacttcagttagtaaatatttaagtgcctattgcaatctgggcactgtgctatgcactgcagacacatttgggagcaaaaacatcttaatccctgtcctgctggggatttttggcaaaacagataa

SEQ ID NO: 76353 - DNA, 1644 bp, Homo sapiens
aatgactcatttccttcacaaactagaagttgccattctaacgataaatggcagtgtggaaagcgaattagtaaatgttaaagtatgagtcctatgtaatgggacctgttcattaatttggacagtgctgtgaatatgtgagttactcattttgaaatatacattgaattagatatgattaatattccagttgtataaaacagataaagatgacataacctgacatatttcctttccatgagttataaataagaacctgagatcattttactgggactattataraagtaatttgtttacgtgatgactctgttcatgaacctaataagcttgctttcttggtcattttttagagaaggtttttatttgattgttgaatcataaagagacaggactcttgcattccagcttcatcctctggcttttctgtgatttttccttgttcctcagtctcttcatacataaaagaaatacatcagcagtggctctgagatgcaaaaataaatataattgtcaatatttaaattgtaaaactttagtagattattcttattttaattaaaggaggaaaatagacccaaaatgattttaggagctgattcagataaattggtcaggtggtttagaatttaaattcatggttcttttctactgaatttattggataataatttatgcatatacagataaatttggtgcactttaaaatgtgcttaaaaaatcttgtgttaagatcctcttcttcctgaatcagaggtccacaggcctattttggcccacagagatgttttgtttgctcatagaaagtgttgatttttcttttaagttatcaacctataaaaatacagatttcacctaaaaaatagatttccaattacgcttaaagaatcataagatccagcaatgtcaggtctttatctctacatagcaactgctgctagtactgaataactttcccctttcaatggtgcatgtgcctcagcaccaacagtctctgggatgagaccccagtactacaaatcagggttttctctgttgacctagatgagaacattctgacattgagaataaacagtttaagcatcattattaagtggtatttgaattcagagattaggcacatgaacaaaacctagggtactgctaccttgaacttcttttagtaagaagcaagttcttctaactttcctctactttcttttaagtttgtccaaaggtgcatttgcaaagggattacaaagaccatggcagaaccagcccacccctccctaacacacacatcacacgcttattccaccagctcctctaattaaaggtctcgcacagctcatacgactcccaaagccaattaaacaatgctcacccttgtacctcacagtaggttggggagtagcttggaaaacgctgtgattgatatgaaaagtagtaacgtatttttaagcacttttagcactgttgttactctatgaggcacaagctttcaacatagtggccttttattttctgcgcttttggagtgtgagaacaccatagaggctacacgcaccacggcgtttctgtgggctgggaatcaaggcctggagaagggggtgggcagccgggaagtgacagtgcagggagggggagttggcagctgtcaaatga

SEQ ID NO: 76354 - DNA, 1165 bp, Homo sapiens
aaaacatgtttacttacgcaggaactaagcttgttaaaaactatgagaaacatttggactcatccattcagcaaatattttgtggttaygtactatgtgctatttagctatgtacaaaatgaataaagttcctcgccattgtgaaacttctatctcctaggcatgaaagctcaaatggaaatattaacaatggcaaatagtaatgaaaagtgctgtctattcagcaccccttatttcaaactattgtgctaatacagtttttatatgttatttcttatgttccaccagaagatacacttcataagtgaaggaacagtctttgtattcatcattctgtgtccaatgcctcacccatatttggtctcagtaaatatttgttgactaaataaatgatccctccataaattctgagtttggtattattatgcccatttaacaggtggtaaattgaggatcagagaggttaataatttggcccaaatcacacagcaaaaagagctaggatttaaacctagagtgttttccaatacaccaaaatattacttttgcatatatttgttggaataaagtgttttggagctcatgtcactctataataagttgggtctgtagggatgaattacagcacttgcagtccctggaatactattctgtgccaacaagagaatgcaatctctgatcaaaatgttaactttatgttacttacatatcccaggcttcaccagcccagctagcgactaacaatgagctatggttaacattaataacccaaagcccctgtttttgcctgtctgcaggctctttagcatatctttccttaaataaaaccaaccacccactcctcttaccccatctccaccatacacacacaaatacttcttgaagttgttgaagatcagcctacatagatctcaagcccacttgtgagttggtcaatagccaccatgagatatccacagcttttatcttctactgcagctttgctttgtcaacctctactgtgaaagaagctgttgagggtaactacactgttactgctgttaatagtgccttctggaaaaataaggatgatgcctctcagctctcccaaagcttccatccctgagatggagctggattctgtgaagaacccaggagaatggcccaataacacatgtgtaacctg

SEQ ID NO: 76355 - DNA, 1165 bp, Homo sapiens
aaaacatgtttacttacgcaggaactaagcttgttaaaaactatgagaaacatttggactcatccattcagcaaatattttgtggttatgtactatgtgctatttagctatgtacaaaatgaataaagttcctcgccattgtgaaacttctatctcctaggcatgaaagctcaaatggaaatattaacaatggcaaatagtaatgaaaagtgctgtctattcagcaccccttatttcaaastattgtgctaatacagtttttatatgttatttcttatgttccaccagaagatacacttcataagtgaaggaacagtctttgtattcatcattctgtgtccaatgcctcacccatatttggtctcagtaaatatttgttgactaaataaatgatccctccataaattctgagtttggtattattatgcccatttaacaggtggtaaattgaggatcagagaggttaataatttggcccaaatcacacagcaaaaagagctaggatttaaacctagagtgttttccaatacaccaaaatattacttttgcatatatttgttggaataaagtgttttggagctcatgtcactctataataagttgggtctgtagggatgaattacagcacttgcagtccctggaatactattctgtgccaacaagagaatgcaatctctgatcaaaatgttaactttatgttacttacatatcccaggcttcaccagcccagctagcgactaacaatgagctatggttaacattaataacccaaagcccctgtttttgcctgtctgcaggctctttagcatatctttccttaaataaaaccaaccacccactcctcttaccccatctccaccatacacacacaaatacttcttgaagttgttgaagatcagcctacatagatctcaagcccacttgtgagttggtcaatagccaccatgagatatccacagcttttatcttctactgcagctttgctttgtcaacctctactgtgaaagaagctgttgagggtaactacactgttactgctgttaatagtgccttctggaaaaataaggatgatgcctctcagctctcccaaagcttccatccctgagatggagctggattctgtgaagaacccaggagaatggcccaataacacatgtgtaacctg

SEQ ID NO: 76356 - DNA, 1792 bp, Homo sapiens
ggccagggcatttggctgttaaccccggccgcttccagggttgggacttctggtatttcctgggccttagcgggcctctgctgcactgtcagaataatgaggcttctgttccaaatttgaaacactatgagtctcatcagcctcatccttgcctcctgccatcttctcttgaaggttggggtcaatgacttcagagaagattggtccttgtctctaggcaagggcaatttaaatatccccaaacttaggttgccctcgctgctatgtacttctggtttttgaatccagctctggaaatcacttctttgttttgttcctgagacttggctcctccctcgagccttgttctggaaactgaatccctacctccttctaagctgaattgcatttccctcaacatgcccccataacgttctgtgcttatccccatcacagggctcataaacaaacacatgcataaataaatggaaaatttaatgatgtatggcaaatgacatagtaaatacacaaataataaacactaggaaccccacagagatatcgtgatgatgtgctttacaaggcttatttcaaaaatggtcagtttgtgacaaaataggtatagagttaaggaaaagaacacggtctaacaaatgggctaatagaggggccccatcaaaggatggagcagctcatgatgtggcaactcaggcatgattaaaagagagaaatgttcctgatcctgatggatccatcccggggttctcaaaattctcgagcattctgtatttgttgtttcttccctgttccctatggcacttcctatatccctgtatttgcacatattacaatggtttgttgggaaaaggtaaatatatgctcaaatatatacacaattaattaaacaaaaatgcctgcaatgtgattttacaaatcatagaagatatttgaagccagggttactcacatttctaaaccctggaatcaagttttttgggaaaacattactagaaaagagaatacaactggtagagaatacgtggtgtaaagcacaccagagcrcagaaaacatgggaatatttagatgaaagtacctattttccccctctattttgtcatgtctcatgatttatttatgatgtttggcttaagcaagagcttttgatgacaaaaccgtgatttctctcttagacaagtgtgtatgaatctttttttcattatctccctctaaaagcattattagacattttttctctaatcatcccccagtgaaattataataccacagatagactgcatatcagtttctgtactagatgtaaatatttacacataaaagactaatattttctcactcccactagggaactaattattgcccccttgcagatgatactgctcctgatatagtttgaatatttgtccccgcccaaatctcgtattgaaaggtaatccctagtgttgacaatggggcctggtgggaggtgtttggatcacgggggcagatccctcatgaatgtcttgggccaccctcttggtgataagagagctcttgctctgagttcacacaagatctggtcatttaagtgtgtagcaccctcctcactctctcactcactcttactttccatgtgatgtgactgctccctctacaccttccaccatgattgtaagcttcctgaggactccctagaagctgagcagatgccagcaccatgcttcctgtacaacctgaagaactgtgagccaattaaacctctcttctgtataaattacccactctcaggtatttctttatggcaatgcaagaaca

SEQ ID NO: 76357 - DNA, 720 bp, Homo sapiens
tctctctctctctctctctctctctctctctacatatttgagttttttgttgggttcattgcttgctttggaaaaattggatcatgtattctctgcatcttctatctctcattcaaaaatatctcatagaagttcctctcagtcccctggtatgtttcagattcattatttgtgttggcagcattgtaatccataatgaggctccttcataatttatccaaccctttctctattgatggatatttcctgttttaagtttctgtccctctaaacaatgaagcaagattgttgtacaatatatatctttatataccaatgcttttacttctrttgaatggattccagggttgaaagtcatgtgtattttaaaatttagtgtatattgctttcaaaaaggctgaaacatattttcggcagcaaaatatggagtactttttaccctcatccctagtagcaaccgttgctacccctcgttttaatttttttgtagtcttatagtcatgaagccatattccattgtaaacttaatttgtagtttgctgactcctgatgagcatgagcatctttttcaactgtttatttggcagagggatttgctttttctgtgtatgttgtacttcaatacaaaactttcttagaatttaaaaatctgctgggtttatgattgggattgcattacgtttttaattttttggagaataaattttttatgagattaac

SEQ ID NO: 76358 - DNA, 1271 bp, Homo sapiens
cataaattccttttcaatttcacacaagatctatacaggctttactttttttaaaagacttaatgctaggtctgtgttattttccaaaaggacaaagaagctagatgtctgaccagataaaatggtgcattactgtctattactaaagacatttattggtctttccaaatttaaaccactcactgaccttccttctctttcttttcttggttttcttcagccgcagtcttgtctgctctgaagaaaattcttgcactgctcagtgagaaatacagcaattcaaattcctaagtaaatttaaaaatttgaaataaaaaccaaaaatacttattatggcaaaataccaaaaatatatgcatttttatgcctcttattattatttttaaaagctctagtggaaatcataaatacagaaactgaaataagtaacccgcccatttttaagatgtgagtcaaatggcttccaaatagcactcattttaaaatataatctttttgccactattcatctcacttgtgaaaatggtagtttctatatggcttctgcttttcagacattaagaagtcatggatatcaaatggtaagtcaaagcagatgtgactcttaggctcctctctacctgtagatagacatccagtcgcttctgagtgagattcatggtttgtaagagtttttcatcttgactggctgactgtacattctgttgcttagcaactgctcttatctccttcaggtatttctctctaacagactggaaccagtgaagtgaatcaaactcccgatactgatccaaaagctttagaatgtaagccacacctgcaggcataagcaaaactaaggttaaattacagtgagtacagaagtggtattctactccttcaccaataattcccaacactaagcattctgagtaataattcctagcattttaagtttgtcccgtttcaagttacattttacagcataaatgaatgatgggtttaacaaaatggcttaattcctcctttaaaaacaatgtagaagtataactaaagacaagtcaattaagaagaaaataaataactaacatggccatataaatcaccaggagaaacgatatagctgtaagcataaagaataaaactttccatgacttgtacctataatcccaatactttgggaggctgaggctagaggacctcttgagcccaggagttyaagaccaacctgggcaacacagtgagactcctgtctctaaaaaaaacaaaaatttttttaattagccagatgt

SEQ ID NO: 76359 - DNA, 747 bp, Homo sapiens
tgcatatcatttttcaagtatggtttacaaaagcrtatgtgcagaattctgacaatgtcaggcattggagtgtttgttacctttgtttcattttgatagtatttcttttgtgacttttctatactatgttgggttaagtgatgtagggaatgcgaactgtgtaagatggaactcttccttctgtagtagatgtcattcctttcatattgttttgggattcttcagttttggtgtgactgattactactttacattgtagagtccaaacacaatgtgactgttgttttttatactggcatcgagctgtcttcccaatttatttagatgatgtatatgaaaatgctgttgatgcagccagattacatgtaagtaaagaacaatataaagaataattctatcattttaaaagtcactgtgtaaaccgttttagtttaaaatagatcatttgatttaataaacttttaaaattgactgttttgtaaactgcatattcataaagtgtttatagtctgtagttaaattttatgttactgttaacgaagttaatttatttaatttcttccttcatgttcctaatcattttcatttcacttaattttagtttatgtcatagtaatctgacatttactcatcagcaaattacaatgcaaaagaaaaaatatttttaagaaatattcatatttttctttatggaaataagtgtgtttaaatgcacaagataggaaaggactagcgaatgtgattttt

SEQ ID NO: 76360 - DNA, 1370 bp, Homo sapiens
tcagcctgggcaacaaaagcaaaactcgtctcaaaacaaacaaaaaaacaaaccgaaaagaaagtagggtaagcacgttctcactcataagtgggagttcaacaatgagaacacatggacacagggaggggaacatcacacacctgggcctgttggagggttgggggcaaggggagggagagcattaggacaaatacctaatgcatgcagggcttaaaacctagatgacaggttgataaggtgcagcaaaccaccatggcacatgtatacctatgtaacgaacctgcatgctctgcacacgtatcccagaacttaaattaaaaaaaaacaaaaactgacaaaaaaaaaaaaagacagtagggtggctggactggcaagggaaggaaagacrtggacaaaatccatttgtaccatacacaccctgtctctgggacacacaccttttttcatggcaaaccacctggcatgcactgcgatttctgtagagtttcaggtttgggccagtccacatgaacacccagtctgtttctgaactcgcaaagctgagagcctgtacagatgtgatgccctctagcctgccccaggtcagccacaggatcccaatgaagcttaactgtcatattctgtgtagtgggctgggaattcctgactttgtttatggacaggggaacctgtcaaggaagggtctcagggagtcaggtgtcccaggggtcttgtgctgctgtgataagagtaagtgctctattctgctctgaagtaatgaaggggctgggctatttcttctgcctaggtcaattctaaagtctacttagagccatgagttttgcagttcagtttaatatgggaatgagaggaacacagaaggcttccctgtttaggcttcccaaaatggaatgagaaataggcaggcatttgactccaacttctgctgcactggaatttcccgttgcacagattctggtgtggggtctaaaatgaggccacctgctgtgttagtataaccctgggccttgttgaggttgtggaactcagtggtccccaggggttctgcgtggatctgggaaccatgtcccctgcacttttctctctggccaacctctttgggcccagcattcctggctcttctaactgattgcctggacaaggaagctttactcagtggagtatgctaaccctgcaatggcactctgagggtagggtgtggagcgctggttgttaccagggactacctcatgctcaccagtcttcacagctgtcttgtcctccaccccaccccttggctgcaccaccaccaccactgccaccatatacaccctagtcactctctaatcctgtgtcatctttcttcacaactttttcactctttgaga

SEQ ID NO: 76361 - DNA, 925 bp, Homo sapiens
atcgcttgaactcaggaagcggaggttgcagtgagctgggatcgcaccattgcactccagcctgggtgacagagcgagactcttgtctcaaaaaaaaaaaaaaaaaaagagagagagagagagaatctctgttgcaatgcaaaactaactgtaaaattatcagaaatttttcaatcaagaaaacaaatctgtcattttcctatcaagcaaaaacccttaggattatatctccccgtggatgaagcaaaacgtgtttaacagcctgtataaggtcctccataatctaccccacactcaccttctcctttctcccctccagccacactgaacttcttttgctcctcaaagtcaatatgctccttcacctccaggcctttgaacgtgctatttattgcctcgcctttcccttttcacctggctgatctcttatccttcaggtctcagccgtgagacctctgtcatattctcgcacayagctaatgacatctgcgtttattggtttgtcaactccttcagggcaggtgccatgtctaacttatttacccctatagtctcatgctagcacatgccatgaactatattaggcattcaataaatgtttactaaataagtggaatgaatctatctggagagaaatataatttcactaactatactttgggatatagaaattaactttatggctctcagttttgactttcacctgcattcaacattaaccatgacctctagaggaaagagttaacatagccagtatgttttactcagttcttgcttgtctttgggaacacctgcagtcacagcaatgaccctgacccaaatcctgagcactaaactccctgaaatgcttactaattagttatgttatttttgtgccctcaaggcagtggtcaaaatatatcaagacagtatcattgtttaaagt

SEQ ID NO: 76362 - DNA, 719 bp, Homo sapiens
ggcgggattcacactagtctgtaggtgaatttctaccatccctgggatccaaaatgcctcaagctgttaatttatttttgaaaaaaggaggttttctgttgttccaggcagatcctgtaatctaatgtgactctcctctggatgggtgtaccttcaaagcagaatgcaaagaattaccataagtcaagttccccagaacagaagtacaaatgtgaaaacttacaaacaacttagtttacatgagaaattggaattcttatcggattcagactgtaatcatgaaaaaaaagagaataaaaatatgaataggaaaccaaatactatatgaacggccaagtaaatgtgaaactaatccaagccatcacatgtccttactaaacataayttgcaaaaaccaaccaaacaaaacaaaacgaacaaaccattttagtgtattagtctgttttctactgcttataacagaatatctgaaactgggtaatttataaagaaaataaatatacttctcacaaatatgctggctgagaagtccaaggtcgagggaccacatctggccctcttgctggtggggattctggagtcctaacgtgtgcaggcatcgcctggcgaggggctgagcatgccagctcaggtcactcttcctataaagtcaccaattcccctcctgtgatagcccataaatccgttaatccactaatttacaaatgattaatacaatc

SEQ ID NO: 76363 - DNA, 909 bp, Homo sapiens
gttcattgccacccctattaggttaaaaatgtctgaataacacagagcaggtcttattcttttttatatatcttctaactttttatttaaatggattttattattccatttatctatccatatgtagacatatgtatatgcacacacacgcacacacacaaatgcttcagaatttacaaaacaaaacgcaaagcctactcattactttaaggcttcaaatattaaaatggacagtgtgatggtatgtatatagaacaatacactaatctctttttttttgctctttcataaaacttggtgttgaaaacagtgaagtactttgcagagaaaaagtcagcttttaattgtcatctcttatgcagtggagtggaagaaagagctcgttattctaactgaaagtaaaaatgagaaaaaatctaagctttggatttttcaggagtacctatctttctaattttcagtgcgacacataatacacagcagttatagaarctggagaaaacaactgctatttcttgaggctgctgtattttagagtgatgggggatactctggtgaaaactctgggcttgcggtagccttctgtgattaggcgcaggcagagtcgatggctgcatatgggaggtgattttaggctcgccgtttgcaatgcactttacacatgattaccagaaactgatatgataaggctccagtggcccctgaaagcacaggcaccagccggctttgcagagtctggcctctactcagcagatttgagattctttatatatatgcagaaaggcaggatattattttcagagcttttgttaatattagggtggccatataatatattgtccaacttggaattttttgggtgagtgaaagggggttattaataattttgccgtggcaatgtcacctatg

SEQ ID NO: 76364 - DNA, 535 bp, Homo sapiens
ttatcacaatttgatcattacaaaccgtatacataggcaatatcactctgtgctccacaaatgtgtataattgttatgtgtcaattacatttttttaatctattttattctttttttttttttttttttgagacagagtctcactctgttgcccaggttggagtgcagtggtgtgatctcggctcactgcaacctccgcctcctggcttcaagtrattcttgtgcctcagcctcccaagtagctgggattagaggcggacattaccacaagtgggtgatttttgcatttttagtaaagacgggttttcaccatgttggctgggctggtttcgaactgctggcctcaggcaatccacccaccttgacctcccaaagtgctgggattacaggtgtgagccactgcgccgggcccatatttttttatttttatctttaattgaaagaataaaaagcatgaatgcctgctggccattctccccaaaagacctcactgaaaagcaacactgaggtctctaaacagccagagaagtccagc

SEQ ID NO: 76365 - DNA, 760 bp, Homo sapiens
aaaagaacaaacacattcatttcctaacaaacacccatgtggtgagataacatgttgatctgaaccgacatgcttatcattccgtctttccccatggcctccttccattttggcagcaacttgaggtcttgtcttaccagctctcgaatgttggccgggagaggagaggagacccagtgttggagctctcagcctttgcatcccaaaatagacttttgaaacttcatgtggagaaagagagacctcagggaagctcatgatgaaaaggcatttctctcacccacttcatcccagacttgacaaagacgtcagagtccagggaaggaggaaaggagaagaccaacacagataattctatatggcaggcggcctagcgtcctgtcctgcacccacaagcctgattgagggagaagggacagagggaacccccttttcctttccctcttacttggcccagtcccttcctggcttctgcctacccctgtctttgttgcctttgattcagtgttttgttacatccgcattggtttcactatctttcatcagtcctataacctctcttcccaactcctctgcctccctttttctcaaaatctatgccttttttagactgacggttcctgccttacgacggtttgacttagacttttcaaacttactgtggtgtgaaagcaatacacactcaatagaaacagtactttgaggccaggcatagtggctcacatctgtaatcccacaagtttggraggctgagatggat

SEQ ID NO: 76366 - DNA, 1811 bp, Homo sapiens
cccatgaacagccttaagtccccagacaaaatagcaaaacaggtcctggacgattcagcgcgaggtgggacacaacagggagggagaagtcagtatccaggggcactgcccggacccagaaggcggaggctgggatgtccccagcagaaacggacttccctggactccagcaggctctctgcggataagggattggagtgagtgagaggaaagaggaggacagaggcaaacttttctttctgcccagttctaggccatcaagggagtgaaggatccccaaagacataaggcagagctgggagaagaaaggagaggaggaaacaaaaaaaggaacaagaagtaaggatgaggagacaaaacaaatggcatggaacatgctagaagccttccaatgacttccccatgtggaaactgcacacccgggcatccctcccggctttctgtggatgggcccatccaacgcagctcttgttagaggagtgcacactcccctctactatttggtaagtgtttgtagcaagaccagtgcataggtgggacgtgatctgaaagtttacaagaaggaagtgaaaaaccacttgtgagattgtggggagaaaacgctgggagcccagagacaccacaggcgtcaagagtccagggaccatgcatggtggtttatcagtggcaaggagaccaaggtttgacccagcctgacctcgtagcacttcctcgtccagatggatgtgggcttgtcctcccatcacgcacctgtccaagctggctgcacctgcatggactgctctccactctgcaagggccaacacagctcacacccaccccratgccagaggaaaccgaggcacacggctggaagctgccagtgggcaaagcgctccagccccagctggtgcagaagcatcacggagagactgctatggctctcacccagcgcacgctccccgttccaccctacatggcgcaaacacgctcccctaaaatggagtgaacgtttatagcggcaaagatggcagccagggtttgggtttggcactctaagaaactgacgccttggagttaaatcaaccaaaatgacttttagtttagtttttttgttgctaacagtttccttagtttctgacttttctctggtgaagagcacagtatcaatcacacttcaaaataacaagtcaggaaacaggaacctctcactcagatcctcaccctgttaaaaagacttttgtagtttggatatcatgacctgtactaagtacaaagctctatttgtttctactttgtaacacagagtgttatgttctatggttgctacacaatcactttgaggaaacattactataaaaataaataagtttcttttttcattcaaagcgagggaaaataacaaggacgccctaaatacacccacaaaccttttccaagaacacttgcatttgttcctgagctggtaagaatgctttgctgatgatatcaaagccctttaatttatctacaatcgacctgacttaaacacaaaggaaaaaatactcattttgttctactttaaattaaaacaagctatttttgttgttgttgttactgggctgtctctgtttttctctgaacgcaggggaatacagtattctgaagcactgcatgattattctctcttggctgtggaagggtggccaagcacactattgatctctgagtgggattgttagaaggacaaagtgtgatttcactttgaaagtgattacaaacctctacttctcactaagatagaataaaagtgcagtgcaggatttactcttctgcatcaaataagtaagaaa

SEQ ID NO: 76367 - DNA, 1811 bp, Homo sapiens
cccatgaacagccttaagtccccagacaaaatagcaaaacaggtcctggacgattcagcgcgaggtgggacacaacagggagggagaagtcagtatccaggggcactgcccggacccagaaggcggaggctgggatgtccccagcagaaacggacttccctggactccagcaggctctctgcggataagggattggagtgagtgagaggaaagaggaggacagaggcaaacttttctttctgcccagttctaggccatcaagggagtgaaggatccccaaagacataaggcagagctgggagaagaaaggagaggaggaaacaaaaaaaggaacaagaagtaaggatgaggagacaaaacaaatggcatggaacatgctagaagccttccaatgacttccccatgtggaaactgcacacccgggcatccctcccggctttctgtggatgggcccatccaacgcagctcttgttagaggagtgcacactcccctctactatttggtaagtgtttgtagcaagaccagtgcataggtgggacgtgatctgaaagtttacaagaaggaagtgaaaaaccacttgtgagattgtggggagaaaacgctgggagcccagagacaccacaggcgtcaagagtccagggaccatgcatggtggtttatcagtggcaaggagaccaaggtttgacccagcctgacctcgtagcacttcctcgtccagatggatgtgggcttgtcctcccatcacgcacctgtccaagctggctgcacctgcatggactgctctccactctgcaagggccaacacagctcacacccaccccgatgccagaggaaaccgaggcacacggctggaagctgccagtgggcaaagcgctccagccccagctggtgcagaagcatcacggagagactgctatggctctcacccagcgcacgctccccgttccaccctacatggcgcaaacacgctcccctaaaatggagtgaacgtttatagcggcaaagatggcagccagggtttgggtttggcactctaagaaactgacgccttggagttaaatcaaccaaaatgacttttagtttagtttttttgttgctaacagtttccttagtttctgacttttctctggtgaagagcacagtatcaatcacacttcaaaataacaagtcaggaaacaggaacctctcactcagatcctcaccctgttaaaaagacttttgtagtttggatatcatgacctgtactaagtacaaagctctatttgtttctactttgtaacacagagtgttatgttctatggttgctacacaatcactttgaggaaacattactataaaaataaataagtttcttttttcattcaaagcgagggaaaataacaaggacgccctaaatacacccacaaaccttttccaagaacacttgcatttgttcctgagctggtaagaatgctttgctgatgatatcaaagccctttaatttatctacaatcgacctgacttaaacacaaaggaaaaaatactcattttgttctactttaaattaaaacaagctatttttgttgttgttgttactgggctgtctctgtttttctctgaacgcaggggaatacagtattctgaagcactgcatgattattctctcttggctgtggaagggtggccaagcacactattgatctctgagtggsattgttagaaggacaaagtgtgatttcactttgaaagtgattacaaacctctacttctcactaagatagaataaaagtgcagtgcaggatttactcttctgcatcaaataagtaagaaa

SEQ ID NO: 76368 - DNA, 816 bp, Homo sapiens
tctgcagtaaacttttccctctttaagtaggaagaattctgtccacttgaaggttaaaaaaatgggaaccagtctctatttttttatttccttcctttcactagagatagctgcttcttttatgttttaattggagaacacagttcatttaaaatgttttctaagtagttattaggttttatttatatatgtatacacatacatgtacttttttcagttggctacttcaaatatttttaaatgatgtgctttatatgcagtacattaatgggagtaggtaggaagattacatttataacatgctatgcctgctgatgtctttggtatcacaaaaaactatataaaattagttaaatcaagtgtgttagaaagaaaaatattagtcaggatctccaataaaaagcatatacaaccaattctaaattttccaagacttttcccctcactgttggtcttttgaactagtttactaatattagcatttgaagttaggagtagagcaaaagagaaacagggggtgacacttattttgaatcaatatatgagaacatttaggtagaagggaggccagagacttaagtgattaaaataaacttaggagtttaactttcccttcagttatccattaccttgctacctttctcaatattttattttattattcttaatgacagtttggcaacaratgtgatttccttgccaaacccacttccaaaacatctatatacttctactcttttgtataatcctccaaaagaggataatcctccaaaagaatgccacaatgggaaagagtttccaagaccagcaaaatgg

SEQ ID NO: 76369 - DNA, 605 bp, Homo sapiens
ggtaagattctataagaaatgaaagggctagaaaaataactgtccagtgcctaagcaaattgagagagaccataggggaactaggacttcttggttggaaaagaaaattgcttttcatctgtctcttcagctggcaaaagagtcttaaagtaaaatatagcctgagacaaggatctaatcaaatacttgctttaagaccgtctattaagaccctggaaagaaacaggacagaaaacagcagatcctctaagctcaacaaatgtgctactaggagttttaagagcactgtctcacagtacttaacttgcccaaataaccatggttgaatctagagagagatctagctctaaaactattgtaggtgttgcttttggcccattagatttataagaaactcacaaaagttttgatggtactatattgacaaaaggatcaccagtttatactaaaagatattgagactattcaaaatgtaagaaaacctctaggtctctaatttccacaatctggaaacaggctaagaaagttgtttaaagcacacaggagtagccaagggggtagaaaagacaacccagayggtacagaacacagccttagaaaacaat

SEQ ID NO: 76370 - DNA, 706 bp, Homo sapiens
aggggcaaagaggcaaacagatacatatctatgttgggtgatgccaagtgccatgaagaaaaatagagcaggataaggggattaagagcaacccaagagtagagaacaaattttacagagtggtctgcaaaacctgacagggttgctatctgagcaggtgaagagtgagccatgcagatgtgtgggggaagaacattgyggttgggggattcaaggataagggtgctgaagtgggggagtgcttggtacgtttaaggactgacattgctggagagaaatgagcaaggaggagagaagaagcaaatgaaactagtaaagtatcagggctagatcatgccaggcactataggccactgaagaactttgcatttgaccctgaatgagatggaaaacattggatggatttaaacagatgagtttcatcatctgacttgcatttctggggtaggggagatacaggggaggaaagatgagctagtgggctagtgcagtagtccactgagagtggatggtggcttgtcagggaggtagtaagggagctgatgagaagttattggattctggatatattggaagatggtggtaacagatttgtggatgtcttacatatggaaggtaaatgaaagagaagagtcaagaacagcatatgcctctgtctgaactccagcagtggatgtggctgaagttgttttccaggagacactca

SEQ ID NO: 76371 - DNA, 686 bp, Homo sapiens
aggaagcaatgggagatagagccttctcccttaagcagcaggtagctgctgcttctctggcggtccacttcctacgagaaaagccttttgtgtctggactccagaactctgcttcttcccttttctctcctgctgaggagtagtatagcttcctgttgttgaaatctctggtttactccaccattcccttatgactcttaaagtctccaccacctgagtaagcaatactttgtattaaattccctgggctgtaaatatctgaaagggattttgttttttwaattagatcctaagtagaaagaaagcactactcttaccactttagagataaggagaaagttaaacgactttcccaagttcaaccagcaataagaggcagagtccaggtctgtctcctgactccaaatccaggcttttatccactgcctcatactgcctcccttagagactataacaatgaaaacataatacaaataaagacttttccaagatcatataaaagacatatcagattgtagaattttgttttcccctgtgtgcctttaaattgagatgagcttcttttgtttttattgttcttgggaaaagttaatgtattagctagattaggagaatgtaacacaagtacatatggatattagcctgacatttgacaaagtcattcacgatagcctactggaacaatg

SEQ ID NO: 76372 - DNA, 805 bp, Homo sapiens
caagaagatagatgaactaactttgcttcagtgattagagaatatttttttggagcaagaacccaaggctaccgcatttcgtagtgtaggttctgccctggacaagagcagcaggccaaaggggtaagtgggaatgaaatcaagcctcaaagccagtgcccaaccatatgcctggtgagggattgtctctacctagagaggatggggctcttttcagttttacaaaggcatcatctgagttgatcttgggccaaaagcaacatttgaggtggtgcttaaagaatgagtaggaataagccaggcagaattctgagtggtaaacttgtcataagtcatggaagcagctggcatgtctggggaaggatgagtttagtggtttagattttatctataggggttagagaattaacagtacttttaatcatgggagcactttaattcatgggaagtcaactctctcaggagtgtcgggtaaatggcagggggaacaggaaaaacccagaggagaggagatggtagcctttactatgacagcaaggatgggatggagaaaaggtcaaggaaccggcaaagaggttgtgaaggtgatgaaagggccagcgttgacttcaaggttttaactctggttaccagggraagacgtttagactggttggggtgggaagggtaggtgtgctaatgggcacagttgtaaacacaggaagtgaagggtctggtaggtggtaagaaagaggcagaggctgtaaaggcagtgttgtaaagcaccagcacatgtgatgtgtagttaaagccatgggcgtgaata

SEQ ID NO: 76373 - DNA, 595 bp, Homo sapiens
gctgggattacaggcatgagccaccacacctggtactgatttttaaacttcctgaatatttacccataagtattctgaataagtaactattctgacattgttgagtagcttatgatrtactgctaatatgctgttaatagagaaagcaagctataatgcacatacatacatatgtatgcctacatagaacactgtgggttttttcatttcatatataaatcttattccattaattagcttatatattaataactgatgagtctttgacatgtaaataaataaataggtaaatacatacatacatgcatagcctaaaatttcactgtgatacaatttaatttcgagtgttctttttggagtatacaaaaaaattccatacctcaggcttatttgaaatgtactatttgttaggtgacagtatcttcatataattttcaaattctgaagaattatagcttgagagattcttttattcttccacagtaatgacatgcatcacttaacagcaggaattttaaactacgtgtatttctttgcatttcttcacaagctccaacttaaaatattattgtgacaataaatatctttgcttcaa

SEQ ID NO: 76374 - DNA, 750 bp, Homo sapiens
cagatcatatggaaagaccacgtagaggagaacagaggtgctccagttggcagccctaattaagctcctagtggacagtcagaaccaactgtaagccattttggatgttctggatgtccaggttgaaccccccccagtgactgcagccccagggagtatcacatggagcagaagaactgactgagcctagccaacttgcagtgtcatgagagataatatagtcattgttttaagtaactacattttgggatggcttgtgatacagtagtagatacttaaaacatctcactattggtattatttgtgtccagttattcatgcctaccaatgacwtggaatcataactataagaacaaactagtagtgttagtgaatcactaaacagctcatgaatttttgtcctcacatttcctagtctgagtcatattattcaaaattccattctggatatcttgtataacacattccaggaatatgtgtaatatattccaagattctctgaatgtgtaactggaggattgtttaagaaactaagattacattttttaagagttggaaagtcagagaatctatgatctggtatgtctgggtctctccccatccgcagaagacacaaatgaaagctagacaatctgaaattatcctcctctctcttacatcaagaagcctagaaagtataataaaaagacactaataattaaaaattttggttgtgatcaaaaagatacaacatatttattataggcttac

SEQ ID NO: 76375 - DNA, 750 bp, Homo sapiens
cagatcatatggaaagaccacgtagaggagaacagaggtgctccagttggcagccctaattaagctcctagtggacagtcagaaccaactgtaagccattttggatgttctggatgtccaggttgaaccccccccagtgactgcagccccagggagtatcacatggagcagaagaactgactgagcctagccaacttgcagtgtcatgagagataatatagtcattgttttaagtaactacattttgggatggcttgtgatacagtagtagatacttaaaacatctcactattggtattatttgtgtccagttattcatgcctaccaatgacatggaatcataactataagaacaaactagtagtgttagtgaatcactaaacagctcatgaatttttgtcctcacatttcctagtctgagtcatattattcaaaattccattctggatatcttgtataacacattccaggaatatgtgtaatatattccaagattctctgaatgtgtaactggaggattgtttaagaaactaagattacattttttaaragttggaaagtcagagaatctatgatctggtatgtctgggtctctccccatccgcagaagacacaaatgaaagctagacaatctgaaattatcctcctctctcttacatcaagaagcctagaaagtataataaaaagacactaataattaaaaattttggttgtgatcaaaaagatacaacatatttattataggcttac

SEQ ID NO: 76376 - DNA, 728 bp, Homo sapiens
tttcactagatcctgaatcacatcatcttttgtctcagctcctcaagattggctaataacaccttattgaaaaaatatatgaattagcaagggaaaactgaatgtgtcatgccagagtggtagcatacttccagtacttccatctcaccacatctttcagaaaataacacatgattctgttgctgtcaccagtgtacaaactgctgcttagtagggkttttacacaaatgaagaagcaatacaattcaaaagtcgtaagtataatggctcattacaatcagctgtgaactaaaacaggaacaaaacttgttgcactaacttttgcgatcaaattttagaaggttttggaaagaggggtgggggaagtggggacagggaaagacaaaaggggagtagagagagatgagaggaggcaagggagcaaagaaagggggaagggacagaaagagcagagaaagagagacagaatgagacagtgccattcaaataactttaaaaagtttagctcccaagctatattcttggactccaggagaaaaattaattgcaaggaaattgttcaaaattcaagtgtacataacccttttacctacaggaaattaatagttgccttacctatggactaaagccagaagttgaggaataagaatagtttgagattatacacaggcctacaaaaagagctagatgggaagtcaggatatgtgggtttcaggtatgacttcatg

SEQ ID NO: 76377 - DNA, 728 bp, Homo sapiens
tttcactagatcctgaatcacatcatcttttgtctcagctcctcaagattggctaataacaccttattgaaaaaatatatgaattagcaagggaaaactgaatgtgtcatgccagagtggtagcatacttccagtacttccatctcaccacatctttcagaaaataacacatgattctgttgctgtcaccagtgtacaaactgctgcttagtagggtttttacacaaatgaagaagcaatacaattcaaaagtcgtaagtataatggctcattacaatcagctgtgaactaaaacaggaacaaaacttgttgcactaacttttgcgatcaaattttagaaggttttggaaagaggggtgggggaagtggggacarggaaagacaaaaggggagtagagagagatgagaggaggcaagggagcaaagaaagggggaagggacagaaagagcagagaaagagagacagaatgagacagtgccattcaaataactttaaaaagtttagctcccaagctatattcttggactccaggagaaaaattaattgcaaggaaattgttcaaaattcaagtgtacataacccttttacctacaggaaattaatagttgccttacctatggactaaagccagaagttgaggaataagaatagtttgagattatacacaggcctacaaaaagagctagatgggaagtcaggatatgtgggtttcaggtatgacttcatg

SEQ ID NO: 76378 - DNA, 770 bp, Homo sapiens
ggatcctaccctcatccaataccagcaaagactttgaatccagtctctggacagtctaactatggtggttctcagggatctgggcagactcttaatagaccacctgtggcctctaatccagtgacaccttcgcttcatagtggtcctgctccccgaatgccattacctgcttctcagaacccagctactacaccaatgccttctagtagctttcttcctgaagccaacctgccaccacctttgaattggcaatataactatccatccacagcctcacaaacaaaccattgtcctcgtgcatcatcccaaccaactgtatctggaaatacaagtttaaccacaaatcatcaatatgtttcttctggatatccttcacttcaaaatagcttcataaagtcaggtagtattcttatagaagtgcttaaaatgtagaaatgtgaaacttttgcttatttagatgtttgaaataatacttgaaacctgaaaaccatatggaaaatgtgacttttaaaattattagtagttttttgttgttttttgtttttcggctttccagcaaaaaccagaaagcctgctagacaaattaagtaagctataacactcattagtagktttttttttcattcttttttctcttttttttttttttttttgagatggggtcttgctctgtcacccaggctggaaagcagtggcacaatctcagctcactgcaacctctgcctccctggttcaagcaattttcctgcctcagcctccagagtagctgg

SEQ ID NO: 76379 - DNA, 714 bp, Homo sapiens
taaaaaatattttcaaaactcttttactattaactcacaattttcaaatgttgtttcccagactcatgaaataacttcagatagatgtatgagggacctatagactacataaagacctatagactgtcatgagattctagatgtaaccttctcaggggcaggaagagcatctawttcattaacttgggacaaccctcagcacatgtgggttcttaaaaatgtttcctggtgtctctgatatccctaggctgtgtccatagacctatcagcctggtcaggacagagatctgtttcctcttttcatgaatgataaataatgtttttgggccaggcacagcattccaaacaaactgagaaagtcaggaggaaataaagatgagtgataactctgctcccaactttaagaagggaaaatcttctttgttgttgcattcatccatttatcccaacctaatgtacaatcaacttcttattccttaattctgacgtgagacatgtatctctgagtctccaggggcattactctcctcttctcctaggtgggaggtgtgtgtctctggcacgtgtattatggagttattacaaatggctgcttggctgtgcagctgtgtaactcttgccttgctcttccaaacacagctaccttatcttttcttgcctcctcctccctgaagctattaccttattttattttattttttcaggttaaacagc

SEQ ID NO: 76380 - DNA, 1168 bp, Homo sapiens
tgcatatttaacaaaaaaggatgacttgttattacatggggggaaacttatttccatctataacagttagaaatctatgttgacagtgacagaaataaatgattaaaaccagtttggacagtcaaataaatttatggcttcatatactgaaggttcccatagaagtttaatatctgatatccaattcttgagtcgttttcaggttttcaccaggkagagatatcttttttcttcctttctcagatatgcttctttggtgttaacctccaagaagacgtcaacctttttttgagctacttttaggttctattctagtttcaaaagccccagaaattctgaccaattgactgtgaccatctggaaatacatcatgttcttaatgttctcaatcttaaattatggtcaagagaatggtatgtacatattggattacaattattaaacactgagggccttcacctgaaaattgggagcattctcacccaaacacatgctggaaaagctagtccaacttggtgggggagggagacacagacagcgagagtgagcagagagagagagagaaagaagagaagagagagagagaagtgaagaggagaggagggggaggggaggagaagagagaagacgagaggagagaagacaagaggagagaagacaagagaagaggagagaaaatgcactgaatggatactctggagaggcaacagccaatcggccaacctgaaaatctgccaattcaatttgacagctgccaatccaagggggttcaggaaaaacaaaacatgttttaatgagaaaacaatttcagttactgaaaagatatacacaagataaatggcctgcaaaaacagaatttctgaaagctctgtgatactatcagccttccaatttttatgttgtttgctttttggcaccagcaaagtcaaaataaagagtaattgaaaacttggttatttaaagtacaaaatagagaaataggggttctcccccgccaaatattgtgtattttatagttacagtctatttatacaaaaatatattccacaggtgaatgattcaattatttgcacatactaaaactataaatttgatatgatttcacaactggagggtaaaaattatggtctgtttaccagcaacttatgtaaccatataacattgagaa

SEQ ID NO: 76381 - DNA, 1168 bp, Homo sapiens
tgcatatttaacaaaaaaggatgacttgttattacatggggggaaacttatttccatctataacagttagaaatctatgttgacagtgacagaaataaatgattaaaaccagtttggacagtcaaataaatttatggcttcatatactgaaggttcccatagaagtttaatatctgatatccaattcttgagtcgttttcaggttttcaccagggagagatatcttttttcttcctttctcagatatgcttctttggtgttaacctccaagaagacgtcaacctttttttgagctacttttaggttctattctagtttcaaaagccccagaaattctgaccaattgactgtgaccatctggaaatacatcatgttcttaatgttctcaatcttaaattatggtcaagagaatggtatgtacatattggattacaattattaaacactgagggccttcacctgaaaattgggagcattctcacccaaacacatgctggaaaagctagtccaacttggtgggggagggagacacagacagcgagagtgagcagagagagagagagaaagaagagaagagagagagagaagtgaagaggagaggagggggaggggaggagaagagagaagacgagaggagagaagacaagaggagagaagacaagagaagaggagagaaaatgcactgaatggatactctggagaggcaacagccaatcggccaacctgaaaatctgccaattcaatttgacagctgccaatccaagggggttcaggaaaaacaaaacatgttttaatgagaaaacaatttcagttactgaaaagatatacacaagataaatggccygcaaaaacagaatttctgaaagctctgtgatactatcagccttccaatttttatgttgtttgctttttggcaccagcaaagtcaaaataaagagtaattgaaaacttggttatttaaagtacaaaatagagaaataggggttctcccccgccaaatattgtgtattttatagttacagtctatttatacaaaaatatattccacaggtgaatgattcaattatttgcacatactaaaactataaatttgatatgatttcacaactggagggtaaaaattatggtctgtttaccagcaacttatgtaaccatataacattgagaa

SEQ ID NO: 76382 - DNA, 1168 bp, Homo sapiens
tgcatatttaacaaaaaaggatgacttgttattacatggggggaaacttatttccatctataacagttagaaatctatgttgacagtgacagaaataaatgattaaaaccagtttggacagtcaaataaatttatggcttcatatactgaaggttcccatagaagtttaatatctgatatccaattcttgagtcgttttcaggttttcaccagggagagatatcttttttcttcctttctcagatatgcttctttggtgttaacctccaagaagacgtcaacctttttttgagctacttttaggttctattctagtttcaaaagccccagaaattctgaccaattgactgtgaccatctggaaatacatcatgttcttaatgttctcaatcttaaattatggtcaagagaatggtatgtacatattggattacaattattaaacactgagggccttcacctgaaaattgggagcattctcacccaaacacatgctggaaaagctagtccaacttggtgggggagggagacacagacagcgagagtgagcagagagagagagagaaagaagagaagagagagagagaagtgaagaggagaggagggggaggggaggagaagagagaagacgagaggagagaagacaagaggagagaagacaagagaagaggagagaaaatgcactgaatggatactctggagaggcaacagccaatcggccaacctgaaaatctgccaattcaatttgacagctgccaatccaagggggttcaggaaaaacaaaacatgttttaatgagaaaacaatttcagttactgaaaagatatacacaagataaatggcctgcaaaaacagaatttctgaaagctctgtgatactatcagccttccaatttttatgttgtttgctttttggcaccagcaaagtcaaaataaagagtaattgaaaacttggttatttaaagtmcaaaatagagaaataggggttctcccccgccaaatattgtgtattttatagttacagtctatttatacaaaaatatattccacaggtgaatgattcaattatttgcacatactaaaactataaatttgatatgatttcacaactggagggtaaaaattatggtctgtttaccagcaacttatgtaaccatataacattgagaa

SEQ ID NO: 76383 - DNA, 707 bp, Homo sapiens
catcagaccctttgtcttmcacagctccagcatccttcatggtttaggaacatcattccttccccttactctctcagacctaagggtggcaatgacttcccactgttgctaatctctaaggtgttttatctccttggcttccttagtcttggcccacacaaataattccttcatttaccactctttagttaaactctttgaatatgccatctctttcttgccagcaaggaacctgactgcatctaataatgaaaagttccctggctgtgttttggtagaagagggaagtagtaaagctactcctaactataccttcattcagtacatattgagtatgtaagatatgcaatgcactgtgctctctgctataatagctacaatgctgcataaaacatgacttctgttctcaagggaatagttaaacaaaggggaaagtaacataaatttttctgtttattctgatgtcaaaaggaatggttatttttgtctctatattggctgagatccccaaatctgagaacaaaggatattagtaccttttcacaataaaaaaatgtgtcagaacatccttatagaactttgtaagagatgacccccaaaatatcaggcaacacttagccatcactcattttcagagtacataaggataggggagaaagaagatgtcaagagaatcttactggtacctactacaatgttttataaat

SEQ ID NO: 76384 - DNA, 875 bp, Homo sapiens
tcaagtaaaagttttgtcctgaagaataagaaaagacattaaatttcatagagatgagagataagtcaactaaactactactgaattaaatatgttccagaaaacattaacactggtgcattttatttgagtagaggtattcttaagggacctttaatatgaagaaataaaatataagtgcttcatattttcctatttagatgattatctccatgagtcatttaaaaatgaattcagagacaattgattcacatgtcctcattttaccaatattgggaaatgattagggagtgtcatgaaaaggaaatcatgttgaagataacatattagctattccactgcaaagtcctttcaaaaataatgaaaaagattctgtaatggagacagtaraagtagaacaactgtgcaacaatttttctgcaactaatctgcttctcaatgtctaacattgtgcctagcatatattaggcatccattaagtatgggttgaataaatacatgtgatcacataaaatttatccaggaggtgaggagttaattaaatgacattgtactttatcaagtaataatatcattataacagatgactttggtgaaatgagaataattcaaagatgctgctaattcagaatgaaaaataataccataaaatatggaaagaatgaggaaggaagcatttaaagaagattttgttttaaacactcaaaatcaagctgatatcatggggattcatttgtccaaaatcttttagtacatcactgaaaaggcagaacactagtaataaaagatgcgaaactgtgcaaacgttatatcccaatatcttagcatatcccatatatggaattatctataaatatagaaagaaaatttgcaaa

SEQ ID NO: 76385 - DNA, 839 bp, Homo sapiens
catttgaacataagtacccagaccatgtgctaggaaatgtgctccttgctacacacataccttctcttttaatcctcttaacaaccctggcaggtgaggttattctttacaaggtacaggtggggttattctgtataagttattcatacaagtttctgtatgaagaaacagagactgggggtagaggttgagtaaattgccaatggtcatcagagggtaagggacagagctccagatctgaaccaaaagctgattccagagcccgcgcttaacatctctgaactgcttatccacattctttggtggcctaatcttatttttatgatctttcagattcttctgactatgaaaaataactaacattaacaggaagagctgattttttaagcctcatttgcctggaggaaaataactaaggtaatgattctatttgtttattaagatgcctgttagaatgatccttttgctcctggaaaatcatttgggccaataacaagaatgggtgggcattttattctgagcttctttgatgatatctgctgcagttttcctgctgtgtgactttttttcccccagaaagccatagtactgccttattcctactttaaaaaatcattagtgtagttgcatcacagaagaaggaaaaaaaaaaacagacgtgtgagctgcccatgaaatagagtagtttgccacacatgagcacagcccttttcatgtgctgrctgtgagcctgtcctcatgctggggtggagaagctcattactgctcagagtaaccaagaaacagggcctggcaaagagtagagggagaccaaaggcccagagtgctcccaccaaatt

SEQ ID NO: 76386 - DNA, 732 bp, Homo sapiens
agaatcataatataagaactcttttctttcaaaaattttttgactagatttcacagatcattagcttaactctttgtatcaggtgcagacatttctcaatattgaagcagaactattccccaaaaagaaattttaaagtatatacttcaaataagtcagtgtccatttgtgccattaaaattggatggctttgtcagaccagctacttgggaggctgaggcctgggaggttgagaccacagtgagctgttatcacaccactgcagtctagcctgggagacagagcaaaaccatatctcaaaaaaaaataaaataaaaaaaggatgccttcatataagttgatccctgagtctctggggcccttgtgcctgtccatagtaaggtaatgaggatcctaaaaggctactccccagtgtacatgatagacaacttgaaaggcagtataatgcaatggaaaaaaagattagctttgcaaccgtaaagaaccragttcaaataaaattgtctccacttaaccagccgtactatcttcatgaagtcacataatctctctggggctcagctacttctacacctgtgaaatgggagaaatatctcactcgaatgttgtgaaaattaaacaagattccaaatataaactacttggcatacaatagatacctcataaatgttcattctctttctcccttcagagactaaaccctgattcttcatcagtttcagctcattgtgt

SEQ ID NO: 76387 - DNA, 713 bp, Homo sapiens
gtggcgagatcactctgaatatgtaacatatttgtaacgtgcgccgaggtgtgatgtgtgtgctgaaatagggggatgggggaattcgaagccggattgggaaggcgggggggaggcgcacagaactcacaatgtacttcgcaatctaacaatctgaacattcatttattaaaagctgctgcgtgacatttacactgagccaccagtctctgcctctaatccgggcgaaaacgattgtactgccgagttatggctgcagcgtatggggacgctgctgtccgcggccsgacagagcccatcagctacaacgcggaaggcctctgcacccccttgggggcgggaggaaagtactgccagtcctgcctgggggccgagggtaacaagcaccgagcctctcgctccacgcagggccagctgcccagctcagcgaagctcttgtgatctggtgcgtgtctctcgctcttccctccccatcaaagaagtaaactttctacctactccccctaatccgatcgtttagagctgctgttttccttttgtcagattcctcctccccgatcagtctgagtacacgatcagaactgctcagagagcaggaagcacattgatttcagcttgttctgtccacagacaggccctgacaaggttgttagaacagccggagaggtctatacaatcacttaattaccaaaactgtcagtcaggcgggacgc

SEQ ID NO: 76388 - DNA, 587 bp, Homo sapiens
tttctcacagttctagaggctgggaaggccaagatcaaggtgtcagcagataaggtgtctagagagggcttattttctggttcatagacagcagtattctccctgtgtcctcacgtggcagaaagaggaagcaagctctctcaggactctctttaaggacactaatcccatgcatgaaggctccatcttgtaacctcgtctaatcctaaataccttccaaagaccccactttctactaccattacattagaggggagcgaaatcatgagatagacatatgtttcaacatacgaattttgagcagaacacaaatattcagtccataacacccctctaaggtcagtgttacccctgtgtgtcytgttctacctttgtccttgtgtagtttaccagactaatgtttgcttccagtatcaacccagggctgctggccacattgttaaaaggtggaccagcattcagcttcctcccgcagttccagagaatcaggcccaaaatgatcaggaaagacatcagggcttgagtcatcatcctagaagccacagctgagaccatggatgagactgtcaaggtagaacctgaaaaaa

SEQ ID NO: 76389 - DNA, 1342 bp, Homo sapiens
tcccttaatgtgcacataattaccacttaggcttctaagcgaaatgatttgctaatggcaactaaaatgtgacatggcccagagtgaaaaaattgattcataacttgggaaggtttgactagattgcccttaggcaagtgcctagagggctttcctgtctctccctaaaccttgcttctgcwgttccaatgtacaaaatagggatagggttgttgtgaagattaaatgaaactagggcaggtcttctggacagatactattacagtgctgcaagcccttccttcagaatccttggcaccattacagttctacatttatttatatcatcatttgactactgtccctcagctgactgtacattccataaggacaggatttatgtcaactttttctcaacattgcttcaccacctcctcatagaacctggcatataaaagggagtcaacaacaatcttttgaatgaaatgtgtaagtcatttgcagtcactggtgtcagatccccgggtttgaatgctgtgtgcttggacaagtaatgtttctgcctttgtcttagttcctgctttctataaaggggagataataatggtatctacttgactgaatagttgtacaaatttagtgggataatacttgcaaagagcttggaacagtgtctggtacatagtgaggactcaatacatgctaatgaattttgatgatgatgatggtggcggtggacatgcaataagctcttcataaataatagctcttcttctaattgttattcacggtcatcattgaaacagtatttgcctcttgattatcagtcataggtggtccttagttacctaaaatatcacaggaccactgctttacctttccatgttatgccaggcacagacaacagaggcagtgtcaaaggagatacccaaatgatgtttacaatggtacacgggtctctagggtccaaggaaaagttaccaagtattttcccacctccctactttcatctccctcttacttcccagtcccttccccccatgcttgtatggtcttctggctttttgaccagtcctccctggggattttcaagtacccagcttgcaaatcagcctccccagaggatctgtctctactcatcatagtcaaaggatgtaatctgttctcatgtggaaataatttgttcagagaatgtaaatgatcaaagcctatatttctgtattcaggagaggaagagaaaataatagaaaagacttgaggctaactctaggtcctgcatttactaagtcacctctgataaattacttggtaaattatgtcttagaaaaaccattggtttggtaggaataatcaaaatgggatc

SEQ ID NO: 76390 - DNA, 1342 bp, Homo sapiens
tcccttaatgtgcacataattaccacttaggcttctaagcgaaatgatttgctaatggcaactaaaatgtgacatggcccagagtgaaaaaattgattcataacttgggaaggtttgactagattgcccttaggcaagtgcctagagggctttcctgtctctccctaaaccttgcttctgcagttccaatgtacaaaatagggatagggttgttgtgaagattaaatgaaactagggcaggtcttctggacagatactattacagtgctgcaagcccttccttcagaatccttggcaccattacagttctacatttatttatatcatcatttgactactgtccctcagctgactgtacattccataaggacaggatttatgtcaactttttctcaacattgcttcaccacctcctcatagaacctggcatataaaagggagtcaacaacaatcttttgaatgaaatgtgtaagtcatttgcagtcactggtgtcagatccccgggtttgaatgctgtgtgcttggacaagtaatgtttctgcctttgtcttagttcctgctttctataaaggggagataataatggtatctacttgactgaatagttgtacaaatttagtgggataatacttgcaaagagcttggaacagtgtctggtacatagtgaggactcaatacatgctaatgaattttgatgatgatgatggtggcggtggacatgcaataagctcttcataaataatagctcttcttctaattgttattcacggtcatcattgaaacagtatttgcctcttgattatcagtcataggtggtccttagttacctaaaatatcacaggaccactgctttacctttccatgttatgccaggcacagacracagaggcagtgtcaaaggagatacccaaatgatgtttacaatggtacacgggtctctagggtccaaggaaaagttaccaagtattttcccacctccctactttcatctccctcttacttcccagtcccttccccccatgcttgtatggtcttctggctttttgaccagtcctccctggggattttcaagtacccagcttgcaaatcagcctccccagaggatctgtctctactcatcatagtcaaaggatgtaatctgttctcatgtggaaataatttgttcagagaatgtaaatgatcaaagcctatatttctgtattcaggagaggaagagaaaataatagaaaagacttgaggctaactctaggtcctgcatttactaagtcacctctgataaattacttggtaaattatgtcttagaaaaaccattggtttggtaggaataatcaaaatgggatc

SEQ ID NO: 76391 - DNA, 514 bp, Homo sapiens
ccgagttcaagcaattctcctgcctcggcctcgcaagtagctgggattacaggcacctgccatgacgtccagctaatttttgtatttttagtggaggctgggtttcaccatgttggccaggctggtctcaaactcctgacctcaagtgatccgtctgcctcggcctcccaaagtgctgggattrcaggcgtgagccaccgcgcccggcggctggtctattcttgtccagacctgctcctcaattaagaaacactaaatgaagtctagaaattctctctatctctacttttaaaaacaacaacaaacaaaccagacatattccaatattgttactaccatctggtaaacacagttaagtcttccttactttgtactcaaaaggcttctagaattcaaaaggattatttttgaaatgaggatgacagagaaggtcctttggagaagttctttattaagaaagcaatgcagccgtgtggaaagaacacaggcttaaaatccagacacatctaaccct

SEQ ID NO: 76392 - DNA, 843 bp, Homo sapiens
ccaaaagaacaattttacatttacagtaaaattgtggtgatccaggcaacttcaaggaataaatgtagtcatgatgaagttccagcaagaagaaaatgtatgctcctaactttaactgtttctatggagatgtttttgcaatggtcttgcctccttcacctttgtactgcattataaacactaaggcatgaagcatggcagggctatgggtctccaggcccgttgcatggaaacagttggcatcctgtccccatgcagcaggcgccttagtgcttactgtggcactcgggtgtcctcaggggctgcagcctaaagtcctggtggcgattctcatctctctcccactcaccttacctccaactcgacaggtacaacaattctgcctgaagtctacatctcactgccccatwagcatttctgtcacctcttgctattttccaccagatgttccacaattcaacagtcctcggattcaaggtgtctttggagaagcccactttggggagaagttaaaagaaggtattgcaagaggcctcagtattccaaggcattctctggaagagcaccacacatacactttaggtagtgatatcaccgccttgtggcctctaaggatactgccgcttagtaatatagcatataaacaatgattccaattctttctctgtatctgccttacaaaccagaagaatgattggaagccaagattttcacctctgtgcaaaagtatagaaaaaatccacctaccagaagtttttcctcaacttccaacatgaaagcatagaatagtatctcccaaacacatatctttgctcacctgagcagtaccagcagcaacatcct

SEQ ID NO: 76393 - DNA, 662 bp, Homo sapiens
gtttgatatgaagaagggacttaatcttctttgctaagtctttctcagaaaacgcctgagttttcagtataaacaaatttaacttgtttgtgtccaatagaatagtttttaaaaagaaaaagaaacatggcccaatcacatactggactactgtatagcagctgaaagaagatacagctacctacattgacatggaagggtttccaagacataacacagagaaaacaagcagggtgatgaatactaggtaaacayacatggaaacaaaagccatacacactactttctgtgaacacctgtatacataggagcagcgccggaaggatacacacaaaattgacaacacttgttacctttaagagagaagctggattgaatggagttttttggcctcttttgctttgtatgaattctttttaaacaaaatctaagtgaatatattcctatattacttgatatattaaaaataaaatgttttaaaattttcccacagaatgggattttttggataacacaggcatgagacatgcacaagaaagttcttttcacttaaaaaagccaacaactcatttaaaaatatttattattctatgcctcagctgctattccatgcatgttatcattcctacatcatgcaccttctcctcaccccttcccgggat

SEQ ID NO: 76394 - DNA, 668 bp, Homo sapiens
agtatctaactctcatgtagtcatttgttatgacattttggacaaaggactgaataaaacattttaagttggtagattttgtttgtttgtttgctttgttttttgagacagattctcactttgttacccaggctggagtgctgtggcatgatcagggcttaccatagcgtcaacctccctggctcaagcaatcctcccacctctgttccccccaactaactgggactgcaggtgtccggctaatttttaaatttttgtagaggctgggtacggtggctcatacttaataatcccagcatcttgggaggctgaggtgggcagatcacttgaggtcaggagttcgagaccatccttgctaacatggcaaaaccccatctctactaaaacaaaaacaaaaacaaacaaaaggcatcaacaacaacaacaacaacaaattagctgggtatggtggcacacacttgtaatcccagctattcaggaggctgaggcaygagaatcgcttgaacctgggaggtggaggtggcagtgagctgagatcacaccactacactccagcctgggcaacagagtgagactctgtctcagtcagtcaatcagtcaatcaatatataaataagtttttgtagagacagggtctcactatgttgtctcgatctcctgggctcaag

SEQ ID NO: 76395 - DNA, 1839 bp, Homo sapiens
agccattagtataaatgtcttgcttataaatgatgaattctagggaggaaatcatgctattatttcaagggactctgattgttgtcctcttgtagtttgacatgaatcagtctgagctcctaccaattaaatatacattcttattatcataacaagatgaaccagaggctttcaaacatcaaaatatctgttggagctggcatacaataaactaaggttcacctgtccagatggttctggacatcaactttaggtataatatcccttccagcctcaataaagcattcaacaaagactccaaaatttaccgtacttgatgatgaatctcagtaggacattgataacccaaaggcactagccagtgagactgtattaaaacatgcaaataaatttacaggtattaatgatgatattatatccaaatttagaccagccaaagcaacacaccaatgagaaccaaacaggttttgcattagggctggtccccatctcctcccacttgcaagtagatctcaaagcagtgtttcctctacgctgctgggtgaacagaagcctagtgcccatgtaagccatgagctacagcctcccctaacctttgtgaccatggtgactatgcttgcctggcccacctactaggcctacttccttttaactcttcagccctacataactttctcagctagtttctatgggactgtttttcattgaattaggacttcctcactggtctcaccttgggcttccaggcttactggataatcctaccatggctactgagggcagatacctcaaaatctgaacaagatgagttcctgaaacctctaagatccattttgttttctctgaccactgagtctggcccagatttgattggagtttctcaccctccttcaatacttgttttgatgtaataatgctacccggttgtgtagyagacttttccgagggccctgacttggtgctgcttcagtctttcctcctaggcaaaagcttctatcagagcttgacctatgctaaactatattttaaatctagaaatgcattttataacagacaagtagaggctacttcccaacagcatcagtgatctggagcattttagatattcttacagataagagactggcagaaggtaggcattaacattctgtttgtagattcaagggcatgtcaagcttgaacaaatatgccttgcaaaatttattaaattgtaagccaggagtgtgttgtaaaagtcacatcacatggacttagttaatctttattattctgtaatgtaaaatatatgaattggatatattcagtgggcatagagccatagatctaaaaaaaaaaaaactcagtaatagcttttaaatgattctgctgtaataagtgtcaggaaaagttgattcttgttttagtttttcaacaatatgaaaaataatgtatcctggggtcctttgctaaagttgggagactatatagccacaatttccattgctgaaatgtcagtgtgaacacacagaattggctttttcagagaaaagcttccacttaaccttgtgaggggcctatgaaaatctcttggaaagggaaacagttcacagggagaatgaatgtttagttaaatcaccagaagagaccaattgtacaaagttgccaacagaaacactacctggttattatttaagaaaactggagtttccaagtaggatctattccaaaagttattacttttggaacccaccaagtttgaatattagaaaaaaaatatcttttgtttgaagaaataattggtggctgagctctggaggtagtataatttaaagcagtggtcctcaagtgttccagtgcctg

SEQ ID NO: 76396 - DNA, 596 bp, Homo sapiens
ggaaaaatgagtgtttattataaattgtactggcatgtaaacaaccttggcaacatagcaataccgtctccgcaaaaaaattaaaaagttagccaagtgtggtggcacacaactgtggtcccagctactcgagaggctgagatgggaggatcacctgagcctcgggaggtcgaggctggaggctgcattgactcatgattgcaccgctgcattctagcctggttgacagaacaagaccatctcaaaaaaaagaaagaaagaaaaaagctagcccccaagtatcacacaggaggtrgaggctggggatgagtctttaaattcctcacgtattaccataactcagattttctttcagtctatttctagatgtttctatagccccctagcctgggcacaatgctggcacattacagatgctcaatacacacaaataagcaaataagtacaatgaattaatagaaaggatgaatcccagttgcttgggaggctgaggcaggaggatcgtctaagtccaggagttcaagaccagcctcggcaatgtcgaagaccccccccccccaaaacaactcctctaaaaaagtccattcacaaactca

SEQ ID NO: 76397 - DNA, 495 bp, Homo sapiens
acacggtgaaaccccgtctctactaaaaaataaaaaaattagctgggcgtggtggcggatgcctgtagtcccagctactcgggaggctgaggcaggagaatggtgtgaaccccagaggcggagcttgcagtgagccragatagcgccactgcactccagcctgggagactgagcgagactccgtctcaaaaaaaacgataataataataattttgacaggacacaattcaatttataacgataacatatttattggtttgggggatcaggaggtggatacttgggggaagggggccatcacgctgcccaccacacctaggaaggtcacaggggcgtttgtgacttcatcctcctcttggtcccccacacaatcctcccactagacactcccgcatggtagctggagcagcaaacaactgcttagggatttgaagccaggtgtcctaacttcctccatgggcgctcagcctggggaacctcagaacacttgctcta

SEQ ID NO: 76398 - DNA, 495 bp, Homo sapiens
acacggtgaaaccccgtctctactaaaaaataaaaaaattagctgggcgtggtggcggatgcctgtagtcccagctactcgggaggctgaggcaggagaatggtgtgaaccccagaggcggagcttgcagtgagccaagatagcgccactgcactccagcctgggagactgagcgagactccgtctcaaaaaaaacgataataataataattttgacaggacacaattcaatttataaygataacatatttattggtttgggggatcaggaggtggatacttgggggaagggggccatcacgctgcccaccacacctaggaaggtcacaggggcgtttgtgacttcatcctcctcttggtcccccacacaatcctcccactagacactcccgcatggtagctggagcagcaaacaactgcttagggatttgaagccaggtgtcctaacttcctccatgggcgctcagcctggggaacctcagaacacttgctcta

SEQ ID NO: 76399 - DNA, 757 bp, Homo sapiens
gatcctaaaagagggtgataggctcagggggcttaagttcattcattaaagttaggatgaccaatacattsttacactattctcaaaaactttatggacttttctcccttttcaaaataatgttgacttgtgctatctgaaaacacttcctgcgtttcagactcagcctgcaatatgttaacagccaacagttgaacaatattctgtgtgtgcatttgtagcgcagtaaaccatttactcaaagaaacaaaaacccaaaacaacttcccgcctcccccaatgaagacagcagaagagaactaactgatttgtctgttgtctttcctgtcaagatcgccctcgcctttgctttggtcagcgggaaggactttatgtatgagtcatacaaatgttttgccagggcccggaggtcagcggactctggattcagctggtcgatatcactggagatctccgccaacagcttctccttctcggcctgtggcatccgcccaaacctgatggctatagaggaagaggaatgacaggatgaatcattggattactactgctctgaacacacactgtgctctcccagccctcgttcccacacagtagaagccctcctcctccactgctcttgagtcctggtttctgtctaccactttgctcatgtttttatttcacaaaagtagcacagaccatcagtaaaaattaaaccgttaactttcatttttaaaagttaatgcatactcctgctgagaaagtgaaagaattc

SEQ ID NO: 76400 - DNA, 724 bp, Homo sapiens
taatgagcatcactttctggagtttatgcccttctatagtcccctctcatattgaataaggattactttatggccaataaaatactcagaaaatgacagtgtgtgatgtcgaggcaatgtcataaaatacattgctgctttcaccttgggatctaggattgctcccactgggggaagccagccaccatgttgtgaggacacccaagcaaccctgtagatagattaatacacagaaaaattaaggcctcctgccaacagccagtaccaacttgccagtcatatgagagaaccaccatggaagtcgatcctctagattcaggcaacccttcagatgastatagcccagtccaacaccggattcaatcttattagagacttcaagcttaaaccaccagccaagccactcccaaattcttgagctacagaaacagaaataataaatacgtatttttgtttaaggccactgtgtttggaggggatttgtggcatagcaataaataactaatatattgggttaccctgatgctactgagtccaaatagtaaaattcctggattccaggaagcataggtccagtgagggagagattgggagcagatggaactatcaaagcctctcatgtccccacaagttaaaagtaggagatccttcaaccacttggttaaactgcatggcagtatccacaggaggtaaacatgtacaaatcctaacactcagaaattcc

SEQ ID NO: 76401 - DNA, 1091 bp, Homo sapiens
ctcccaaggagcaaccacataatccccgccagggctcagcccagacctctcccttggtgctcacagccatgggctctgaagggctttctgggtctgcgctcttcgctcatggtattccccagccctcttaggtcaggggcagaagttgctccacaagcagttagaaacacgccagaagaatgtggtgagttttctgagagccgctgagtagctgtgggccgattcatgactcagtttcatccacttcaggactccctgggaggcaactttcccccagttcacctctacctcyctgtggatcactgattaagcctggctctgccttcttcacaccctgggcctccagaggtgaccctctgtgaagcctaggcagggccaaagacaggccatcagcttcaaaggagaggagtgaggtctttgtttccttcacagcagtggtttttaaaccacagaagttgcttagaaaggcctctgggaactctcttggggaagactgcaggggatggaggccacaaggacctgtttctgtgtctgtattagtctgttttcacactactataaagacgctacctgatactacccaagactgggtaatttataaaggaaagaggtttaattgactcacagttctgcacggctagagagggctcaggaaacttacaatcacggcagaagtcaagagagaagcaaaggcatgtcctacatggcaacaggcaagagagacccaacgagcaaagagggaagagccccttataaaaccatcagatctcatgagaactcactcactttcacgagaatagcatggaggaaaccacccccatgatccaatcaccttccaccaggtcccgctctcaacatgtggggactatagggattacaatttgagatgagatttgggtggggacacagagccagaccatatcagtgttagatgagctaatgtgctgagggcatttcccagcacctaataagggtccatacatctcagctgttacacactgctagcagggggcaggatcttccagatgccaagggaagaactttacatatgttctccatgaaatcctactaaggtttctgcagaataggta

SEQ ID NO: 76402 - DNA, 1168 bp, Homo sapiens
cattgcaacatgataaggcaggtaacaactggatatgtttgataaataataaactgtccagtgtagaataagatttttattttatttttttgagatggaatcttgctctgttgcccaggctggagtacagtggcgtgatcttggctcactgcaacctccacctcctgggttcaagcaattctctgcctcagcctcccgagtagctgggattacaggcacctgccacgacgcctggctaattttttatttttagtagagatggggttttgccatctcagccaggctttcaccatcttggccagatggggtttcaccatcttgcactcctggcctcgtgatccacccacctcggcctcccaaagtgctgggattacaggcatgagccactgcacccaggctagaatacgatttaagatgtaataggaaaggatgttgtaacgcaggtctcaaatgtttggaagggcattgtgattgctagacttgcagatgcagatgaactgcgattctttatttacattartctacaagggtattaatcagtggctgtaaggatatttctgctcttttagaggaagatattatcgctgaacagtaatggagagtgttgatggaccattatggtaaagaatcgaggatatctgagaggcagggaaatgggtggtgcatgagggaaatttaagacagaaaggtcagtggtctacttggctggcagaagtgcacgatgagagtcaagaatgtaacagatcagtgaagcatcaaaaaaatctgacaatgagcttttggatctcaatagtggggaactgagattcaagacaactccagcaccttggaggaactggccagtatatcaagaaaagcctctggcatggtcaataaggtaggttcccaggaactagaagctgggttataagaaataaagattaaaatgttgacctagtaatggctaatacagtagtccccactcacctgaagtttccatttctacagtttcagttattgtggtccaaaatattacatagaaaattccagaaataaataattcataagttttaaattgtgcattttttctgagtattgttagaattgttctattttgctattatttatcaatctcttactgtgcctagtttaaattaaactttataataggtatgtctgtgtatatgtg

SEQ ID NO: 76403 - DNA, 1168 bp, Homo sapiens
cattgcaacatgataaggcaggtaacaactggatatgtttgataaataataaactgtccagtgtagaataagatttttattttatttttttgagatggaatcttgctctgttgcccaggctggagtacagtggcgtgatcttggctcactgcaacctccacctcctgggttcaagcaattctctgcctcagcctcccgagtagctgggattacaggcacctgccacgacgcctggctaattttttatttttagtagagatggggttttgccatctcagccaggctttcaccatcttggccagatggggtttcaccatcttgcactcctggcctcgtgatccacccacctcggcctcccaaagtgctgggattacaggcatgagccactgcacccaggctagaatacgatttaagatgtaataggaaaggatgttgtaacgcaggtctcaaatgtttggaagggcattgtgattgctagacttgcagatgcagatgaactgcgattctttatttacattaatctacaagggtattaatcagtggctgtaaggatatttctgctcttttagaggargatattatcgctgaacagtaatggagagtgttgatggaccattatggtaaagaatcgaggatatctgagaggcagggaaatgggtggtgcatgagggaaatttaagacagaaaggtcagtggtctacttggctggcagaagtgcacgatgagagtcaagaatgtaacagatcagtgaagcatcaaaaaaatctgacaatgagcttttggatctcaatagtggggaactgagattcaagacaactccagcaccttggaggaactggccagtatatcaagaaaagcctctggcatggtcaataaggtaggttcccaggaactagaagctgggttataagaaataaagattaaaatgttgacctagtaatggctaatacagtagtccccactcacctgaagtttccatttctacagtttcagttattgtggtccaaaatattacatagaaaattccagaaataaataattcataagttttaaattgtgcattttttctgagtattgttagaattgttctattttgctattatttatcaatctcttactgtgcctagtttaaattaaactttataataggtatgtctgtgtatatgtg

SEQ ID NO: 76404 - DNA, 1009 bp, Homo sapiens
tttccagaagataaacamacctgacatccatccgtgtcttcctatatgcaataggtgtctgactactgtttgccagacactgtgttgtatgagacataaaatactgtaagagacgcaatgcctttctccaaagtgtttgtagttaagtgcagatgcatcttccagcaatttcactactttgtgataagtagtgaatagggtcaaaaaattaaaaaaaagaagggtaatgaaagcacaaaagaaacacagcttagcctctgacagagtaggataagataaggcttgtcataagaagcaacttcagtaatattcttagaataattattcaggagaagaagaaaagcataggtaagaataaacagacaaaaagtcaagatgagggaaatgaataaagtcccagaaaatagaagaatggaaacaaagacacaggatgaataatgttcaagccatttaaggaacaacaacagcaacaacgaaccaaaaacccaactatacagcaaagaaatctcaaccaatctgagcagaaggaattaaatctaaagtgatggtaagttgaaaacacaaataagaagacaggagtaagtccaaagatatctatagtcacaaaaatgtgttcaggtaaatttcatctattgaaaaacatactgataaggttgtccaaaaggtagttgagtagttatggctaagaaagggttcagccttggtagtaaaataattggacaggctaaaagttaagagcttctcctgcaaccaagcatttgctctctttgttttacttatctgttccaataatgctgctacacctgggggccttattggacaaggtcttatagctccaactgtaggacagccattgagtaaaggtaatgggggaagacactcgaggtcagataataatgccttcatacaatatgtatctatttatctaggtgaccttgcaccaagataatacaagattgtttatattgatgataattttgtgagacatttttcttttctgctttttttc

SEQ ID NO: 76405 - DNA, 1009 bp, Homo sapiens
tttccagaagataaacacacctgacatccatccgtgtcttcctatatgcaataggtgtctgactactgtttgccagacactgtgttgtatgagacataaaatactgtaagagacgcaatgcctttctccaaagtgtttgtagttaagtgcagatgcatcttccagcaatttcactactttgtgataagtagtgaatagggtcaaaaaattaaaaaaaagaagggtaatgaaagcacaaaagaaacacagcttagcctctgacagagtaggataagataaggcttgtcataagaagcaacttcagtaatattcttagaataattattcaggagaagaagaaaagcataggtaagaataaacagacaaaaagtcaagatgagggaaatgaataaagtcccagaaaatagaagaatggaaacaaagacacaggatgaataatgttcaagccatttaaggaacaacaacagcaacaacgaaccaaaaacccaacwatacagcaaagaaatctcaaccaatctgagcagaaggaattaaatctaaagtgatggtaagttgaaaacacaaataagaagacaggagtaagtccaaagatatctatagtcacaaaaatgtgttcaggtaaatttcatctattgaaaaacatactgataaggttgtccaaaaggtagttgagtagttatggctaagaaagggttcagccttggtagtaaaataattggacaggctaaaagttaagagcttctcctgcaaccaagcatttgctctctttgttttacttatctgttccaataatgctgctacacctgggggccttattggacaaggtcttatagctccaactgtaggacagccattgagtaaaggtaatgggggaagacactcgaggtcagataataatgccttcatacaatatgtatctatttatctaggtgaccttgcaccaagataatacaagattgtttatattgatgataattttgtgagacatttttcttttctgctttttttc

SEQ ID NO: 76406 - DNA, 1252 bp, Homo sapiens
aagttcagagggtttgagtaactaatccaaaatcacataatatgaatgatgctaaagggcagttagagttaaaattagatcctttggaagccaaggtctgcaatctttttaaatcacctcaccatctcccatttatcttctggttaaatttggagagacattataaaaaggggaaacacatttataagttttctcattgccatcattaacagtggtgtaataatgacaaaataattaaaatttaattagttcttcctttgctgtcactccattgtgagcttatattctaatcttgcatcccctcaagcctaaatgaatctttgaaatgagggttgatttaaatcgatagtggaactttggctatagttactatttctttttttttttttttaattgaaatggagtctcattctgttgcccaggctggagtgcagtggtgcgatctcagctcactgcaacctccgttcgcaccaccccctgcaggttccaagtgattttcctgcctcagcctcccaagtagctgggattacaggcatgtgccaccatgtctggctaatttttgtatttttagaaagcatggggtttcgctacgttagccaggctggtcctgaattcctgtggccacccgctgcagcctcccaaagtgctgggattacaagcatgagccatcatgcccagcctatatagtcattatttcctgtagtgaaacaaaatgatgtccaatcttagatctatgtattaaatacccaaagatgagaggtccaatgctagtattggacctttttctctgttaggtacaggaaaattgaaattttgtggggaaaaaaaaaawaaatatatatatatatatatatatatatagccttgcctatcagtacatggcatatgctccaaatttatggaaatgcattggcattaaaggactagagctaatttgggtataacatcaggaaacacttaaggtctaatgtcctttattttgggaacatgaaggttggaattattgagacagctggaacattgagctctatattttccagagctccaagagacactcaattttgtttaactatagaacaagaccccaggtgatgctctaacctgaaaattagccaggatcaaatgaaactattatgtggtttccacagagtaatcaaccattgtgaaagacagtgtggcgattcctcaaagacctagagacagaaatatcatttgatccaacaatctcattactgggtatataaccaaaaga

SEQ ID NO: 76407 - DNA, 1252 bp, Homo sapiens
aagttcagagggtttgagtaactaatccaaaatcacataatatgaatgatgctaaagggcagttagagttaaaattagatcctttggaagccaaggtctgcaatctttttaaatcacctcaccatctcccatttatcttctggttaaatttggagagacattataaaaaggggaaacacatttataagttttctcattgccatcattaacagtggtgtaataatgacaaaataattaaaatttaattagttcttcctttgctgtcactccattgtgagcttatattctaatcttgcatcccctcaagcctaaatgaatctttgaaatgagggttgatttaaatcgatagtggaactttggctatagttactatttctttttttttttttttaattgaaatggagtctcattctgttgcccaggctggagtgcagtggtgcgatctcagctcactgcaacctccgttcgcaccaccccctgcaggttccaagtgattttcctgcctcagcctcccaagtagctgggattacaggcatgtgccaccatgtctggctaatttttgtatttttagaaagcatggggtttcgctacgttagccaggctggtcctgaattcctgtggccacccgctgcagcctcccaaagtgctgggattacaagcatgagccatcatgcccagcctatatagtcattatttcctgtagtgaaacaaaatgatgtccaatcttagatctatgtattaaatacccaaagatgagaggtccaatgctagtattggacctttttctctgttaggtacaggaaaattgaaattttgtggggaaaaaaaaaaaawatatatatatatatatatatatatatagccttgcctatcagtacatggcatatgctccaaatttatggaaatgcattggcattaaaggactagagctaatttgggtataacatcaggaaacacttaaggtctaatgtcctttattttgggaacatgaaggttggaattattgagacagctggaacattgagctctatattttccagagctccaagagacactcaattttgtttaactatagaacaagaccccaggtgatgctctaacctgaaaattagccaggatcaaatgaaactattatgtggtttccacagagtaatcaaccattgtgaaagacagtgtggcgattcctcaaagacctagagacagaaatatcatttgatccaacaatctcattactgggtatataaccaaaaga

SEQ ID NO: 76408 - DNA, 1405 bp, Homo sapiens
cacatataatatcaccaatttatttagatatgctgmtttactgtgtaccaacaaatctaccaggcattttacaagtgccatctcggggaggacatcacagcaacatttcacaaatgaggaattaataatttgactcagaccacaaggtaagggatgggcgagtaagaagcagggaaagaaagaagggaggtggaaaaaagggagacagagaagtgtgatatcctttaaaacctatttgttagaccgtctcccagtattctttcttaaaaacaccctgtagagtattaaatatctgagatcattaaatattccagataaatgatgcctttctctgtcacagcataatattcactttatcagcctttcatagcaactgtgccttagcaaaattaaaatgttctttataagcaaattcagctatgaaaataaacactcaccaatacaccctagtaatacatggcttagagtactctaatcccagctgcagtgtttagaattgcaggggcctcaaggcaagatgtgaaatatccttctgccaactcttctcaaccacatattgaggaaaatgaacctgcctctcaggattggtatgaagaatagcttataaaaatgagtgcgaaaccctttgcaaataccaaatgctgtatgaatgttaagtaataataaagatctgtataaatgcagcgaagcagcccaacctccaggtgctttttcaaactggacaccagccatttaagattcatccatcattcactttcgggcatccttttctttatgaaaaaataaaataggctgtctacattgcaaggaaatggaaaaatcgaatttcaaagcatataagcccctataccttgatcattcaaagtaatgggttctgttagtgagttaatgaagataatgttcgtgaagtaatgaaggggtaaaaatatcaattacaattatggctttgttttcttctcagaaagcacaagattctagctgcaagtagattttgaagacatgaagacatgtggtacacagccgctatcacagggcaggcattattcactgtgtctatccctaactcctccaagaactcacttgtcagtaatccccaagcattgtttgtctctatgttgaagaacaaggagggggtgaaatacagtgttcatgagcaacataaccatgatgattgtcatcctgcagccccttgcagcaagaatgatagaaaaagagagagaaagaaaaaaactcttccccagcaaaccatttcctccaaagacatgattcactaacatttgatttgacaagttgtaggcactcctaacattatttttttcccctttgctgttcatttggggagcaaagatttattgcctctcctgaataggacaagagatgcactagaaataagaatcaataaggt

SEQ ID NO: 76409 - DNA, 1405 bp, Homo sapiens
cacatataatatcaccaatttatttagatatgctgatttactgtgtaccaacaaatctaccaggcattttacaagtgccatctcggggaggacatcacagcaacatttcacaaatgaggaattaataatttgactcagaccacaaggtaagggatgggcgagtaagaagcagggaaagaaagaagggaggtggaaaaaagggagacagagaagtgtgatatcctttaaaacctatttgttagaccgtctcccagtattctttcttaaaaacaccctgyagagtattaaatatctgagatcattaaatattccagataaatgatgcctttctctgtcacagcataatattcactttatcagcctttcatagcaactgtgccttagcaaaattaaaatgttctttataagcaaattcagctatgaaaataaacactcaccaatacaccctagtaatacatggcttagagtactctaatcccagctgcagtgtttagaattgcaggggcctcaaggcaagatgtgaaatatccttctgccaactcttctcaaccacatattgaggaaaatgaacctgcctctcaggattggtatgaagaatagcttataaaaatgagtgcgaaaccctttgcaaataccaaatgctgtatgaatgttaagtaataataaagatctgtataaatgcagcgaagcagcccaacctccaggtgctttttcaaactggacaccagccatttaagattcatccatcattcactttcgggcatccttttctttatgaaaaaataaaataggctgtctacattgcaaggaaatggaaaaatcgaatttcaaagcatataagcccctataccttgatcattcaaagtaatgggttctgttagtgagttaatgaagataatgttcgtgaagtaatgaaggggtaaaaatatcaattacaattatggctttgttttcttctcagaaagcacaagattctagctgcaagtagattttgaagacatgaagacatgtggtacacagccgctatcacagggcaggcattattcactgtgtctatccctaactcctccaagaactcacttgtcagtaatccccaagcattgtttgtctctatgttgaagaacaaggagggggtgaaatacagtgttcatgagcaacataaccatgatgattgtcatcctgcagccccttgcagcaagaatgatagaaaaagagagagaaagaaaaaaactcttccccagcaaaccatttcctccaaagacatgattcactaacatttgatttgacaagttgtaggcactcctaacattatttttttcccctttgctgttcatttggggagcaaagatttattgcctctcctgaataggacaagagatgcactagaaataagaatcaataaggt

SEQ ID NO: 76410 - DNA, 1405 bp, Homo sapiens
cacatataatatcaccaatttatttagatatgctgatttactgtgtaccaacaaatctaccaggcattttacaagtgccatctcggggaggacatcacagcaacatttcacaaatgaggaattaataatttgactcagaccacaaggtaagggatgggcgagtaagaagcagggaaagaaagaagggaggtggaaaaaagggagacagagaagtgtgatatcctttaaaacctatttgttagaccgtctcccagtattctttcttaaaaacaccctgtagagtattaaatatctgagatcattaaatattccagataaatgatgcctttctctgtcacagcataatattcactttatcagcctttcatagcaactgtgccttagcaaaattaaaatgttctttataagcaaattcagctatgaaaataaacactcaccaatacaccctagtaatacatggcttagagtactctaatcccagctgcagtgtttagaattgcagggkcctcaaggcaagatgtgaaatatccttctgccaactcttctcaaccacatattgaggaaaatgaacctgcctctcaggattggtatgaagaatagcttataaaaatgagtgcgaaaccctttgcaaataccaaatgctgtatgaatgttaagtaataataaagatctgtataaatgcagcgaagcagcccaacctccaggtgctttttcaaactggacaccagccatttaagattcatccatcattcactttcgggcatccttttctttatgaaaaaataaaataggctgtctacattgcaaggaaatggaaaaatcgaatttcaaagcatataagcccctataccttgatcattcaaagtaatgggttctgttagtgagttaatgaagataatgttcgtgaagtaatgaaggggtaaaaatatcaattacaattatggctttgttttcttctcagaaagcacaagattctagctgcaagtagattttgaagacatgaagacatgtggtacacagccgctatcacagggcaggcattattcactgtgtctatccctaactcctccaagaactcacttgtcagtaatccccaagcattgtttgtctctatgttgaagaacaaggagggggtgaaatacagtgttcatgagcaacataaccatgatgattgtcatcctgcagccccttgcagcaagaatgatagaaaaagagagagaaagaaaaaaactcttccccagcaaaccatttcctccaaagacatgattcactaacatttgatttgacaagttgtaggcactcctaacattatttttttcccctttgctgttcatttggggagcaaagatttattgcctctcctgaataggacaagagatgcactagaaataagaatcaataaggt

SEQ ID NO: 76411 - DNA, 545 bp, Homo sapiens
gaaatatttggattgtaatgagattaattcagggagcatataatctagatgaaggatattaggaagagaaaaacagcaccaaaaaggatcttttatagagatttatttttctttgttccttttttgtctctcttcagaccccctttatttgaccaagaccrtcagtggcttggtatcaaaaatgacttcaagaaataaagactgaaaattaaaactccaaaaactgctgaaggtaaaatactagtgtgggaaggaaaagcaatgcagaattctcaggtacataaaagagaagaatttcttttaatttgtgtatctattaaaaagttaagaacttttagttctagctggatcataaaataagtgacatatttttactctggcaaagtaatattttctgaaaagcagaaagtgtaaatgctatttcatgtaatatgaccatttaggctattctgttctatattctggttcttagactcttctgttagtaaacctctttgagaacccaatgaaagctatggactctctctagaaaaatacacatgcat

SEQ ID NO: 76412 - DNA, 1316 bp, Homo sapiens
tacgcctggcccgcctcagccaatcagagggtgcggcgcccccgagtgggcgagccccaggggcgacgcaaggatcgaggcggcgagctattggacacggtggttacgcccccggcctgcgcccggctcgccggcccccgcagcctcggagtgacgtccctcaaagttctcattttggtcccccacttccccctccctttcgtcccccagctaaagaggggtagggagtgatgcaaatgttttattacctttgagagcttcatctgaactgtcaggcccggagggagagaggaaaggagagaaagagcggaggagccgcggagagggtcagtttggccagaggacaggacttagaagaccgaagcctgggaagccgcgaagaaaatgccagagaggagagtcaaaggctgagagtgagagggagagagggagcgggggtggggcgggggtcgccgggcccgtttgcagaagtggactgacgagcggcgccgaaacccagccgtcagacttttcacacttagtcttttgtttttctgtgtttttcctccccctttttcttttcaatattgcaactccagtgccccgtgggccagagggcaaggcgggtggaggtgaggacctgggagccgcggggatccgtggcactgccctttctggcgcagcagcccggggcagcgtgggcggaggaagcccgcacagaggctagatctcccgcgggctggatgcgctttctccccgggcacagtgagcgtcgaatgcgaatcagccgcgcgaccgaaagagcagagcatcccagtaagatcagaggagcgccacgggctgcacaaggcgtcctttgaacctccccaaagaaagcaagccacycccaccctccaacttcaaagtggagattcggcaactaactttgctacaaactctccggagccagcctgggttttgttttgcttatttcccgggggcagaagatgagaagtagcgcactttgaacagctaggaaaagtgaggaagagagaatagccagggatcgaatctaggactcgcggaacgaaaggactgcctagcccgccgggacgcctgcttttctcggcgagctgccgcctcccgcgtggagggtttggacatctctgctgcgcagctaggcgagcaactcccggcagcggcatttttggttcagttggcagctcgcctccgggcgcgccgagtgcctctccgctcgcgccctcggcgcttccggctcctctgagccccgcggggggcaccagccagcgccctcgctgcaaggctacggtctccggcgtggccgtgggatgttagcg

SEQ ID NO: 76413 - DNA, 746 bp, Homo sapiens
agggagtttttaacattttgacagaaatttttatgtgtcatgggaccatcatattttttcttcttcattattaagattgctttgcatgatttcagcttgtaagatcttttttcatggtctcaaactaccatacaaagtgaggactgctggcatattaaaaatggtgcccatacctctacaccacagaatactacrcagccataaaaaagatgagttcatgtcctttgcagggacatggatgaagctggaaaccatcattctaagcaaactatcacaaggacagaaaaccaaacaccacatgttctcactcgtaggtgggagttgaacaatgagaacacatggacacagagtggggaacatcacacactggggcctgctggcgggtgagggtctgggggagagatagcattaggagaaatacctaatgtaaatgacgagttgatgggttcagcaaaccaacatggcacatgtatacctatgtaacaaacctgcatgttgtgcaccatgtaccctagaacttaaagtataataataataaaaaaaagaaagaaaaaaaagaaaaacagagaaacataccagggaatgtgaggaagaggttacctactggaatgcctcatctctaattaagtattggaattaattatcctttgccaggtaactatgccaacttttagtctgtttaaaaaaaaaaataaacaggaaatggtaaaaaaaaaataaaaaagtgcccatataattaatattgt

SEQ ID NO: 76414 - DNA, 969 bp, Homo sapiens
taactttcacacagaatgtctccagatttatatgaaagggttatatggttctttgcaattctggtttatttgtcgtttgcccagatgttggtgtggaacaaaatggcacctccagtgcctacatgctagatcttgaattttatgatgacaacctaagatcaggaaggactgtggatgaggaamcattgatgggttttttgcagagtagtgccattgagagacttttattttaaataatctttgtggacttatggggatggagtaaaagaggatattttggaggccaaaaacaagtcaaaagctgtttcagtaggaggacttggatcagagcaggaacaatgggcatggagaaaagagactggattttagaaatagtagaggattgaatgtggctggtgatggagaaagaggaatcagaatgacaccaaagtttctagcttagatattgggctatgaaagacagtgccatgaactaagaaagaaaatcctgaagaaagagccagttttaagataaagataaaatctttcaaaccgtgatttcatttagcctgtattcctccatctgctctacaagaatatgataagaaagcttatgccaggatctattattcatagatgcagtatgtggccgtgttcccctgatctactaatctagtgattctattggaaaaagaaaatgaattttatttgacatgactaggtattggctgggctttgcatacctcttctgtacttctttgatcaatattaatcaacttaataagcacttgcagttggcaatgctttatatgctcattgtctagtgacaatgaattatagtatgaagattttacaaatgtttttcttttgttccggtttgtttttttctggtatgaatccatttattattattgttattaatttttttaaattgacacataataattgtagatatctatggagtacgtagcgatgttgccatacatgtaa

SEQ ID NO: 76415 - DNA, 1179 bp, Homo sapiens
gagtttacaacatgtccaggaggggcaacctgaaattaagaaaggctggtaatttagaattctgaattgcaggcaaaggcctcctctttcatgtaactttcagtaaagactgagagctaggatataatggactattccaacttggtatcagagctctcaaaggaaatgacataaaacagctattagaaggcaaaatgtaaaagaaaataggaagaattgacttttcagagctatttattttcactcagagatggagttgatattaaacccttatttatactgggtatgcaatcatacacattgttgagatctgggtctgattacacctatggcactatgcagtgtatttcagtgtaaacagagtaagtctgagtttgatttagagaaaaacaaaaaatacgctaaaaaaataaaaactacatgtgagggggaaatacttctcttttggcccctttgctcctgatcggtgagcatttttgcatttttcaaagacatcaaagggttgctacaaggcttaccttgctcacaggactttggatgtatcttctagtgctgctgagaagatgtgtcatgacaaggcacatccaccgtggtgtggtgtgtcaaacttgaatcactggacttgagaaaagaaggcagagtttgtgttctrtgctgaagatagcccatgtatttctctcagggaggaaaaagttttcaaggttaaaaaaattgagaaaatgggtaaagaaaaaaataggcttttaaaaaatatataaacatctgtaaaaatcctatcttaaaatatcagtaatacaagtaaattaatgtactagtagcaagattaccaatctaatgcaaagtctattcattgctcattcatgtgcttattcttttccacaaagtttttacaaggtggaatgacatgaagaatttgcttggaaaaatagatgatctaactttataagcatttctcaagtattcctctgctgccagaatttataatgaatctgcttactaccctggcctcagccaaattaattaataatttcctttctccttcccatgagtctcacagattactacaccttttttacccaagaagtcctatcctattgtatcctattatatctgcctgaaggaactagattcagctccatcaaacgtatacctttcaagaaaataatcttaaaagtgaat

SEQ ID NO: 76416 - DNA, 1179 bp, Homo sapiens
gagtttacaacatgtccaggaggggcaacctgaaattaagaaaggctggtaatttagaattctgaattgcaggcaaaggcctcctctttcatgtaactttcagtaaagactgagagctaggatataatggactattccaacttggtatcagagctctcaaaggaaatgacataaaacagctattagaaggcaaaatgtaaaagaaaataggaagaattgacttttcagagctatttattttcactcagagatggagttgatattaaacccttatttatactgggtatgcaatcatacacattgttgagatctgggtctgattacacctatggcactatgcagtgtatttcagtgtaaacagagtaagtctgagtttgatttagagaaaaacaaaaaatacgctaaaaaaataaaaactacatgtgagggggaaatacttctcttttggcccctttgctcctgatcggtgagcatttttgcatttttcaaagacatcaaagggttgctacaaggcttaccttgctcacaggactttggatgtatcttctagtgctgctgagaagatgtgtcatgacaaggcacatccaccgtggtgtggtgtgtcaaacttgaatcactggacttgagaaaagaaggcagagtttgtgttctgtgctgaagatagcccatgtatttctctcagggaggaaaaagttttcraggttaaaaaaattgagaaaatgggtaaagaaaaaaataggcttttaaaaaatatataaacatctgtaaaaatcctatcttaaaatatcagtaatacaagtaaattaatgtactagtagcaagattaccaatctaatgcaaagtctattcattgctcattcatgtgcttattcttttccacaaagtttttacaaggtggaatgacatgaagaatttgcttggaaaaatagatgatctaactttataagcatttctcaagtattcctctgctgccagaatttataatgaatctgcttactaccctggcctcagccaaattaattaataatttcctttctccttcccatgagtctcacagattactacaccttttttacccaagaagtcctatcctattgtatcctattatatctgcctgaaggaactagattcagctccatcaaacgtatacctttcaagaaaataatcttaaaagtgaat

SEQ ID NO: 76417 - DNA, 1337 bp, Homo sapiens
aaaaaagaattaactatttgataatgagagtctggaatacaaaaggacaactagcagccagaaaattttgagaaaatcatggaaatatatgaaatagttgtaatcagattaatgggattaaaaaagatcagacgatgcctactttcccttaaacagaggcttagacactccttccctgaggagcacccataaataaagctccaaacttgaagtcagaaaagtgctggtaattatttagagacccacagtgtgaagggccagaccagtaaggcctttcacctaccctctacctcctacctcctagcagaggcctctaggacaaggccttattattaacttaactaggcaaaaagttaaagctccaggcttattctctaaaaaattggttagtcagcctgaggagtatttctagagtggatattatggcctgagagaaaaacaaacaaacaaaaaacacttgaggaaatttaagagctacatatcagaaattaaatttttttaaaagccgatttttttttcaaaagtgaaatactttaaatttttctactacagagtaaaatgctccttgcattggcagttttgggatccagtctgttttctccatgcctgttgatatgccctgccactcacagttcacaatgagccaatcattcattcaacaaacatgacttgagtgattgtcaggcacagagcaggaaatgagatgaacatgtccctgcccccattgtgctaatactttagaggtgaaagacacacaataatcaaccaagtatataacatagaacaagccagtatataacatagaaattcaaattcggagaactgctaagatgaaaataatcaggaaaatgtgtgaggtagtagggggctacttcaaattgcacatcagaacaggcctttctgaactaagatctgcagcaggaaaagaaatcacttatgagaaaagcagggtgacagagcatcctgcacwgtgggagagaacacagctaaccagcactcctgtttttagggttgctgataattgattgcagaacttcacactgatatataagtaagcatttatgtagttttgtgtatgtgcatgtttttgccacaaaattacaaaaacgaaaagaaaaagaaacagacctagatgagtggaagggaaaaggtttctagtggacttctgtttgtttgccagcttttctttctgcccccttttgcttttccctttggggaactctcactctcccactcattggttcatggtagaattgttgaccacaatgtcttctgcccctgtgaagaagtgaatatacggcccaaataaatgctttctctaggagtttgaatcttaa

SEQ ID NO: 76418 - DNA, 1020 bp, Homo sapiens
ttaaatatggataatgcaatcggtgcacacagacaccccggagaagaaagagaaaagcaaaggcaatactcactgtctttggccagtcctcatggcctgagggtctttgccaactggatggtcagagaggctkcgggttaaggtgctctggggaaaaagtagatctttcttttagcagtcaaatcctcggcgagtgaagggcatgtgtgcatgaacacataggggcacacacacacatatacacacacaggcatgcacaacacacctcccaccacctgagccaggcagcaagcggccccgctgaaagctcttctctctgcttgtcacatccagtaaatactgaagcagcctacacccagcgggcagcggctcagctcccgggcacagtctgcacgcccatcctcattggcaggatgcagaaggtgcccctgagctgagctcagcctcactaacctgaagctcctctggctgcagctcagggagaagtccccacagcccacagctgcctccctctgcacccagaggctgtgcggggggcagcaaagaataggtattaactctttccagtcaccagtgagctaaaaatcaagtgtccaggggaccctcttctaatgagccccgctgctggctgaaggttggctgctgcaccgggagtggggagcgtaaagatcttgccccagacagctgctgacagcaggagccactccaaatcaaatctcctaatgagccaggaggaggggggctgtcttgctgggtgtgatgtgatgtgataaatgcagagagcaagaaagctacagggcaggtcacacatctaaattccaccccctttctctcaatttctattgtgctgcactaccaagccaaaccacacagccctgaaattagccctctctgccacatctcagctgtgccccttactctacagaggcatttctcccccagctcatctccactcccaccctaaccagtgccaaccacaccactccccacttcttaatgagaaatttccacctcctctgc

SEQ ID NO: 76419 - DNA, 1020 bp, Homo sapiens
ttaaatatggataatgcaatcggtgcacacagacaccccggagaagaaagagaaaagcaaaggcaatactcactgtctttggccagtcctcatggcctgagggtctttgccaactggatggtcagagaggctgcgggttaaggtgytctggggaaaaagtagatctttcttttagcagtcaaatcctcggcgagtgaagggcatgtgtgcatgaacacataggggcacacacacacatatacacacacaggcatgcacaacacacctcccaccacctgagccaggcagcaagcggccccgctgaaagctcttctctctgcttgtcacatccagtaaatactgaagcagcctacacccagcgggcagcggctcagctcccgggcacagtctgcacgcccatcctcattggcaggatgcagaaggtgcccctgagctgagctcagcctcactaacctgaagctcctctggctgcagctcagggagaagtccccacagcccacagctgcctccctctgcacccagaggctgtgcggggggcagcaaagaataggtattaactctttccagtcaccagtgagctaaaaatcaagtgtccaggggaccctcttctaatgagccccgctgctggctgaaggttggctgctgcaccgggagtggggagcgtaaagatcttgccccagacagctgctgacagcaggagccactccaaatcaaatctcctaatgagccaggaggaggggggctgtcttgctgggtgtgatgtgatgtgataaatgcagagagcaagaaagctacagggcaggtcacacatctaaattccaccccctttctctcaatttctattgtgctgcactaccaagccaaaccacacagccctgaaattagccctctctgccacatctcagctgtgccccttactctacagaggcatttctcccccagctcatctccactcccaccctaaccagtgccaaccacaccactccccacttcttaatgagaaatttccacctcctctgc

SEQ ID NO: 76420 - DNA, 1020 bp, Homo sapiens
ttaaatatggataatgcaatcggtgcacacagacaccccggagaagaaagagaaaagcaaaggcaatactcactgtctttggccagtcctcatggcctgagggtctttgccaactggatggtcagagaggctgcgggttaaggtgctctggggaaaaagtagatctttcttttagcagtcaaatcctcggcgagtgaagggcatgtgtgcatgaacacataggggcacacacacacatatacacacacaggcatgcacaacacacctcccaccacytgagccaggcagcaagcggccccgctgaaagctcttctctctgcttgtcacatccagtaaatactgaagcagcctacacccagcgggcagcggctcagctcccgggcacagtctgcacgcccatcctcattggcaggatgcagaaggtgcccctgagctgagctcagcctcactaacctgaagctcctctggctgcagctcagggagaagtccccacagcccacagctgcctccctctgcacccagaggctgtgcggggggcagcaaagaataggtattaactctttccagtcaccagtgagctaaaaatcaagtgtccaggggaccctcttctaatgagccccgctgctggctgaaggttggctgctgcaccgggagtggggagcgtaaagatcttgccccagacagctgctgacagcaggagccactccaaatcaaatctcctaatgagccaggaggaggggggctgtcttgctgggtgtgatgtgatgtgataaatgcagagagcaagaaagctacagggcaggtcacacatctaaattccaccccctttctctcaatttctattgtgctgcactaccaagccaaaccacacagccctgaaattagccctctctgccacatctcagctgtgccccttactctacagaggcatttctcccccagctcatctccactcccaccctaaccagtgccaaccacaccactccccacttcttaatgagaaatttccacctcctctgc

SEQ ID NO: 76421 - DNA, 1020 bp, Homo sapiens
ttaaatatggataatgcaatcggtgcacacagacaccccggagaagaaagagaaaagcaaaggcaatactcactgtctttggccagtcctcatggcctgagggtctttgccaactggatggtcagagaggctgcgggttaaggtgctctggggaaaaagtagatctttcttttagcagtcaaatcctcggcgagtgaagggcatgtgtgcatgaacacataggggcacacacacacatatacacacacaggcatgcacaacacacctcccaccacctgagccaggcagcaagcggccccrctgaaagctcttctctctgcttgtcacatccagtaaatactgaagcagcctacacccagcgggcagcggctcagctcccgggcacagtctgcacgcccatcctcattggcaggatgcagaaggtgcccctgagctgagctcagcctcactaacctgaagctcctctggctgcagctcagggagaagtccccacagcccacagctgcctccctctgcacccagaggctgtgcggggggcagcaaagaataggtattaactctttccagtcaccagtgagctaaaaatcaagtgtccaggggaccctcttctaatgagccccgctgctggctgaaggttggctgctgcaccgggagtggggagcgtaaagatcttgccccagacagctgctgacagcaggagccactccaaatcaaatctcctaatgagccaggaggaggggggctgtcttgctgggtgtgatgtgatgtgataaatgcagagagcaagaaagctacagggcaggtcacacatctaaattccaccccctttctctcaatttctattgtgctgcactaccaagccaaaccacacagccctgaaattagccctctctgccacatctcagctgtgccccttactctacagaggcatttctcccccagctcatctccactcccaccctaaccagtgccaaccacaccactccccacttcttaatgagaaatttccacctcctctgc

SEQ ID NO: 76422 - DNA, 1020 bp, Homo sapiens
ttaaatatggataatgcaatcggtgcacacagacaccccggagaagaaagagaaaagcaaaggcaatactcactgtctttggccagtcctcatggcctgagggtctttgccaactggatggtcagagaggctgcgggttaaggtgctctggggaaaaagtagatctttcttttagcagtcaaatcctcggcgagtgaagggcatgtgtgcatgaacacataggggcacacacacacatatacacacacaggcatgcacaacacacctcccaccacctgagccaggcagcaagcggccccgctgaaagctcttctctctgcttgtcacatccagtaaatactgaagcagcctacacccagcgggcrgcggctcagctcccgggcacagtctgcacgcccatcctcattggcaggatgcagaaggtgcccctgagctgagctcagcctcactaacctgaagctcctctggctgcagctcagggagaagtccccacagcccacagctgcctccctctgcacccagaggctgtgcggggggcagcaaagaataggtattaactctttccagtcaccagtgagctaaaaatcaagtgtccaggggaccctcttctaatgagccccgctgctggctgaaggttggctgctgcaccgggagtggggagcgtaaagatcttgccccagacagctgctgacagcaggagccactccaaatcaaatctcctaatgagccaggaggaggggggctgtcttgctgggtgtgatgtgatgtgataaatgcagagagcaagaaagctacagggcaggtcacacatctaaattccaccccctttctctcaatttctattgtgctgcactaccaagccaaaccacacagccctgaaattagccctctctgccacatctcagctgtgccccttactctacagaggcatttctcccccagctcatctccactcccaccctaaccagtgccaaccacaccactccccacttcttaatgagaaatttccacctcctctgc

SEQ ID NO: 76423 - DNA, 3009 bp, Homo sapiens
ctctctctgatgctgtttgattccaggtggcagagccagggaggagggggacaggcacaggggtcccacaggagggtccgtgctgagcgccaaacttcaagatgagcagggccagcctcaagggccacagacggccatctggcccctccctctgtgtgatctgtgagtctgtgggagatggtctggaactgtcagaactggaaaggttaatcgtgggcacacagaggagctgggttcagagaaagaaggaagagaatccactcatctctgcccttcgtgcagtgcctggctcaggataaggtggggtgaggacaggcccagagacaggacggggagcgggccaggcaaagaaaggagggaagagcagagaagggagagccactcatctcaccaccttcccacaatgcctcgtaatcacaggatgacagggatgcgtggcaggaagaaagacagggtgatgagcgctggggccaccctggaagggcagagcccacgcctcttggagcaccggccagtggcagggagtgagtgtggcagggctcccccaggcttccaaagaacagctgggtggcgtcattgctggaggcacacctctccattctcaagccaggcacaggtccctacaactcctcacccacattcccttcgttgacataaatgtgagtctatggaggagtcccccttcccagatagaaagactgccacactcgcaaggtccttcagtgcaaggctgataacaccaggacctacagcactcaggcccgagatgtgagggtcgaaaggacccccaaaggcagctccgcagagcacaagggcttggtgtgtggagtggctgaagcccagtcacaaactcaggtgtggttgagttcccactttatttccacaaaatcttctttactccgcagacagttcctgcactggtaagaaagtccacttggttgttgttcggggtcttctccccctcccagatctcaccaggacctgactcgtgactgtggctgccgagggactcactgcccaagcccacgtgaccttgtcatggagccacctctgcagagccctggccacctcctagagttctccttgtgggatccctgggcctcttttcccttcctagtgaggaggggactcacgagaatcttcctcccccatcccagtctgtcttctttcctgtcataatcagttcccttccagcctcactcaaggactcagcataaccactccctttcacaggcttccagctttgggaaaaggaaagtcaaaaggtagagatggctattgctggcaacttctgctttggtttggccataaatgtcccctcgggtaagaaaatgtgaagcctacttgcctctgccaggaggccatgggaatacacagctcaacaaatgaccctgccctgcctgcactttcccccaacagaggaaagggattcatagaggatcacattatagagctgaatcttgaacacaaccttggaagggttaaggttcaggggccaatctatccaaggtcatagcagagctgaggttctggtgccaatctattcaaggtcatagcagagctgaggttctggtgccaatctattcaaggtcatagcagagctgaggttcagtggccaatgtattcaaggtcataacaaggctgaggttaaggggtcaatctatccaaagtcataacaaggtcaaggttcagcggccagtctatccaaggtcatggcagagctgaggttcaggggccagtctatccaaggtcatacatctggaaaatggcagtgcagggatggaaacctaagtatgccttgggtatacccagcttcacaaagggaagggcagcatcctaaccagagcagcagtgaggcctcactacaggccagacactgtgctaagcactttatatgtaaccattccattcattatccctttgaagcacagagaggttaagtaaatgcccaaggtcacagagctgcaaggtggcaatgccaggacgtaaacccaggcagcctgacatcagtttgcaccacgctaactgggactccacagccttagtcatggtcctttaggagttagggaagagggggtgcagcaaatgacaggcatgagagttgccagcattacacagcatgaggtcctggtcatagtccacacctcccaggtaatatattacgtctgtccagttagacttcggaaggccacaacacacaccttaaggtaaatgaagggcactgggcactgtgataggcctttggggcacagttaggggatcccttaacccaatggcaggcagggcagcctggcagtggaatggcagggagggtgggtgygggcagagaggcttcagtagggctgagtcagtgagctgggccagcctggcggagggcagataagaagttgacaggtgaggttggtgttctgacccgctgcaggactacacagcggggctggtgagcccccaaggcatcaaacatctctacatccaagcccagcttctccggaagctgtctgctgctgcccctgcctggcaggcccaggggtcctgctggaaccctgaatggctgggaaggtggggttggagaggagagcaaaaactcccttccccctcaccattttttttttaagacagggtctcgctttgttaaccaggctggagtgcagtggcacaatcacagctcactgcagcctcagtgacctcccatgattaagaaatcctccttcctgcctcagcctcctgagcagctgggaccacaggcatgcgtcaccattcccccaggtaacttattattttttgtagaaatgagatcttacgttgttgctcgggctggtttcaaattcctgggctcaagcaagtctctcaccccagtctctcaaagtgctgggattacaagcatgagccaccgcactggcctctctcccccttgactccagacagatgtggtctgcgatataataggggagtgtggacacggggtcacccacctcctttctaggcctttgtggaggctgcaggagaggt

SEQ ID NO: 76424 - DNA, 3009 bp, Homo sapiens
ctctctctgatgctgtttgattccaggtggcagagccagggaggagggggacaggcacaggggtcccacaggagggtccgtgctgagcgccaaacttcaagatgagcagggccagcctcaagggccacagacggccatctggcccctccctctgtgtgatctgtgagtctgtgggagatggtctggaactgtcagaactggaaaggttaatcgtgggcacacagaggagctgggttcagagaaagaaggaagagaatccactcatctctgcccttcgtgcagtgcctggctcaggataaggtggggtgaggacaggcccagagacaggacggggagcgggccaggcaaagaaaggagggaagagcagagaagggagagccactcatctcaccaccttcccacaatgcctcgtaatcacaggatgacagggatgcgtggcaggaagaaagacagggtgatgagcgctggggccaccctggaagggcagagcccacgcctcttggagcaccggccagtggcagggagtgagtgtggcagggctcccccaggcttccaaagaacagctgggtggcgtcattgctggaggcacacctctccattctcaagccaggcacaggtccctacaactcctcacccacattcccttcgttgacataaatgtgagtctatggaggagtcccccttcccagatagaaagactgccacactcgcaaggtccttcagtgcaaggctgataacaccaggacctacagcactcaggcccgagatgtgagggtcgaaaggacccccaaaggcagctccgcagagcacaagggcttggtgtgtggagtggctgaagcccagtcacaaactcaggtgtggttgagttcccactttatttccacaaaatcttctttactccgcagacagttcctgcactggtaagaaagtccacttggttgttgttcggggtcttctccccctcccagatctcaccaggacctgactcgtgactgtggctgccgagggactcactgcccaagcccacgtgaccttgtcatggagccacctctgcagagccctggccacctcctagagttctccttgtgggatccctgggcctcttttcccttcctagtgaggaggggactcacgagaatcttcctcccccatcccagtctgtcttctttcctgtcataatcagttcccttccagcctcactcaaggactcagcataaccactccctttcacaggcttccagctttgggaaaaggaaagtcaaaaggtagagatggctattgctggcaacttctgctttggtttggccataaatgtcccctcgggtaagaaaatgtgaagcctacttgcctctgccaggaggccatgggaatacacagctcaacaaatgaccctgccctgcctgcactttcccccaacagaggaaagggattcatagaggatcacattatagagctgaatcttgaacacaaccttggaagggttaaggttcaggggccaatctatccaaggtcatagcagagctgaggttctggtgccaatctattcaaggtcatagcagagctgaggttctggtgccaatctattcaaggtcatagcagagctgaggttcagtggccaatgtattcaaggtcataacaaggctgaggttaaggggtcaatctatccaaagtcataacaaggtcaaggttcagcggccagtctatccaaggtcatggcagagctgaggttcaggggccagtctatccaaggtcatacatctggaaaatggcagtgcagggatggaaacctaagtatgccttgggtatacccagcttcacaaagggaagggcagcatcctaaccagagcagcagtgaggcctcactacaggccagacactgtgctaagcactttatatgtaaccattccattcattatccctttgaagcacagagaggttaagtaaatgcccaaggtcacagagctgcaaggtggcaatgccaggacgtaaacccaggcagcctgacatcagtttgcaccacgctaactgggactccacagccttagtcatggtcctttaggagttagggaagagggggtgcagcaaatgacaggcatgagagttgccagcattacacagcatgaggtcctggtcatagtccacacctcccaggtaatatattacgtctgtccagttagacttcggaaggccacaacacacaccttaaggtaaatgaagggcactgggcactgtgataggcctttggggcacagttaggggatcccttaacccaatggcaggcagggcagcctggcagtggaatggcagggagggtgggtgcgggcagagaggcttcagtagggctgagtcagtgagctgggccagcctggcggagggcagataagaagttgacaggtgaggttggtgttctgacccgctgcaggactacacagcggggctggtgagcccccaaggcatcaaacatctctacatccaagcccagcttctccggaagctgtctgctgctgcccctgcctggcaggcccaggggtcctgctggaaccctgaatggctgggaaggtggggttggagaggagagcaaaaactcccttccccctcaccattttttttttaagacagggtctcgcttygttaaccaggctggagtgcagtggcacaatcacagctcactgcagcctcagtgacctcccatgattaagaaatcctccttcctgcctcagcctcctgagcagctgggaccacaggcatgcgtcaccattcccccaggtaacttattattttttgtagaaatgagatcttacgttgttgctcgggctggtttcaaattcctgggctcaagcaagtctctcaccccagtctctcaaagtgctgggattacaagcatgagccaccgcactggcctctctcccccttgactccagacagatgtggtctgcgatataataggggagtgtggacacggggtcacccacctcctttctaggcctttgtggaggctgcaggagaggt

SEQ ID NO: 76425 - DNA, 1069 bp, Homo sapiens
tgcaatcatggctcactgcagcctcaaactcctgggctcaagcgatcctcccaccccagtgtctggagtagctgggactacaggtgcatgccaccatgcccagctaattaaagacaattttttttgtagaaacggggtctcaatatattgcccaggctggtcctgaactcctggcctcaagtgatcttcctgcctccgtttcccaaagtgttaggatgacaggcctgagccaccgcgcccagcctgcaggttctttcttgaagggaaacaccagcagccggcagtgtgcagcctcctgtctctctaagcactgtcctccacatacaacccatcttcctcctctctgctccttgctggtcagggccgctctccagctgtgctccctagactcctgcctttcagggccagctttcaggaccttgagggcagggtgctaggcataagccagtgatcttactagtggattctgtacgagggaaaagcctgcacaacccgaggggaccagaggaagcagaaccgcagctctcctcacgatcttgtggggacttgtgcaaattagcaccactcttctgggtttcccatggcacagcccgggtaattttccctagcgcctccagggataggatccaaaatgggaatttaggaggggccatatttcccccaaaggaatggcacacagagagcatagagctctggtggttgttgagggatttatgttccctccaccccgcgtcccccrggctcccagcacaactttgcctctcaatactggttgggtcccaggaaagggagcttgaagagggtttttttccagaatctgtcaggcctgagggtgctcgggagataagggggaggggctgggagagggctgggctgggacagtggaagagctcctgcatatgccacgctgggcggcccccctcccagctcctcccaggcacggtgatgcccatctgccattttggagcgtttgggcagtgcctgcagctcactctccccggtccagatggtcacccatccctccctccccgactctcccctgccctcacccccagccccactcagagca

SEQ ID NO: 76426 - DNA, 1069 bp, Homo sapiens
tgcaatcatggctcactgcagcctcaaactcctgggctcaagcgatcctcccaccccagtgtctggagtagctgggactacaggtgcatgccaccatgcccagctaattaaagacaattttttttgtagaaacggggtctcaatatattgcccaggctggtcctgaactcctggcctcaagtgatcttcctgcctccgtttcccaaagtgttaggatgacaggcctgagccaccgcgcccagcctgcaggttctttcttgaagggaaacaccagcagccggcagtgtgcagcctcctgtctctctaagcactgtcctccacatacaacccatcttcctcctctctgctccttgctggtcagggccgctctccagctgtgctccctagactcctgcctttcagggccagctttcaggaccttgagggcagggtgctaggcataagccagtgatcttactagtggattctgtacgagggaaaagcctgcacaacccgaggggaccagaggaagcagaaccgcagctctcctcacgatcttgtggggacttgtgcaaattagcaccactcttctgggtttcccatggcacagcccgggtaattttccctagcgcctccagggataggatccaaaatgggaatttaggaggggccatatttcccccaaaggaatggcacacagagagcatagagctctggtggttgttgagggatttatgttccctccaccccgcgtcccccaggctcccagcacaactttrcctctcaatactggttgggtcccaggaaagggagcttgaagagggtttttttccagaatctgtcaggcctgagggtgctcgggagataagggggaggggctgggagagggctgggctgggacagtggaagagctcctgcatatgccacgctgggcggcccccctcccagctcctcccaggcacggtgatgcccatctgccattttggagcgtttgggcagtgcctgcagctcactctccccggtccagatggtcacccatccctccctccccgactctcccctgccctcacccccagccccactcagagca

SEQ ID NO: 76427 - DNA, 1178 bp, Homo sapiens
attcctttctggaacactggcgattgtcgagctgaagaagattaaaacacagggggatactctgcccctccctctgcttgcctaatggtgatttataggaacaggtcttcctgccatcctccttgccttttcctgcctaatgaggggcttctttccaatgcttgcttatcaacttagagacagcagtgccagaagatctaggtgcagactttactcttcccataaatttaycttcccacattttgctgccttgtggaagcctgaggctgctctcttctttatcttgtcactatagaatttatgagtgttttaaaaaatactgtttaagcaaggcccctaaaccacagccttgagagagaaatattccctctcccctgtgatgggtacagcacacaccaatacatttttgctggtttttctcttgctaatctgaattttgtttataggagagcatctcagataagaagctatgagggaaagaaaagaaattatattttctcccctacattctatcttggctattgtgaataatgctgtaatgaacatgggaatgctgacatcttatcagcattgattcttgacttattttttttttgacattagccataaatgtcaaagatgatagcttagctctcttatacttctcccctaatcctaacatacacacaagtacacgtgtgtgcatacacaagcacatgtacacatgcagacacacacacttcccagattcccatcttttcaatatgattgtatcataatttttatctgtctcttattcagtattgacatgattatgattatataaatattgttcacagctgagccacctagtgtaccatgattatattttctttcttttgaacagctttttgtttttttcagctaataattgcttttccctctcatttgtttactctctatgaacttatgattaattcagcccctttgtccggaactataaacatttctctattgagttaaatacaccatgtaagcttaggttcctgtttcctggagccatttcttttgaaactttctgtccccctgctccctctgaactggttgcatgctaagcctctgtagatgtgtcatcaacaatgacagaataattcagataaacaggtttgcgaacaacagcctatgatggttaattttatgtgtcaacttgactcgccaag

SEQ ID NO: 76428 - DNA, 1194 bp, Homo sapiens
ctggcagtggatggctgagggtgctgcggggccgctggtttagaaggtcctcccctaccacttcgcttagaacccactatagaattcccttcctttgggtcttttaggtgttcttaaaaatacaagtccccctgagggggtaataatgccctaagtggttgtcattgactggaccgagcctgctggaaggaaaacactagagtaggtgcaggaggggttcctgagaggcaaatgaggcaggagggagagctggttactgtaagtgagccagttttgccagggaagtgagtgtggagaggagaggacagccaagcttattctgtgttcctctccaccctggctgccctgttctcctatgcagggccggccgccttccccatccctacccttgtgcaaataaaacgaggactgagatttatttaaaaaaaatttgctgagccctgtatgccaggccctaagcggcattgagggtgcagggatgaaccaaagcagtctctgtctccagggggatcctggtctgtggggggacacaggctgcaggactcagaaggacacatggctgcagggatgttggggaagggaggctgatgggtggaggcgtggaacagcagtgacagggacatgtgcacagaactgtgaaactatgagagacgtggctgggcaggscaaggaagctctctggaaggagagatcttccctcagtcttccagcatgagtaggcagaggcagatgaagaggcaggaaaggcattccaggttgagcgggcagcgtgaacaaaggaatggaaggggaaacatgtttggcttattctaggagagaaccagttgggtgctgctgggctggaaatggaggggctgtatgtggctggacaggcaggcaggggccatggggagctttggatgccaagccaagaagcttgagcttcattgtgtggtgttgctgggagtcctagaggggctttaagcaaaggagtgatgtgatcccattcacactttaggtggtctgtccctacccacattgccctagaggcagagaggtgagtggacattctcaaagcctatgtgcaatgaggcggggaaggggtttctgagcccctagcccagacctcctgaaggtctctccctgtgcctgggagctgggtgtcacatatgccccaccccataccctaagatgggagtcctggcctggaccact

SEQ ID NO: 76429 - DNA, 1194 bp, Homo sapiens
ctggcagtggatggctgagggtgctgcggggccgctggtttagaaggtcctcccctaccacttcgcttagaacccactatagaattcccttcctttgggtcttttaggtgttcttaaaaatacaagtccccctgagggggtaataatgccctaagtggttgtcattgactggaccgagcctgctggaaggaaaacactagagtaggtgcaggaggggttcctgagaggcaaatgaggcaggagggagagctggttactgtaagtgagccagttttgccagggaagtgagtgtggagaggagaggacagccaagcttattctgtgttcctctccaccctggctgccctgttctcctatgcagggccggccgccttccccatccctacccttgtgcaaataaaacgaggactgagatttatttaaaaaaaatttgctgagccctgtatgccaggccctaagcggcattgagggtgcagggatgaaccaaagcagtctctgtctccagggggatcctggtctgtggggggacacaggctgcaggactcagaaggacacatggctgcagggatgttggggaagggaggctgatgggtggaggcgtggaacagcagtgacagggacatgtgcacagaactgtgaaactatgagagacgtggctgggcaggcsaaggaagctctctggaaggagagatcttccctcagtcttccagcatgagtaggcagaggcagatgaagaggcaggaaaggcattccaggttgagcgggcagcgtgaacaaaggaatggaaggggaaacatgtttggcttattctaggagagaaccagttgggtgctgctgggctggaaatggaggggctgtatgtggctggacaggcaggcaggggccatggggagctttggatgccaagccaagaagcttgagcttcattgtgtggtgttgctgggagtcctagaggggctttaagcaaaggagtgatgtgatcccattcacactttaggtggtctgtccctacccacattgccctagaggcagagaggtgagtggacattctcaaagcctatgtgcaatgaggcggggaaggggtttctgagcccctagcccagacctcctgaaggtctctccctgtgcctgggagctgggtgtcacatatgccccaccccataccctaagatgggagtcctggcctggaccact

SEQ ID NO: 76430 - DNA, 1194 bp, Homo sapiens
ctggcagtggatggctgagggtgctgcggggccgctggtttagaaggtcctcccctaccacttcgcttagaacccactatagaattcccttcctttgggtcttttaggtgttcttaaaaatacaagtccccctgagggggtaataatgccctaagtggttgtcattgactggaccgagcctgctggaaggaaaacactagagtaggtgcaggaggggttcctgagaggcaaatgaggcaggagggagagctggttactgtaagtgagccagttttgccagggaagtgagtgtggagaggagaggacagccaagcttattctgtgttcctctccaccctggctgccctgttctcctatgcagggccggccgccttccccatccctacccttgtgcaaataaaacgaggactgagatttatttaaaaaaaatttgctgagccctgtatgccaggccctaagcggcattgagggtgcagggatgaaccaaagcagtctctgtctccagggggatcctggtctgtggggggacacaggctgcaggactcagaaggacacatggctgcagggatgttggggaagggaggctgatgggtggaggcgtggaacagcagtgacagggacatgtgcacagaactgtgaaactatgagagacgtggctgggcaggccraggaagctctctggaaggagagatcttccctcagtcttccagcatgagtaggcagaggcagatgaagaggcaggaaaggcattccaggttgagcgggcagcgtgaacaaaggaatggaaggggaaacatgtttggcttattctaggagagaaccagttgggtgctgctgggctggaaatggaggggctgtatgtggctggacaggcaggcaggggccatggggagctttggatgccaagccaagaagcttgagcttcattgtgtggtgttgctgggagtcctagaggggctttaagcaaaggagtgatgtgatcccattcacactttaggtggtctgtccctacccacattgccctagaggcagagaggtgagtggacattctcaaagcctatgtgcaatgaggcggggaaggggtttctgagcccctagcccagacctcctgaaggtctctccctgtgcctgggagctgggtgtcacatatgccccaccccataccctaagatgggagtcctggcctggaccact

SEQ ID NO: 76431 - DNA, 723 bp, Homo sapiens
cattcccaggttcctggacatggagacatttggggggccattattctgcctaccacaaggaccttgcatggatagataatgatgggatcccaggcatccaagagagtaatttccttcattctctgtagttcagggttaatagaacagtgctctgtcgggagggcaggtgtgctgggacagtgtatgttattggagccgtgtccctcttggaaggcacagcgtggctttcctgaggctgtgaagtttsagcagatctctgaaggatgtgttggcatttggcagggctggggctgctgggatcgagcctctctcaaggtctctgtgctcccaaggctcttgctgtccctgggctgctttggagggatcatttgctcacagctctgtccccactgctgggcatggacggctctcagaggagctgccgcctccacctctcctctttcccttcctcttccgtgggctccttttctctgcgggtgtggcctcccagccctctcttctccttaagggctggcacctttgtttctccctctctcctgttttcaacctctcctctctatcctgttggggctgcaacatattcacgtcattctatctcaaagacaaacacaccagcctccctccattcctcattcttctcatctctgaattctctctccttccctctccagcccagtttctgggagagctgtctgcacacacagagctcactcccacactctc

SEQ ID NO: 76432 - DNA, 1815 bp, Homo sapiens
tccctccatggaagaagggatgggcagaagagagtgtgggaggatgacagagagggagccgtcatcctggagcccaaagatttcaggcagtcactggttcttaactctggcacctgccaagtggagccgggcactcatcaccagatcttgctcctaaagtaatttaagatccttgagtgacagctgcaacattagcaggaagtattatttataccacattacattgaaggtgatgggagacaaccccagagcacagataacaaacacgggttctttgtggcaataatattaggttgaaaaaatatatattaacattcaagataaaggaaactacaaaatttacacttaattcaagccctcatttcctccccaacctacctgcttttcattcttccaattccttctcaaaccttcataatcattccagtcaacaactcctgagtactcaccaggtaggacattgggcatgagggatatatagatcaagaatgtcccaaccctcaaagagctacgtggccatacagctggccatgatatgttaagatatgtgttttacattatgatcctccaaacctgtgtttttcaacttttgtatgttacattgccatctagtacatgtgcatacactcttaactgaagtaaatgtttcaaaaagtaattgtcaccatcactatgtgtgatgtcctctgatatttcctatttctttttctgccagtgacccacccgacggatttcatgacccactaataagtttcagcctgagtttaaaaaacgttgactctgggggagcccgtaagaaagagtagtcagttcttactggggtgatcagagaaagcttcattaggagttgaatttgcactttgccttgaaaaataaaaaatgtttgagtggataaagtggccccaggagggcataattagagtgmagcattctcccaaatagatttagattataaataggcaaaataggcaagcccaaatatttaccatttgaaaaaaaaaaactacacatttaaaatccatttaactattttcactaaatctgaattcttagaatttgagaatgccaactaggcttagttagagacagtgaagaaaaaagtctaagttaaaacaactcaaaatatccttttccattcccagttctcttactaaatagctatgttatagaccatttctctagaagcctaactgtcctcacttaaaaaatgaaatggctttaaaaattggtgatttttttttttttttgagacagagtcttgctctgttgcctaggctggagtgcagtggtgcaatctcaactcactgcaacctctgcctcctgggttcaagccattctcctgcttcagcctcctgagtagctgggactacaggtgcccgccaccgcgcccggctaatttttcattgttttagtagagacagggtttcacagcgttagccaggatggtctcgatctcctgaccttgagatccgcccgccttggcctcccaaagtgctgggattacaggcatgagccaccgcgtctggccaaaattagtgatttttaaggccctttcctggtctaagctcttcaaggtgataacccagttaatatcacctccattttgctcaaggggagccaggctgccagagtttagataagtgtttaatcatgctttggctgtctacttagattcctttatcaggtaaaataatttcataaaagttttacaggaagtaaaactgtgtatgaatccagggtattcttatgcatcctagatttctgttggacatttatgcttatttcctccatgatatcttgttcttctatctctct

SEQ ID NO: 76433 - DNA, 1815 bp, Homo sapiens
tccctccatggaagaagggatgggcagaagagagtgtgggaggatgacagagagggagccgtcatcctggagcccaaagatttcaggcagtcactggttcttaactctggcacctgccaagtggagccgggcactcatcaccagatcttgctcctaaagtaatttaagatccttgagtgacagctgcaacattagcaggaagtattatttataccacattacattgaaggtgatgggagacaaccccagagcacagataacaaacacgggttctttgtggcaataatattaggttgaaaaaatatatattaacattcaagataaaggaaactacaaaatttacacttaattcaagccctcatttcctccccaacctacctgcttttcattcttccaattccttctcaaaccttcataatcattccagtcaacaactcctgagtactcaccaggtaggacattgggcatgagggatatatagatcaagaatgtcccaaccctcaaagagctacgtggccatacagctggccatgatatgttaagatatgtgttttacattatgatcctccaaacctgtgtttttcaacttttgtatgttacattgccatctagtacatgtgcatacactcttaactgaagtaaatgtttcaaaaagtaattgtcaccatcactatgtgtgatgtcctctgatatttcctatttctttttctgccagtgacccacccgacggatttcatgacccactaataagtttcagcctgagtttaaaaaacgttgactctgggggagcccgtaagaaagagtagtcagttcttactggggtgatcagagaaagcttcattaggagttgaatttgcactttgccttgaaaaataaaaaatgtttgagtggataaagtggccccaggagggcataattagagtgcagcattctcccaaatagatttagattataaataggcaaaataggcaagcccaaatatttaccatttgaaaaaaaaaaactacacatttaaaatccatttaactattttcactaaatctgaattcttagaatttgagaatgccaactaggcttagttagagacagtgaagaaaaaagtctaagttaaaacaactcaaaatatccttttccattcccagttctcttactaaatagctatgttatagaccatttctctagaagcctaactgtcctcacttaaaaaatgaaatggctttaaaaattggtgatttttttttttttttgagacagagtcttgctctgttgcctaggctggagtgcagtggtgcaatctcaactcactgcaacctctgcctcctgggttcaagccattctcctgcttcagcctcctgagtagctgggactacaggtgcccgccaccgcgcccggctaatttttcattgttttagtagagacagggtttcacagcgttagccaggatggtctcgatctcctgaccttgagatccgcccgccttggcctcccaaagtgctgggattacaggcatgagccaccgcgtctggccaaaattagtgatttttaaggccctttcctggtctaagctcttcaaggtgataacccagttaatatcacctccattttgctcaaggggagccaggctgccagagtttagataagtgtttaatcatgctttggctgtctacttagattcctttatcaggtaaaataatttcataaaagttttacmggaagtaaaactgtgtatgaatccagggtattcttatgcatcctagatttctgttggacatttatgcttatttcctccatgatatcttgttcttctatctctct

SEQ ID NO: 76434 - DNA, 1147 bp, Homo sapiens
taaaacataaggaggagtttaggggcccaaagcattatatatactcccatccttgccctttctatgtggctcctgaggcatcctagggctccataaaggataaagactattatatgatctctcaggycccttaaaataatattaataatacagctgtcttattccttgcttgggcacctgagttaactggtctctttgcttttagtctacaccatcttctataccatcagttttattcccagagactacagatgaccatattaccctgcttacaaactctaagggttccctaatacctacaaaataaaatcatactccatggtattatatttacagcctttcaaaacaagtgtaagcaacattctatcatatattttaataaaccaaatggcggactgttttccaacatgctaggttctttacatatttgtggacttctgcttatattgttttttctaaccattaatgctcttttaaatacctggagaaatcctgttcatttccatatgttcaattctaccataattttttctgtgaaacttctttaaatatactcccctcctctgtcccgtttcttcaaacttaccccctacaaatgggaatttgttccttccttctctctgttcccaaaacatttcatttaaatctaatttacaacatcttttcaatgaagatattatagtatacttgtttgagtatatgtctctctctgtactaagagaacagtgttaaaaggtatggacattaaatgcaggactcaatataaggtccggcaaagaataaacccttaatagctcttggatggaaataaaggatgatatgagattatgaatgtcctaaaggaatcaggcagaagaaaatctcttctcaattccatgagaactttcctaggtcttggttctctaaaccatggtgaaaatgaggatactagatattaagtgagtgactatttttggtgttgaaaattagagttctagaaaatatttcagatattataaaaattaatacatcataaaacataatgtccaacattttcttagccaattgcctagggttttatttttgttttgatgtactttttacttgtcttttataggtagagaatttttgttttgttttttaaaagtaaacatagcagcttcctccc

SEQ ID NO: 76435 - DNA, 1147 bp, Homo sapiens
taaaacataaggaggagtttaggggcccaaagcattatatatactcccatccttgccctttctatgtggctcctgaggcatcctagggctccataaaggataaagactattatatgatctctcaggtcccttaaaataatattaataatacagctgtcttattccttgcttgggcacctgagttaactggtctctttgcttttagtctacaccatcttctataccatcagttttattcccagagactacagatgaccatattaccctgcttacaaactctaagggttccctaatacctacaaaataaaatcatactccatggtattatatttacagcctttcaaaacaagtgtaagcaacattctatcatatattttaataaaccaaatggcggactgttttccaacatgctaggttctttacatatttgtggacttctgcttatattgttttttctaaccattaatgctcttttaaatacctggagaaatcctgttcatttccatatgttcaattctaccataattttttctgtgaaacttctttaaatatactcccctcctctgtcccgtttcttcaaacttaccccctacaaatgggaatttgttccttccttctctctgttcccaaaacatttcatttaaatctaatttacaacatcttttcaatgaagatattatagtatacttgtttgagtatatgtctctctctgtactaagagaacagtgttaaaaggtatggacattaaatgcaggactcaatataaggtcyggcaaagaataaacccttaatagctcttggatggaaataaaggatgatatgagattatgaatgtcctaaaggaatcaggcagaagaaaatctcttctcaattccatgagaactttcctaggtcttggttctctaaaccatggtgaaaatgaggatactagatattaagtgagtgactatttttggtgttgaaaattagagttctagaaaatatttcagatattataaaaattaatacatcataaaacataatgtccaacattttcttagccaattgcctagggttttatttttgttttgatgtactttttacttgtcttttataggtagagaatttttgttttgttttttaaaagtaaacatagcagcttcctccc

SEQ ID NO: 76436 - DNA, 717 bp, Homo sapiens
aaatacattttagtagcttccaagtraattcttttgtaaatggagtttctctccattcataagttttagagcaaaaatgaagccttagtgggtctagatatctggctaacattaactccctgtgtgaccttaaactggtcgtccccagagctttatgcttttatacaattaacttgaattacagcctctccttcttgcccataagaatgataataccacctgcattactcaacttttacgcttatgtgagacacctagccacctatcagaaggtattcaaatgcaaagcattaagtttttacactttaatgtgaagtggaagaaagtcttgattcaaatgcacaatctctacctttctactgattccacatttgctgtcttttactagtgcagttaagtcccaaattagaaacataagtcgccccaacatgtgacaaatgtcctttgttgccagagaaaggacagtggggctgtgtcctcagccttagcaaccagaagattctgcaagaccaggacattctcctgccagagcctgctttagtgtccagtcctgttctccaaagagatggaaaaaaccaagtggaaaagtttcagtttattcaatataaggctccacattcaaatggcaaaactgctctgttcaggtcatatttcaagcccaacctatgtcagtccttagtaaaagcttcaaagcaataccagtcctttcccagcctg

SEQ ID NO: 76437 - DNA, 717 bp, Homo sapiens
aaatacattttagtagcttccaagtaaattcttttgtaaatggagtttctctccattcataagttttagagcaaaaatgaagccttagtgggtctagatatctggctaacattaactccctgtgtgaccttaaactggtcgtccccagagctttatgcttttatacaattaacttgaattacagcctctccttcttgcccataagaatgataataccacctgcattactcawcttttacgcttatgtgagacacctagccacctatcagaaggtattcaaatgcaaagcattaagtttttacactttaatgtgaagtggaagaaagtcttgattcaaatgcacaatctctacctttctactgattccacatttgctgtcttttactagtgcagttaagtcccaaattagaaacataagtcgccccaacatgtgacaaatgtcctttgttgccagagaaaggacagtggggctgtgtcctcagccttagcaaccagaagattctgcaagaccaggacattctcctgccagagcctgctttagtgtccagtcctgttctccaaagagatggaaaaaaccaagtggaaaagtttcagtttattcaatataaggctccacattcaaatggcaaaactgctctgttcaggtcatatttcaagcccaacctatgtcagtccttagtaaaagcttcaaagcaataccagtcctttcccagcctg

SEQ ID NO: 76438 - DNA, 717 bp, Homo sapiens
aaatacattttagtagcttccaagtaaattcttttgtaaatggagtttctctccattcataagttttagagcaaaaatgaagccttagtgggtctagatatctggctaacattaactccctgtgtgaccttaaactggtcgtccccagagctttatgcttttatacaattaacttgaattacagcctctccttcttgcccataagaatgataataccacctgcattactcaacttttacgcttatgtgagacacctagccacctatcagaaggtattcaaatgcaaagcattaagtttttacactttaatgtgaagtggaagaaagtcttgattcaaatgcacaatctctacctttctactgattccacatttgctgtcttttactagtgcagttaagtcccaaattagaaacataagtcgccccaacatgtgacaaatgtcctttgttgccagagaaaggacagtggggctgtgtcctcagccttagcaaccagaagattctgcaagaccaggacattctcctgccagagcctgctttagtgtccagtsctgttctccaaagagatggaaaaaaccaagtggaaaagtttcagtttattcaatataaggctccacattcaaatggcaaaactgctctgttcaggtcatatttcaagcccaacctatgtcagtccttagtaaaagcttcaaagcaataccagtcctttcccagcctg

SEQ ID NO: 76439 - DNA, 600 bp, Homo sapiens
tggcctttggtaggagcgtttctatgagaaaacgtgtttcaagcatagaatttcgggatggccaaagatcttaaaagccctctagagctaactcctagctgatgtgggaaaacttttaacagtatccctgaaaggtgattcttgagttttggtcaagcaccttttgtgacaggaagtttattttgtctcatgatgtatgtactcagtaaaaatttgatgtataaacatatggatagagtgtggcaatatctttattacatctaactctactagagaattcatccttatatctaattgataactgcctccctgtaattcctactttcrttccctttaaaatagttttaaaaattataagctgttttacaaacaacaggaatatacaaagaataattaaacacttgtccatgtgttgaatatctaaatgttagaaaacattatttttagtttattttcctcaggtgaaaaaacaaaagttaccattacagatacagttgcaaccttcttagtatcctgcccagatcccagtcttctgactgtcttcctatacttaactattaagtagtttccccaaaatgacccaatgagaaaaaaggagag

SEQ ID NO: 76440 - DNA, 573 bp, Homo sapiens
cctggaggggcaaactccaggcttctcaccctggctttcaagatctccttgagacggctttttatttcccctcatctctgtggcctatttcaggacagtatgtgccctttgctttggcctggtgggcacactgccctttcgcttatgttccacctgcctggactgccttgtgttctccccactgcctatccaagctcaactcatcctttgagacaagctaaagtgccaattctctgtggtaccttctctggccacctctccttcctaatttttatagtttttactttttttttttmtgagacggagtcttgctctgtcacccaggctggagtgcagtggcatgatctccgctcactgcaacctctactttccaggttcaagcaatcatcatgcctcagccacctgagtagctgggactacaggcacatgccaccacgcccggctaatttttgtatttttagtagagacggagtttcaccatgttgaccgggctggtcttgaactcctgacctcatgcgatctgctcacctgggcctcccaaagtgctgggattacaggcataagccaccgtgc

SEQ ID NO: 76441 - DNA, 696 bp, Homo sapiens
cgaggagaccctgggaccccaggagtgcctggaaaggacgggcaggcaggacagcctgggcagccaggtacagtgtggagctccggtccccagtgtggcaagggctcaggatgaggcytgtgttccccagctctttctgtagatgtcaacctgtcagactgctttctttatggttctaggacctaaaggtgatccaggtataagtggaaccccaggtgctccaggacttccgggaccaaaaggatctgttggtggaatgggcttgccaggtaaactggatttagaagaggattctttagcatgtgtgcgtgtgatactggtagggcatgtctgcagaatgagatcctcttcagctgagacggacagaatccaggcacgtgtgtctttcacatgaattcacatccccagctctgaatggtctcctgctcagggatggatgacatttggctgacagaatggccattgctaagaaaactcaccatctaatggaataaaacatgggctgtatacagtcaacttttgatgatctccaagtgaccatccccttgtctaggatctccctaagagacgacggcttctccatccaggcttgtcagcctgagtagcttatggctccagagccctttgtgttagttcagaagaattctccggactcctctgctccaatcccggactagccttaatgctttgccatca

SEQ ID NO: 76442 - DNA, 696 bp, Homo sapiens
cgaggagaccctgggaccccaggagtgcctggaaaggacgggcaggcaggacagcctgggcagccaggtacagtgtggagctccggtccccagtgtggcaagggctcaggatgaggcctgtgttccccagctctttctgtagatgtcarcctgtcagactgctttctttatggttctaggacctaaaggtgatccaggtataagtggaaccccaggtgctccaggacttccgggaccaaaaggatctgttggtggaatgggcttgccaggtaaactggatttagaagaggattctttagcatgtgtgcgtgtgatactggtagggcatgtctgcagaatgagatcctcttcagctgagacggacagaatccaggcacgtgtgtctttcacatgaattcacatccccagctctgaatggtctcctgctcagggatggatgacatttggctgacagaatggccattgctaagaaaactcaccatctaatggaataaaacatgggctgtatacagtcaacttttgatgatctccaagtgaccatccccttgtctaggatctccctaagagacgacggcttctccatccaggcttgtcagcctgagtagcttatggctccagagccctttgtgttagttcagaagaattctccggactcctctgctccaatcccggactagccttaatgctttgccatca

SEQ ID NO: 76443 - DNA, 1067 bp, Homo sapiens
acagactccggcctgcccgcctcatagtccctgtgacgtctggctgatgagagctggctgtataataaagaacataagatccatttttattctgttgagaaagtaaatattctaggtagttaatgtatttcttccctgtcttataacatgatggtcttaaaggacgggagagacatttcctagcgtggctctgatgtgatctgggtgactgacgtgttctgggtcatgagccgattgatacatgagggatgtgcattcttgtatctcaatcttggctggttgtgggggattcacgttcttgtatctcattcttggctggctgtggaggcactttttcatttgtaataccagcactagctaagcccaaatcaagtttcaattgtttgtgtttataggaacacctggagagaaaggtgtgcctggcatccctggcccacaaggttcacctggcttacctggagacaaaggtgcaaaaggagagaaagggcaggcaggcccacctggcataggcatcccaggrctgcgaggtgaaaaggtaaccagcgctctgcgtggaaaggtccccttctcccagctcagtggagatgctgcctgagaaatgctcagcaaatatctcagcacactcaatgagccataacacacagggagtcccataaggcagcacaagtcgcctctccttccccttgtattcactacctctcccccaaggaagaatctagagactggtgagaggctaaggtgggagacagctgtcagtgggataaaacagagaggatggaggacgaagaggaatggcaggtagaaaccagatggttggctctactgctcttaagttttcctctccattcagaagtggactttgattctttgatgagaaatctggaaatggagttttgcaatgcaatattcattgcaccaaaatgtataccattatctataacatgcctacagatgcatgcccatggacaaatgtaaagttaatatgcctgacttttacttgcagggagatcaagggatagcgggtttcccaggaagccctggagagaagggagaaaaaggaagcattg

SEQ ID NO: 76444 - DNA, 1067 bp, Homo sapiens
acagactccggcctgcccgcctcatagtccctgtgacgtctggctgatgagagctggctgtataataaagaacataagatccatttttattctgttgagaaagtaaatattctaggtagttaatgtatttcttccctgtcttataacatgatggtcttaaaggacgggagagacatttcctagcgtggctctgatgtgatctgggtgactgacgtgttctgggtcatgagccgattgatacatgagggatgtgcattcttgtatctcaatcttggctggttgtgggggattcacgttcttgtatctcattcttggctggctgtggaggcactttttcatttgtaataccagcactagctaagcccaaatcaagtttcaattgtttgtgtttataggaacacctggagagaaaggtgtgcctggcatccctggcccacaaggttcacctggcttacctggagacaaaggtgcaaaaggagagaaagggcaggcaggcccacctggcataggcatcccagggctgcgwggtgaaaaggtaaccagcgctctgcgtggaaaggtccccttctcccagctcagtggagatgctgcctgagaaatgctcagcaaatatctcagcacactcaatgagccataacacacagggagtcccataaggcagcacaagtcgcctctccttccccttgtattcactacctctcccccaaggaagaatctagagactggtgagaggctaaggtgggagacagctgtcagtgggataaaacagagaggatggaggacgaagaggaatggcaggtagaaaccagatggttggctctactgctcttaagttttcctctccattcagaagtggactttgattctttgatgagaaatctggaaatggagttttgcaatgcaatattcattgcaccaaaatgtataccattatctataacatgcctacagatgcatgcccatggacaaatgtaaagttaatatgcctgacttttacttgcagggagatcaagggatagcgggtttcccaggaagccctggagagaagggagaaaaaggaagcattg

SEQ ID NO: 76445 - DNA, 1067 bp, Homo sapiens
acagactccggcctgcccgcctcatagtccctgtgacgtctggctgatgagagctggctgtataataaagaacataagatccatttttattctgttgagaaagtaaatattctaggtagttaatgtatttcttccctgtcttataacatgatggtcttaaaggacgggagagacatttcctagcgtggctctgatgtgatctgggtgactgacgtgttctgggtcatgagccgattgatacatgagggatgtgcattcttgtatctcaatcttggctggttgtgggggattcacgttcttgtatctcattcttggctggctgtggaggcactttttcatttgtaataccagcactagctaagcccaaatcaagtttcaattgtttgtgtttataggaacacctggagagaaaggtgtgcctggcatccctggcccacaaggttcacctggcttacctggagacaaaggtgcaaaaggagagaaagggcaggcaggcccacctggcataggcatcccagggctgcgaggtgaaaaggtaaccagcgctctgcgtggaaaggtccccttctcccagctcagtggagatgctgcctgagaaatgctcagcaaatatctcagcacactcaatgagccataacacacagggagtcccataaggcagcacaagtcgcctctccttccccttgtattcactacctctcccccaaggaasaatctagagactggtgagaggctaaggtgggagacagctgtcagtgggataaaacagagaggatggaggacgaagaggaatggcaggtagaaaccagatggttggctctactgctcttaagttttcctctccattcagaagtggactttgattctttgatgagaaatctggaaatggagttttgcaatgcaatattcattgcaccaaaatgtataccattatctataacatgcctacagatgcatgcccatggacaaatgtaaagttaatatgcctgacttttacttgcagggagatcaagggatagcgggtttcccaggaagccctggagagaagggagaaaaaggaagcattg

SEQ ID NO: 76446 - DNA, 715 bp, Homo sapiens
caggggggtttcttccggagaaatacctgacagcagggtgccctcctctggtggctgaggcagaagagaaacctttggacctttgtctttgtacaacccgccaccagcttcccctgataacctacgttgcatttgaacatttagtcaaccgcggcaacttgcggatcatcttaaacttagtgcaagactcaggagttagtaaatgcctaatggaatgggaatgaaagatttaatttatgattaaaaataccatgctttttcaagcatccccttgatggagtttgttccattttgagaatttccttctgggacaartagggaagttaccactgcccactaatgtccaaatcctccctctctggaaatatcatttgcagacaggggacaccggtggagccctgtgatttcatggccacctgcttgctttggagcctcacatctatgcctaaatccaggctgtttccaaggcaccttcaccctttattttaatcatctgtatctatcaaagcccagtgactcatgccatagtttaaaatgcttaatttactgtgaaaccttcattaatccaaaaaactaaataactggtgtccatgctagccctggaaccttgccatctcttaggaagaactccattaactactcacaaatcatatttggcattttaccggttactcagggccagtgctttgtcacaggcaccaggctgcagagttga

SEQ ID NO: 76447 - DNA, 762 bp, Homo sapiens
cattgtaccttcccaccctgtggacactaaggaacagattcatttgtctattgatctccagtccttagtatggtgactagcacgtaatactttgacaataagtaaatgagttccagatatttttcctaccatctggatttcttctctgatcaatccctgggtactccaaaatactagtcatagtttgttatccagaccaagtagtcctgatatttctgctcatgtgtacactggaccagaataacctaccagggagaaacctccaacctgacccttattctttatttgcctctctgctacatagcagacatatccatatgtagaacatttcaaactgaaaataccccattgtaaaactatacattcagttcttattctagaagacttataccccattgtaaaactataccttcaattcttattctagaagactttattgagttcccaaatgtaataaaaagctcttaatcactaaaaaactaatgtttgttgagaattaactcagaattaattcagtattgcagccctcctgtgtgccaatgctgaggatgcaatcatgagcaaaaacagtttctcttcttatggagtttcttccttactcaggagaatgtcattgatcaaataattgcattaataaaagtttaattacaaacrctgagaagtaccttcaatgaactgaagacaattctgtgattgtgtgtatcaaagaactgtgacttatatgaggtggagaagaggagggtgaaaggccatggtcaaatg

SEQ ID NO: 76448 - DNA, 762 bp, Homo sapiens
cattgtaccttcccaccctgtggacactaaggaacagattcatttgtctattgatctccagtccttagtatggtgactagcacgtaatactttgacaataagtaaatgagttccagatatttttcctaccatctggatttcttctctgatcaatccctgggtactccaaaatactagtcatagtttgttatccagaccaagtagtcctgatatttctgctcatgtgtacactggaccagaataacctaccagggagaaacctccaacctgacccttattctttatttgcctctctgctacatagcagacatatccatatgtagaacatttcaaactgaaaataccccattgtaaaactatacattcagttcttattctagaagacttataccccattgtaaaactataccttcaattcttattctagaagactttattgagttcccaaatgtaataaaaagctcttaatcactaaaaaactaatgtttgttgagaattaactcagaattaattcagtattgcagccctcctgtgtgccaatgctgaggatgcaatcatgagcaaaaacagtttctcttcttatggagtttcttccttactcaggagaatgtcattgatcaaataattgcattaataaaagtttaattacaaacgctgagaagtaccttcaatgaactgaagacaattctgtgattgtgtgtatcaragaactgtgacttatatgaggtggagaagaggagggtgaaaggccatggtcaaatg

SEQ ID NO: 76449 - DNA, 762 bp, Homo sapiens
cattgtaccttcccaccctgtggacactaaggaacagattcatttgtctattgatctccagtccttagtatggtgactagcacgtaatactttgacaataagtaaatgagttccagatatttttcctaccatctggatttcttctctgatcaatccctgggtactccaaaatactagtcatagtttgttatccagaccaagtagtcctgatatttctgctcatgtgtacactggaccagaataacctaccagggagaaacctccaacctgacccttattctttatttgcctctctgctacatagcagacatatccatatgtagaacatttcaaactgaaaataccccattgtaaaactatacattcagttcttattctagaagacttataccccattgtaaaactataccttcaattcttattctagaagactttattgagttcccaaatgtaataaaaagctcttaatcactaaaaaactaatgtttgttgagaattaactcagaattaattcagtattgcagccctcctgtgtgccaatgctgaggatgcaatcatgagcaaaaacagtttctcttcttatggagtttcttccttactcaggagaatgtcattgatcaaataattgcattaataaaagtttaattacaaacgctgagaagtaccttcaatgaactgaagacaattctgtgattgtgtgtatcaaagaactgtgacttakatgaggtggagaagaggagggtgaaaggccatggtcaaatg

SEQ ID NO: 76450 - DNA, 947 bp, Homo sapiens
  misc_feature (1)...(947): n = A,T,C or G
gaatactgtagaacgttttgaaattacagataagaaaaaaaaaacaagaaaattaaaatgtaattcaaccactgaattagtaccactggcatcatttttagtcattatctttctaggactttgtgcgtgtacacatacatgcctgcatgcgtgtgcgtctaagtattacattaaactattattgaaactcttattaggtcatgtcatatacattagtttgtgtgtgtatgtacctgcttttaaaaatgacttcacaatacgttacaatcagttttctgtgacattaaatattcttaaaatcattttcagtggctgctgagtattccaccgtggagatgaaagatgatttaattatctactcttctgttgttgggcctttagattgtgtccagtttttcactattatagaannnnnnnnnnnnnnnnnnnnnnnnnnnnnnnnnnnnnnnnnnnnnnnnnnnnnnnnnnnnnnnnnnnnnnnnnnnnnnnnnnnnnnnnnnnnnnnnnnnngccattgaatctccataaccatcaagaggtacagtaaacattcccattttaccactgagaaaacagaggcgcctaaaagtcagttatctccaagataatatccacagacccagtaaacagtagatcatagttctgccagaccataaagtctgagcttctagacagtcagctgatagagggtgtcaggagattcagaatagaagaaaatggagatwcttttctacatcagcagcagggcatggggcagtggggacgttctcaggtgccagaccacctgggtttatgtcccagctctatcccttactagcaacgtgaccttgggcaggtcaccccacctctgtatgcctccctttccttgactgtaaaatgagcacacaaggctatagtgaatcaccatggctggttttatttttatttttaaagtcaaacaaattcct

SEQ ID NO: 76451 - DNA, 947 bp, Homo sapiens
  misc_feature (1)...(947): n = A,T,C or G
gaatactgtagaacgttttgaaattacagataagaaaaaaaaaacaagaaaattaaaatgtaattcaaccactgaattagtaccactggcatcatttttagtcattatctttctaggactttgtgcgtgtacacatacatgcctgcatgcgtgtgcgtctaagtattacattaaactattattgaaactcttattaggtcatgtcatatacattagtttgtgtgtgtatgtacctgcttttaaaaatgacttcacaatacgttacaatcagttttctgtgacattaaatattcttaaaatcattttcagtggctgctgagtattccaccgtggagatgaaagatgatttaattatctactcttctgttgttgggcctttagattgtgtccagtttttcactattatagaannnnnnnnnnnnnnnnnnnnnnnnnnnnnnnnnnnnnnnnnnnnnnnnnnnnnnnnnnnnnnnnnnnnnnnnnnnnnnnnnnnnnnnnnnnnnnnnnnnngccattgaatctccataaccatcaagaggtacagtaaacattcccattttaccactgagaaaacagaggcgcctaaaagtcagttatctccaagataatatccacagacccagtaaacagtagatcatagttctgccagaccataaagtctgagcttctagacagtcagctgatagagggtgtcaggagattcagaatagaagaaaatggagatacttttctacatcagcagcagggcatggggcagtggggacgttctcaggtgccagaccacctgggtttatgtcccagctctatcccttactagcaacgtgaccttgggcaggtcaccccacctctgtatgcctccctttccttgactgtaaaatgagcasacaaggctatagtgaatcaccatggctggttttatttttatttttaaagtcaaacaaattcct

SEQ ID NO: 76452 - DNA, 719 bp, Homo sapiens
tcaagattgcagggtgcacagatgacactctgagcataggagggtgcttgccccctctctctccctacygcccacccccatgttgatatcaggctctgtctgtgtcctggaacctgaaccatctccctggggaaatgagcaagggataggagttgaactgtctgccatcattttcacgacattggctgaataggaccttaacatacaaatgaagttgcgtcatagaaagtaaagaaagtggtaagccttgcacatgtgagttgaggattttgattgacaactgatgtgcacttagcagaaagtgtgcttcccagggcagtgggtgtatctacacagtggccacatggaaacctaggcactggcacaaggatttgcctgtggtcttttaagagttgatcaaaggtaacaaaataagaatattaaattccgtgtgtgtgtgtgtgtgtgtgtgtgtgtgtgtgtgtgtgtgtgggaaaggagccaatttatgaaattaaataaagttgcctgggcgcagtggctcatgcctgtaatcccagcactttgggaggctgaggtgggtggatcacgaggtcaagagatcgagaccatcctggctaatatggtgaaaccctgtctctactaaaaatacaaaaaattagccgagtgtgatgcctgtagtcccagctactctggaggctaaggcaggagaatggcatgaacccaggagtcggagcttg

SEQ ID NO: 76453 - DNA, 1695 bp, Homo sapiens
tggggggtaaggggagcggggaggggcggtgcatgctgatgggcatggatcaaagccacagaagacttaaagaaaacaatgagtccattattacataataagtgctgtcttgtagacaaaagatttctatggctggaggttttgaggggaaataacaaagtggcctaaacattgttatttaatgactcgcagtcttcgcttctccctgagggctagaacacagatagagtaaagcccggtggttaartttaggagctcttgattcacctcctggaatggaagcctgactcttcagtgtactgccttgggcaaattactaccccccttctttgtcctcatctataaaatggagataatagtagccatgctgattatgagagttaaatgaagcaattaatataaagagcttaaagcaacacctggcccacagtacatagttgcctgccatttttgaatcatcctgctggcttttcctttttcccaggtgatattctccagtcaacttgctggcttcccgctcaccacctatcatgttctcctgactcaggctggttgtggggagcagatgtggacccaacactcgcctggggcctgccatgatggtgtcaggggaggatgacctcagccccggcatgcttcctgatgacctcggccttctatttatacaccgaacactgggcttgcctggagagtgccaacattgcatctgcaacaccatcagcttgtctgttacctggagtctgaaatcatcctttgctgttattatcataaagagtcccagaatggtagaatggcagagctgatggcaagatcacaacagcctcttaaatcttaccaatatcagttgtcatgaccatgtccaatgcaggaaactttggtcccagtgcttgaatttgctccctttttactgttatctcttgctcagtttctacaaaagcctcttagaagtggaacttagaagtggaactactggaactaagcatgtgctgcaatattttttttttaaatctgttttatgagcaagcaagttttagaacgtggagctgacacaccatttctaagattcatagtaaccacgagagttggacaatgacaatgcctggacagggcctggagaaaagcgagtggtggagagctcctttctagaaggatttgagagtcagccaaatgcattattcccccaacagcttcttcttcatcctatgtgttcaatactctcagtcctgtgggttaagcctttgcttaaggcaggcagcatcatatggtagaatgaacctgggctccaaaatcaaacacatctcaagtcaggtatcagttctgcaatttataagctgtgtgacgaagaaaagttacttaccatttctgagcctcagcatcttcacctgtaaaatgaggctaataccttcactcaacttatagagtggttgtgaggattacataaacctatcaatgtaagcacacaatatacattagctattatattaatatgttagctattattattattaacttcaaggccatagaaccccaaatggcaaatgctgactggacacagaaggataaaagcaatgctctgggaaggagaaggagatgtggtaaggctggggactctagtcccagcagactaggggttggtgtaaggtcccaggaagccagggcaagggggtgagaaggtgatgcaataatgccatagat

SEQ ID NO: 76454 - DNA, 510 bp, Homo sapiens
ttgtctccaaaagcagccagagtgaaaatgaagtgtgactgctgcctccccaaaacgcagggcagctcctccctcacatccacaaatgtggttcagcgggctgccttgccctgtttcaggaagcctacgtggagggcackgtggagccccagccaccttcttcacacagggctatctggggcttcagtgccaggtcccctggatacacagcagagtctgctgggggcactgaccaggatgccaatgcaggggtgctttctcggaggctcatcccaccagcagtgccaggtttgacaagccccacaaatctatgctctttggccgccttgagaactttccaaccagggattcttactgagcagagtgtgcatggcgaggaagagtcagagtggggggggccttgcccctccctcaaccagagggactctactttaatgtaccttacatactgggcactttcctaagatttcactggaaaaaatcggagcaaacaaaaatggaaacaacctg

SEQ ID NO: 76455 - DNA, 920 bp, Homo sapiens
tgcatataataaagaaaacacaggttgtgcagatgttaaatagcacttactagcagatgcagtcaaggaaaggacccaggggagaactcacgcaagaactcatgctctcacatttgttaatatgataaatgagtttggggcaccagtttcttctttttcccttcacactcctcaatacttccagaacttcctaattgcttctgttccctcaatctttctaatgataacagcattaactcaggctcacttttattttgggccaaattatcatcattgtaccatacggagttaattaaaatgtagccaggaaaggctgctgtgaacgacagaggcagggcttgattctaaaaacctgtggggatcatcagtgagccatgaagaacagcmagccagacagccaggctgttccaaagccctggctgatatttcaaatgctatttttaagggaggggatgggatacttggggaaggggacagtgaagacagaggaaacgctggtaagaaagtgagatagcgggttttacggttttaaattcaagctggggctgttcaagttgggagcatcatttggtgtaatctcatatgtccagaatttaatatctctagagagatttaacttgagttgcgacttctcacatttaatgaagcgaaactctctcaggccactggaagacatatctaaggatgaaaaccagtaatttacagctttagtgacgttattacagtgtactttgtgcttggctgctcttctctcttatgtgggccattatcaaaggcttcctggaatattggccattagctacatgcagaccaaggggctttgtcttcaagggctgggagggggtgggggaatgagaaagatattgaatattttatcttaactcctcggaaaaatcaaaatagcaatatgctttttgaaa

SEQ ID NO: 76456 - DNA, 679 bp, Homo sapiens
acaccttatgttggtctgcagaaccccagctctcttctatctcataccttggttcactaagcttctatttctggaaaatacyatgccaatgctggcatcagagcctttgaacatgcttccgtctctgcctgataggttcttatccttcattctctgtacagctcatttctttttcttctaggtgtctcagctttctcttttcagagatgcttttcctgaccacccgagggacctttctttttttgtttttccttatgccaatccttatgtattttccttcttagcacttatcacagtctgtaattttgttcaatttttctttacttgtttttattttacccattattacattatattataaattccttgaagacagtgaccataactgtcttgttaacctctttttaagaaaaagcacaatatgtagtttatgagggaattgatcgttaattttgtggatcctgtgtccaagcctatgttctaaccttccttgtacttatggatcagtagtataagagtccagcaggatcgtagctgaaatgatacctcatcatccattcatgagcagatttctattatgtgctcagtatgtgctaagcagagtgccagaggctaaatattcaaaggtacaagaaacaccatttctcatgtctccaggaagcttatatgctagttcaaa

SEQ ID NO: 76457 - DNA, 644 bp, Homo sapiens
agaaatctgtatgtcttaacatgtcatatcaaaactacacccttacctccccccaccaaaaaaaattgggtcactggcatttggtgatgttaggagagaactttcttcacttttcccaggatttaggactaaccarggtgagcaattatctcaatttgcctggcttttccaagtttaacactgaaagtctcatgtcctaggaaactgctcagtcctgggctaatcagaaccgttggtcccctgagatctaatttcacatcttgttctaccatatactaattacaatgctttgagggtggcactaaaccgttttaagatccaatttcctcatctgtaaaatggctataataaccatttcacagagatattgtgtggattaaatgaaattagatgtgattacatatatgaagcacctagcaagcagacattccataaatgttatttcctttttctaccattggaaaagttgtattttcaagcccaaggggaggatcatgttacacaccacaagacagtggatgccatttaatttatttcatcttaaaaaaaagagagaaagggagatacttttttgtcagtaaataacaggttgtcacacagttttcaggcagatttgtttttgatttttttcttcagtttgcaaa

SEQ ID NO: 76458 - DNA, 638 bp, Homo sapiens
acaagatgctggtgtggttgtttactaaatatttccagcttgtcttttaccttctggtcacatcgttggaccatgcctctgtccttttttgaggwtctatggggctgtgtgatttacattggccagtgaaatatgagcaggcataaactgtgccccttccaagtagattattttaagatccaggcttccttcccacacagtgatgatcatgaaagcacctgtccaaaagaagcctctattactctgtgttcttgcatgtctaatcttagcagaactcttataggggcttacaacatttttgtgttacgccactgagattttgaaatttttgctggtgcagcataacctagtctatcttgactgatccactagtgaccagagctagcccagcttcactctctgggaagttcctacagggccactctgagctgaagcatccacaatatcaaaacgagccggagaacacctattgctatacatcttaggttatttctctcttgttctggaagaaggaatagctagccataagagtctcagaatattttaggcaagaaagagcagctagactctggagcagagaggcacagataggacaactcatgtaaagttgaggaataggctgaatgaagctgtgtctg

SEQ ID NO: 76459 - DNA, 658 bp, Homo sapiens
gcagctcatcccatcactctccttccatctagtgtgatatcaactgaagatcagccatctgtggaaatccaatagacatataacatggatatgtcaagtaaatcaatctccaattgacctggaccagccatttctgtttctcaccctgagcaagtgccacacaggagctggctgacagtgcactccacaatgtcatgaccttctagcaggctgtcccaggttccagttcactgtgccaggctcttctccctggggtgccagagcagctttggggtatgtgcatggcctgacggcagtctgagtgtcaccaagggaaacttcatgccaaaagctatgctaagttatgtcagtgtccttagcaggctcaggggacactaacctcactgccaagagcaagcaactcagcacttgcccatgaggggttgagccacagatctagaaatctctggtcttttctcaggggtctctaatcccctgggcaggaagcttaaagcctgagttctcagcactggtattaaggctgcccttccccagctgcctggctctgggttaatcccaacccaaccaccaagagacaagaacttcatttcccccatgataggctgtgagtccttgccaggacatgagtccttattcctgtcagwctcttctcagggct

SEQ ID NO: 76460 - DNA, 1311 bp, Homo sapiens
ttaagatccatcttctcctgccttcttgggaagcacattgtccatgatctcttctttctctagtttcctcccaaatggatttccctcaatagtatttaaatacccgtaagtcttttccatttaaaaatagaccttttacaaccttgaatacccctcctcctattgccctttaaaccaaactttctgaaaaagtccctccctatttcctctttacagttactcacccctctcactccccagcctactccaggctggcttcagatcccatcactccactggaacaactgttgcttgggtcaccggaggcctccaaattcaaagggcatgtttcagtcccagctcactgcccctgtcagttacactggccctgctggacatgcctgcttcttgatactcactctcttccttttgctttagtgacataccactgcctcactcatagactttttagcaatctcttctctggatcctttacaagtttctccttttaaaattgactacttaatgttggatttcctccagacttggtcctaggctccttcatcctcacactctaacctctctctcttggagagctcatcaaccttgtggctttagattccacctatgcacagatgaaccctggaatccaacttcgccttggtctccagttctttcactccttcatgctatttgttctgccagactaccaggtctctccttgaatagtctggtcagaggtcccacatccatcataccccacagcctcatacagatgtcttgagatcagaatgkctgggaattccaaaaccagttcacctagcatccagcagttcttctgacctcatgctgctggagaacatcctgtaacagagctcattcacttcaacctccctcagggccatggtttgaatgtgtccccaaagttcatgtgttggaacttaatcccaaacctaacagtgttgagaggaaagacttttaataagtgattaggttacgagggctcggtcctcatgaatggaaatgtcattactgagggattggcttccttattgaatgagtgtttttgttataaagtgagcttggcccctcttgctctctcatgctctcttgtcctttccacttctgccatgggatgatgcacaaggaggccctcgctagatgccagcaccctgatcaaggacttctcagactccagaaatgtaagaaataaatctccgtccattataaattacccagtctgtggtgttctgtaaagcagcataaaatgaaccaagacaactgctatgtttctctggtatggcgaaggattaagatggactttggtgtcca

SEQ ID NO: 76461 - DNA, 758 bp, Homo sapiens
ccattgaagcatatttcttatggaataaagactgaggagaaataaaggttgagtaatgaaagtaaagatgcaacaaaacttttaaagtggccaatcttgctcatataatgcttgcaaccaaaagggaagaaagctctattactctgggaaaaaggtgtttggatacaccactaaaataggaagcctaaaagaaccattgttttataattctgagttaactgtgatcctttttccttttttccktttgttaactgatggtattttctggagtgagtcatgacttttttttttttttagtctagagccaacttgataatgctatttaaataaattaactaactaaactgcaaagtataagctcttatgcccataaaataagagaagaactgggaagttcaccaacaaggatgaaataggagaggcatttaataaaatttggtgacagagtcagggtaaggtaactctctcagtgacacatttatgtaatgctagtcttctctgcatgggagacattactttttgggggcaatgcccttttcctcaccactgcttttctccaatctcttctttgacttccttttgggatccctgggtatcctgctgtgttgttccagccccggtgttttgcctgctatctcttttcaatgtctgaagatcaattatcccttcgtgctagcatagggaggacagaaattctggggaccacaacttttccattatacttgaaggaaaaaagcagctctctcctgtaagatgga

SEQ ID NO: 76462 - DNA, 758 bp, Homo sapiens
ccattgaagcatatttcttatggaataaagactgaggagaaataaaggttgagtaatgaaagtaaagatgcaacaaaacttttaaagtggccaatcttgctcatataatgcttgcaaccaaaagggaagaaagctctattactctgggaaaaaggtgtttggatacaccactaaaataggaagcctaaaagaaccattgttttataattctgagttaactgtgatcctttttccttttttccgtttgttaactgatggtattttctggagtgagtcatgacttttttttttttttagtctagagccaacttgataatgctatttaaataaattmactaactaaactgcaaagtataagctcttatgcccataaaataagagaagaactgggaagttcaccaacaaggatgaaataggagaggcatttaataaaatttggtgacagagtcagggtaaggtaactctctcagtgacacatttatgtaatgctagtcttctctgcatgggagacattactttttgggggcaatgcccttttcctcaccactgcttttctccaatctcttctttgacttccttttgggatccctgggtatcctgctgtgttgttccagccccggtgttttgcctgctatctcttttcaatgtctgaagatcaattatcccttcgtgctagcatagggaggacagaaattctggggaccacaacttttccattatacttgaaggaaaaaagcagctctctcctgtaagatgga

SEQ ID NO: 76463 - DNA, 580 bp, Homo sapiens
agcctgggaagttctcattctgaaggagggctggggcaggggcacctatggctagggcaggasctatgttttaaaaagaatctgtgcaggtgactctgatgcacacacatataatagacaatcatggggctattgcatggatactaacaggtaccatctattgtacattttctacaggcccagtcctgtgatggatgcttcacatgctctatatttttcatttttacaactagccagctaataaataaggtgtttttagcattttaccgatgaagaagcgaattcagagagaagtccaaagtgacagcttataaatggcaagatggagattccaaccgagaatctccatagaccctgctcttaactgtcacaccctgctatatgctatggagcataaagttgctcaatggcacaggtcacaaacctacaggttacaggtgggtaatgtaaatgaggaaaataggtcaaataggaactggggtgagctggaggccatgtggccctttaatgggttctgagtgtttggatgctttaagagcaatgatggagagcaaccggaactctcatccatgtttatggg

SEQ ID NO: 76464 - DNA, 644 bp, Homo sapiens
cagctacttgggaggctgaagcaggagaatcacttgaacccgggaggcggaggttgcagtgagctgagatggtgccattgtactccagcttgagcaacagagtgagactccatctcaaaaaaataaataaataaaatacaagactgaactcttctacttaacagctgtgaacttgagccagttaatttctctgagcctgtttctcatctacaatatggcaataatagtagtacttaatagaatggtgaaaatgaaatgagataagtagcatttaacagtgtgccaagtccacagtaaaactctcaataaaaattagcccctacctcatcaacatcatcatcatcatcatccttaggtgcaaagcwaaaaggcatgagagaagtaacgaccccagcattccaagatcttagagcctgataggttgggataatgaaatatacaaatgattatattatatatatatatatatatatatatatatatatagagagagagagagagagagagagagtaaatgtcaaaaggtaatatcaacgggctgttaagaaggagcaataatgtttggcctaggggaaggaggaagggttgtcagaagagactttgtgaggtagatgacttttgagcctgaccttaaaatattggta

SEQ ID NO: 76465 - DNA, 644 bp, Homo sapiens
cagctacttgggaggctgaagcaggagaatcacttgaacccgggaggcggaggttgcagtgagctgagatggtgccattgtactccagcttgagcaacagagtgagactccatctcaaaaaaataaataaataaaatacaagactgaactcttctacttaacagctgtgaacttgagccagttaatttctctgagcctgtttctcatctacaatatggcaataatagtagtacttaatagaatggtgaaaatgaaatgagataagtagcatttaacagtgtgccaagtccacagtaaaactctcaataaaaattagcccctacctcatcaacatcatcatcatcatcatccttaggtgcaaagctaaaaggcatgagagaagtaacgaccccagcattccaagatcttagagcctgataggttgggataatgaaatatacaaatgattatattatatatatatatatatatatatatatatatakagagagagagagagagagagagagagtaaatgtcaaaaggtaatatcaacgggctgttaagaaggagcaataatgtttggcctaggggaaggaggaagggttgtcagaagagactttgtgaggtagatgacttttgagcctgaccttaaaatattggta

SEQ ID NO: 76466 - DNA, 523 bp, Homo sapiens
cttttcatcaagagctgtaatcagtgagcctgtgtacttccttttccctgccagatagttgttcctggctggaagacattttatgatatttatttgatgacacacacctgctgagtggatgaaaagcaactgttcctggggatgacctacttcaagggcgcagtcagcttctgaggccttcagcaggttatcctgaaatcattttagttcaccttgatatcacctgttgaacatatctaagactggtgtattcgcagacttgttgtaggcacagttgctaaccccagggaagagatttcggagtcagtaactactttgtcagtgtattgagactgggaagacacgctgctttaccaaacctactctgagcatatggagtgctgttcttggcactcgggaygcgcatcagcccagggacctgccagctgggagcggacccctagaaggggatctagtgggaacataagtaagtatggtccagcacagaagggatggatctgaggaagaaggcatggaggatgag

SEQ ID NO: 76467 - DNA, 637 bp, Homo sapiens
atattaaaacttccggggttatgagctcaaatgtttagaggatgataacaagtgcacggtgtgaagtgaccaagtttaaaagatggagaccggccgggcgcagtggctcacgcctgtaatcccagcactttgggaggccgaggcggatcacaaggtcaggcaatcgagaccatcctggctaacacagtgaaaccccgactctactaaaaatacaaaaaaaattagccgggcatggtggcaggctcctgtagtcccagctgctcgggaggctgaggaaggagaatggcgggaacccgggagacagagcttgcagtgagctgagatagcgccactgcactccagcctgggygacagagcgagactccgtctcaaaataataataataaaaaaaaaattagccgggcgtggtggcgggcacctgtagtcctagctactcaggagactgaggcaggagaatggcgtgagcccgggaggcgaagcttgcagtgagccgagattgtggcgctgcactccagcctgagtgacagagcaagactccgtctcaaaaaaaataaaaaaaataaaaaaaagatggagaccacatatcctgaataaacgagttcacacatacacagcctgctagcctatgacgcctggt

SEQ ID NO: 76468 - DNA, 672 bp, Homo sapiens
aggcagaaataaagacaggctattttaactttatccagaataccttatcttgcccatcattttctaattgtatagacttggcccaggtacatagaattattaccaggatatcagccatgctaatgataggtgtcctcacagacaaatgccatatttaaatacgtagacagttttttttaatgcaaatggcttttccttatacatgtttaaccacaaatgaagttagaaagttatgttgaaagcattgcatttatccacaatggcgttaccatgcttccaatgttgtcttagtaattttgtgctagattaaatattttgaaaattaaaaataaagctttcggaatattaaacttttagtaaattaagaaatacttacattcctataatgctgttgcctaaccagagacaggagtaggaagactctccttaaaattctaaatacttattattactattacaaacccaagataattttactcaataaatattcaytgaacacttactctgtgcctggttccgtgtaaggtcttggaaatggaagatatgagtaagacacagcttctaacctcatggagctcacaaagggaaggctacttccctgcccctactccacacccacataacacaattagttttaagataagccagactgtaatatgtcctaaaaggaca

SEQ ID NO: 76469 - DNA, 646 bp, Homo sapiens
ctcaatatctgtcatccaacaagagcatatgtcattttcattcagaataatgacttcagctaacatgcatctaactattagaaaccatgacaaggccaggtgtgctggctcacgcctgtaatcccaacactttgggaggccaaggcaggtggatcacctgagatcaggagttggcaacacagcctggccaacatggcaaaacaccatctctactaaaaatccaaaattaactgggcattgtggtgtgcacctgtaataccagctactcaggaggctgargcaggagaatctcttgaacctgggaggcggaggttgcaatgagctgagaactcaccactgcactccagcctgggtgacagagcaagaattatgattattcttgagtttattttccaaagttgatttttttatttatataaaaattcaaatatatattttgtttgtttaccagggaaattatttacattagtaaaaagatctaatcttttacatccaattttgctttcctgttaaattgtatttcccttcaaataatcaatgttcttcaccaaatcttcttttctacccaaaaatatctttttttctatataaactaaggtgagagattttcttagacaccatactttatcttctgtgttgctatttt

SEQ ID NO: 76470 - DNA, 1132 bp, Homo sapiens
cttggcctcccaaagtgctaggattacaggcatgagccaccatgcccggcccactctggatttaaggacagttcttccttcaatcagcagccaaagagtcctgattcctgattctaattaagaagtttaacttggtattctatttctgatggaaggatggctgaaagaagggagactcaaacaacagatgaaggcaaaatactctgtactgaattttcaatgtaatcttaaattctatgtttaattgagatgacccaaattcttttttttttttttttttgatacgcagtctcgctctgttgcccaggctaaagtgcagtggcatgatctcggctcactgcaacctccacctcccgggttcacaccattctcctgcctcagcctcccaagtagcagggactacaggcacccgccaccacacctggctaactttttgtatttttagtggagacwgagatgacccaaattcttaactgcctcataaatactgttaatatattgaaagttttgccctaggcttttattaaagtcaactatatagaaaaagtttctcctatcttgagatgtattattaaagacatcatccccaataatattccatattctctgtttaggaaccccaattgttttcaaattcaagaattcagagaaatctacttgttacaaaagagtagaatggataatgggcaccacatcctgaagtgtattttaataaaaattcatgtaagatggttcaaaatttcattaactactttatataaaaagaaatgcctgggagaattctgtttctagcagagtggcagactgatgccttgaacaaccctcctattacaaaactgaatactccacatgaaaacaaatcttttcaaatgcattgttaagctgtgaagagaataacgaaagttctaagaaaccaaaatctaaatgaaaacacaagtccaggcaggcactgaaaacctaaaaaaaaaaaaaaaaactgaagaggccaattgttggcaaccatgtggaacagcaggaactcttcaagctgctgctggtggcggaggccaagccactgtgctcccagaacacaacacagaagcctccacactgaagcagagcacaggtgccctggagtctccaccccacccag

SEQ ID NO: 76471 - DNA, 819 bp, Homo sapiens
tcgcatgcaggcagtatatttacaaagtgcgggaaacaagcaaatgagcccgggaggggaggagggaaagggaaagtgaaaggtgcctcagatagaggcccctctgaggatgacgacagctcaagcccacatagaaacacaggaaaaatgcctctgttattccacctgagaggtgagggagctgcgggatgtgtacacctcccttgtcatcactgattgacagccgtcctaggggatgctaattccaggccatgaggtctgcctcatttgcagcctgagctgcttccccaggttcagacagagcagtgaaggggagaaagggccatagagagtcagctgaagtataatgactagaatycccaaggcgtagtaacaatgactgctaaaattatgcacaaagaaaaagcgcatttgaatccagagatgtatctctctgaatctggatatatggatcctggcagcctgttcagtagccatttcccagaaatccagttctctggaaaagcagcaggaggtttgtgcacaggctgcactaccttggtctggccactggtagtcgtgcatgagaactactccctggagtatttctcagtccactgacactgatgtaattggctccacttcccctgctgttgagccaggccgacacgccctgggcaaaggcatctgtgtgaagtattgaggttcaaatcagtgcttaagatatgtttggaggcaaaatactttttcatctacatgggcagtgtcttggcagaagatggagattctctctaaatggatgtgagacagggtggctggcatctgggtcaggatgatgcc

SEQ ID NO: 76472 - DNA, 819 bp, Homo sapiens
tcgcatgcaggcagtatatttacaaagtgcgggaaacaagcaaatgagcccgggaggggaggagggaaagggaaagtgaaaggtgcctcagatagaggcccctctgaggatgacgacagctcaagcccacatagaaacacaggaaaaatgcctctgttattccacctgagaggtgagggagctgcgggatgtgtacacctcccttgtcatcactgattgacagccgtcctaggggatgctaattccaggccatgaggtctgcctcatttgcagcctgagctgcttccccaggttcagacagagcagtgaaggggagaaagggccatagagagtcagctgaagtataatgactagaatccccaaggcgtagtaacaatgactgctaaaattatgcacaaagaaaaagcgcatttgaatccagagatgtatctctctgaatctggatatatggatcctggcagcctgttcagtagccatttcccagaaatccagttctctggaaaagcagcaggaggtttgtgcacaggctgcactaccttggtctggccactggtagtsgtgcatgagaactactccctggagtatttctcagtccactgacactgatgtaattggctccacttcccctgctgttgagccaggccgacacgccctgggcaaaggcatctgtgtgaagtattgaggttcaaatcagtgcttaagatatgtttggaggcaaaatactttttcatctacatgggcagtgtcttggcagaagatggagattctctctaaatggatgtgagacagggtggctggcatctgggtcaggatgatgcc

SEQ ID NO: 76473 - DNA, 819 bp, Homo sapiens
tcgcatgcaggcagtatatttacaaagtgcgggaaacaagcaaatgagcccgggaggggaggagggaaagggaaagtgaaaggtgcctcagatagaggcccctctgaggatgacgacagctcaagcccacatagaaacacaggaaaaatgcctctgttattccacctgagaggtgagggagctgcgggatgtgtacacctcccttgtcatcactgattgacagccgtcctaggggatgctaattccaggccatgaggtctgcctcatttgcagcctgagctgcttccccaggttcagacagagcagtgaaggggagaaagggccatagagagtcagctgaagtataatgactagaatccccaaggcgtagtaacaatgactgctaaaattatgcacaaagaaaaagcgcatttgaatccagagatgtatctctctgaatctggatatatggatcctggcagcctgttcagtagccatttcccagaaatccagttctctggaaaagcagcaggaggtttgtgcacaggctgcactaccttggtctggccactggtagtcgtgcatgagaactactycctggagtatttctcagtccactgacactgatgtaattggctccacttcccctgctgttgagccaggccgacacgccctgggcaaaggcatctgtgtgaagtattgaggttcaaatcagtgcttaagatatgtttggaggcaaaatactttttcatctacatgggcagtgtcttggcagaagatggagattctctctaaatggatgtgagacagggtggctggcatctgggtcaggatgatgcc

SEQ ID NO: 76474 - DNA, 819 bp, Homo sapiens
tcgcatgcaggcagtatatttacaaagtgcgggaaacaagcaaatgagcccgggaggggaggagggaaagggaaagtgaaaggtgcctcagatagaggcccctctgaggatgacgacagctcaagcccacatagaaacacaggaaaaatgcctctgttattccacctgagaggtgagggagctgcgggatgtgtacacctcccttgtcatcactgattgacagccgtcctaggggatgctaattccaggccatgaggtctgcctcatttgcagcctgagctgcttccccaggttcagacagagcagtgaaggggagaaagggccatagagagtcagctgaagtataatgactagaatccccaaggcgtagtaacaatgactgctaaaattatgcacaaagaaaaagcgcatttgaatccagagatgtatctctctgaatctggatatatggatcctggcagcctgttcagtagccatttcccagaaatccagttctctggaaaagcagcaggaggtttgtgcacaggctgcactaccttggtctggccactggtagtcgtgcatgagaactactccctggagtatttctcagtccactgacactgatrtaattggctccacttcccctgctgttgagccaggccgacacgccctgggcaaaggcatctgtgtgaagtattgaggttcaaatcagtgcttaagatatgtttggaggcaaaatactttttcatctacatgggcagtgtcttggcagaagatggagattctctctaaatggatgtgagacagggtggctggcatctgggtcaggatgatgcc

SEQ ID NO: 76475 - DNA, 819 bp, Homo sapiens
tcgcatgcaggcagtatatttacaaagtgcgggaaacaagcaaatgagcccgggaggggaggagggaaagggaaagtgaaaggtgcctcagatagaggcccctctgaggatgacgacagctcaagcccacatagaaacacaggaaaaatgcctctgttattccacctgagaggtgagggagctgcgggatgtgtacacctcccttgtcatcactgattgacagccgtcctaggggatgctaattccaggccatgaggtctgcctcatttgcagcctgagctgcttccccaggttcagacagagcagtgaaggggagaaagggccatagagagtcagctgaagtataatgactagaatccccaaggcgtagtaacaatgactgctaaaattatgcacaaagaaaaagcgcatttgaatccagagatgtatctctctgaatctggatatatggatcctggcagcctgttcagtagccatttcccagaaatccagttctctggaaaagcagcaggaggtttgtgcacaggctgcactaccttggtctggccactggtagtcgtgcatgagaactactccctggagtatttctcagtccactgacactgatgtaattggctccacttcccctgctgttgagccaggccgacacgccctgggcaaaggcatctgtgtgaagtattgaggttcaaatcagtgcttaagatatgtttggaggcaaaatactttttcatctacatgggcagtgtcttggcagaagatggagattctctctaaatggatgtgaracagggtggctggcatctgggtcaggatgatgcc

SEQ ID NO: 76476 - DNA, 1448 bp, Homo sapiens
ttgaaaagtgctgtcattgtagtactaacttatagtatcaacttctttatcaactccttatacactttttattctgagagaaataaaaaagctaaaagtgaaatgactttktaactctccatattataagcacccatcttggtaatttagggtctttatagttagggtaagttgtgtcataccgaggttacaaaataaaaagtattttgtctctttgggcctttccttattcagtaatactgtcagtttggctttttttgtaggtcaacttattgaactcagtattctgaaataatgtgtttactatcttttgataagcatttaaaatattagatttattgttactcgtctgccttcattgggctggaagaataattgtttcactccacaaaagccaagttgcagagaaaaacacatagacattcaactgcaaagcagagaaacttgactattttctgcaattttaaagtgtatattgaataaaaccatctttttattttcttttttgctcactggcaactattaacaacatcaagtgcgttattataatgttatctagttaaaaatctcaaaaagttttcataattaccatttaaaaatatataaataagtgacctaatgttaatttttattgtctgagaccatgtctgttatttcactctttaaattcagttagtaatgcagaacctagcacttagtagatactcaaaaattatttgctgaataaaaaaaggttaaacatgtaatatacacaaaatgtactggaaaaaatgcaccaaacaattttgttataccagtttaatgtaaatattgtctttaaaagataatatagttttcaggtgtctacagtgattttgtaatatttgtgcacatataaagtaatatttccaaaaatgtaatccagtggggaaatatactttctaaattctagatttataatttagggtttaaattataaaatcattaaataagacacaagtgaaatatagtcaaatatccccttggaaaaaaattaagtggcctctaaagtgaggtattcatatatgtaattttacaatcctctagtgatagaattaattaaatatgccaccaaattgattaattcctacagtgttaaaagagaagcactaacaatgccagtgaccatgtaacatggatttaagctacaagtcatagaaatgtgatgagaagcctcagcactgtaaaaccgagggtggaggaaagcttttcctctctcaaatgagctttgcgaggtatacttcttgaaggataggaagttgaagtgttcaggacttttatgtctattctactttggcttagtttacatgattcttagtttattagcctagaaatggccaagaaaacttaaggctcaatatttagttataaatatgaaatatccccaatttttaagataaaaacaacttataaatgtatttgtctgtaaa

SEQ ID NO: 76477 - DNA, 732 bp, Homo sapiens
ggcaacaatcagagtaaaaaatattctgtgtatacaatatggatctgtaggcacttaacacacttatcattttgtacctaattgtcgttcttaatttctttacatcttcttctggaaccaagtctgttttattaatgagaatgatatctgccaaagcaacttgcctaaaatagcaaacaaaaagaaatgttaagaaattttaaataatatacacgcatgcagattaatacatcaaaagagaaatgttaacaaattaaaaataaataaaaacacctcatgtagatcaatatatcagttaagaattatatagtgctctataggagtgattcagtttactcctaatccgctaayttttcaatgtgaatgaattgtattcattactatgcaagttcagatttcacattacccatttgcaaagtatttactaagttatgttacttgctactcttgcgctacaaagataagtctcaaaaagtttacaatcaaaaggatgattttaaactcataattttctttgtgaagaaaagcataaaattcagatatccaatatggtaaaaagaagaagagtttacctactaaaatactgtaatatttaccaaaattttcaaagaaatagaataacttcacttaatactaaaaactgtattaaacaggttttttaaaactatacttcagagctgggcatggtagagcacacctgtagtcctggctacttaggaggctgaggaggga

SEQ ID NO: 76478 - DNA, 732 bp, Homo sapiens
ggcaacaatcagagtaaaaaatattctgtgtatacaatatggatctgtaggcacttaacacacttatcattttgtacctaattgtcgttcttaatttctttacatcttcttctggaaccaagtctgttttattaatgagaatgatatctgccaaagcaacttgcctaaaatagcaaacaaaaagaaatgttaagaaattttaaataatatacacgcatgcagattaatacatcaaaagagaaatgttaacaaattaaaaataaataaaaacacctcatgtagatcaatatatcagttaagaattatatagtgctctataggagtgattcagtttactcctaatccgctaatttttcaatgtgaatgaattgtattcattactatgcaagttcagatttcacattacccatttgcaaagtatttactaagttmtgttacttgctactcttgcgctacaaagataagtctcaaaaagtttacaatcaaaaggatgattttaaactcataattttctttgtgaagaaaagcataaaattcagatatccaatatggtaaaaagaagaagagtttacctactaaaatactgtaatatttaccaaaattttcaaagaaatagaataacttcacttaatactaaaaactgtattaaacaggttttttaaaactatacttcagagctgggcatggtagagcacacctgtagtcctggctacttaggaggctgaggaggga

SEQ ID NO: 76479 - DNA, 651 bp, Homo sapiens
gtgcaggaagaaggtcaggttcagcacagcccagacgcacttcttggagcagctgggcgggctccggagagactggaaagacaggggcccgccagtgctgaagagctgcctctccaagtccaagagagacagtggcgagggtcctgggaagaaaccccccagtgtctttggcagcacggcagagaggatgaggcaggagggtgccgcgagccaggacgcggccctggccttccgggtgaggagacccgcctccgcctctgcctccgaagggaatccattccccagggagtcccagggcccagctcccagccccggctccctgtctgatgacagcagttcagtggacagcaacgacagcatcgaactggagattaggaagtttttggcggaaaaggccaaggagtcagtgagcagttcagaagttcaggcagagggccccaccgctcttgggacagggggcccagccaggccagaggtgctgtgcaggaaggagcckgccccaccgcctggcgtgtgcacacgcagccagagggccaggggggtcccacatctggccgaagggcttcgaggcacagagagcgcaggagcacagggcacagctggtctgttcagccagggcgggaaggggctccctgctgctcctgcccgagg

SEQ ID NO: 76480 - DNA, 745 bp, Homo sapiens
agagcaaatcatttatacatagcatttgcagtattcttctgtgaaatggaatcttgctgttactaatgcagaagcctgctggtaactgctcagactgtacatattagccagctggtggctgaatcctgactattgagctgcctagaattgaaataattaattttcctggagaaagtatattgtgttgtagttttttggatttgtgactataatctgtaatcaccagggaatttatttagatttgcaattatgctagagtttgtaatttatagtaaagagataggagtttgctaaataggaggcatggagctgtgagttttccattaatagttttgtgaaccttgtrtaatacccaaggtgttagtagggaactattagctaaatagtcagttcatgttcgtcttatctaatgaatgcagaacttaacatgttcacctagagagtttcccatttattttaaatatggttctcttttgcatgtaaaaagagtgttgctacaaaatcttatattttaaagaagtataactacaaataatagctttctattgttttaaaatagatattctagtaatataattcttattgtgcctgaaaagtaccatttcttcacttatatgctatatcttgaatgaaagaatgtgtgaattgattctttaaaattatatatttcttttcgataacaataagttttttaaaaaaagcatatttatactaatacttactaaatattttcaagagatatgca

SEQ ID NO: 76481 - DNA, 1184 bp, Homo sapiens
tattggaggtagatagaggattggagagttgcaaagatagggaaaggaacttgtatcaagtccaggcataactgccactacctccagtcctgatgtgcatctacaaagaacgctttagcatatgggtagagcctaacacaagacttttttcaaagatcttaaggctagttttgtttgaaatattttgataccttcatttacatagaatggattttgaacctaccataattgtagacctgaacatgatataatagtctttattcctgaagataaataagattataattaactgtgggatcattaatggactagaacactagtcaacaataaaaaagagggttaacacaatgtaacagcacttgtctgattcgtaagtcatttggctcttgcacttaatcacatgaccctaagaagtcatttaacttatttgagccttagtttacacacttgtcacttggggataatgttaatacatataaaggaattcatctatgtggcattaaagagaatttcaatcaacttcctcattcttgatctgatcactgataagattgaacttgagaaaacatagaaatcctcatttttaaaacctcactgctcaaagtaaagtaagcaagagtaggcaaccaccaggagcgaatgaacatctcattctctatggttgtaggtcactgtcctaggatctagcaatttgtttccctaagaaaactaagttatcttcataacttagttatcttaataactaatattaatagcatattaataactcattaacatcaagaagaaaagagaaaaatctcttttatttgttaaatgttatttgtatactttttgtacatgacaatatgccttatgaataatttcaaaaaatataggtgataaagttaccaattataataaaaatatcctattcagaatttgtgtgaaaataaattaagatatcttgtgtaagtgcgtgtgtttgaattaccttcaaaatataaagtatctttatacctgttggacacaataaggactacccatgatattaattgaatcggtcattactcattgttaatctcttgactatcttaagatttatttttgtaaatataccacattatttaatgtcactgaatattttgatggtgctgttccaatrtcaaataactgccagagttttagagaaagcttgcctttcatgc

SEQ ID NO: 76482 - DNA, 1759 bp, Homo sapiens
gaccccgacaaggcagacccaagatgcggatgtgagaccaaagcctgggaagcttcggccacctgtgcagacacctttggggaaagctggagacacctgccttccccacccccctggagtgggtctctggacctgacactgccactggtgcccacctggcccctcttcccatgtgcagggtgagaaccttggaagccaggagccagagccaaggcctcagcagccaagtccttggcctcaccctcacacccctgcagccaccactgcccgcctcctccctccatctccaggctccccatggcctgaggcttcccccagccttgtttctcctgatgagggaaacctgcctggaaaacctcctgcaaatggctactcccttcctttgcaagataaataactcaggggtgcaggctgtggtgtgtgccccacagactcctgagatgccaaagtggttagagatggcccctccttccggccctcactcctgcaggcacccagctctctctgctgccaacaagcttccccacagggccaggccacctccccactgtgccgccactccaagggccttccctgaactgcctccgggtcacattcctcacctcatccttttcttggtgtggtgacactcttgtggccagaattacttggctgatttggggagctctattcttgcctatctctcaggtgatgctggggactttatcctccctgtccacgacttcctccatcactacttcactgtctggtgcagaggcctgctcagtaaatcgccactggcagaactaccctgtccatcagacatggcctctgccccagtagacaggcagggagggaactcacatctacactgcatgctgcaccttctctttgatgccactcctggccccaggatgtgcagctgtcgccactttacagagaaggaaacaggctccaagaaattcagcaacatcctcagcccccccaccccagctagaaagtggccagcttggatctaaaggggatctgggtgttgtttctagcaccctgccccgcctttctgcacggatccctgcagagtcaggcaggggagacccagaggacccctggtggtaatctgagtgcaagaagcagagggaaagggagcactggcatatctgagccccagcagaccattctggaaggtttttgtgttttgattcaggcgaaattgacattaaccattttaaagtacaaaatcctgtggcatttagatactcctggagttgtgaattgtcactttttaatttgaggacatttccatcaccccaaaaagaaaccctatattcattagcagtcactcctcatgccccccccacccctggcagccactaatctacttctcatcactgcrgattccctttcctgtgcatttcctatcaatgaaatcctccagcatggcctttgtgactggcatccttcactcagtgccatgttctcaaggctcgtccacattgtggcgttgtggtggtacgtcgctccttttcaaggctgagtagtgcttccttttgtgtatggaccatgttcgttatgtgctcatctgttgagggacacttgggttgctcccacccttcgggctgcatctgtgagtggtgcggctgtgaacgtccatatgtaaggatatgcttacctgtttttccttctttttcttttgggtgtgcctacctgggaatggaattggtgggtcatatggtaactctgtgtttaacttttcgaaaaaccgccaaactttcttacattc

SEQ ID NO: 76483 - DNA, 1129 bp, Homo sapiens
cgtacactgctctattgtttgattaaacccctgatgcggttgcttaggagtggaaactattttagtgacttaaaccagggcctggaggtgtttgagggaaatgttctgtaattcgaaagcatcaaataagatgctttcaaattaacacaaaaatccaaatatccatatcttgaaagaagagaccccttcctcccctctgacttctccttcctcccagccagattatccaagacgtgctgttattcagagtcccatcagccacatgtgacagaaaaacaactaaagaacatggcttacatgacacagaggcatatttctctgtcatattaaagaagacagagggcagcagtccagagctgatatgagggcttcaaacatacagggacctggcctctgcctttcttgctgctccaacatccttaataggctgcctcgcagttcaaggtggctgcttagactccagccattgtatctgcgttccaatagaggaagagcgaaaggttcaagaaaacattccctcttttaaggacatgcacattgtccactctgcttccaattatggatgatcagccataacatcatctcaaaggaggctgagctgttggctttattccagataacctgctatggatgagtaagttgagaactgatgttagagtaggcagctggccacctctgtcacagtacctcctaggtaatggctttcttcccgtttccaaggtgctcaccccgtacagatgtcctctacttcctcccaatttcagagcagttcaggatrtaaggtacaaaatgtcattcaagaaaagtgttgggaagctttaagtgagaaaacaaaacttatttcatgtatggggaaactgaagcctgagctggggagggacttgccccagatgcatttgtgcccacttaatgttacaccagccaccctgggtctctcgcaggggatttcagagcctcatgggagttcttgcttcttgggagctcctggatctctttgctgaggctataccctgccatgttattaaggacacttagttacagatgacagaaaacaagcctatcctggctgaaaccaaacagaaatttaacggcttttaagtttaggaataacagcttcagtcctggctgg

SEQ ID NO: 76484 - DNA, 1129 bp, Homo sapiens
cgtacactgctctattgtttgattaaacccctgatgcggttgcttaggagtggaaactattttagtgacttaaaccagggcctggaggtgtttgagggaaatgttctgtaattcgaaagcatcaaataagatgctttcaaattaacacaaaaatccaaatatccatatcttgaaagaagagaccccttcctcccctctgacttctccttcctcccagccagattatccaagacgtgctgttattcagagtcccatcagccacatgtgacagaaaaacaactaaagaacatggcttacatgacacagaggcatatttctctgtcatattaaagaagacagagggcagcagtccagagctgatatgagggcttcaaacatacagggacctggcctctgcctttcttgctgctccaacatccttaataggctgcctcgcagttcaaggtggctgcttagactccagccattgtatctgcgttccaatagaggaagagcgaaaggttcaagaaaacattccctcttttaaggacatgcacattgtccactctgcttccaattatggatgatcagccataacatcatctcaaaggaggctgagctgttggctttattccagataacctgctatggatgagtaagttgagaactgatgttagagtaggcagctggccacctctgtcacagtacctcctaggtaatggctttcttcccgtttccaaggtgctcaccccgtacagatgtcctctacttcctcccaatttcagagcagttcaggatataaggtacaaaatgtcattcaagaaaagtgttgggaagctttaagtgagaaaacaaaacttatttcatgtatggggaaactgaagcctgagctggggagggacttgccccagatgcatttgtgcccacttaatgttacaccasccaccctgggtctctcgcaggggatttcagagcctcatgggagttcttgcttcttgggagctcctggatctctttgctgaggctataccctgccatgttattaaggacacttagttacagatgacagaaaacaagcctatcctggctgaaaccaaacagaaatttaacggcttttaagtttaggaataacagcttcagtcctggctgg

SEQ ID NO: 76485 - DNA, 814 bp, Homo sapiens
tcacccttctagaaacctctgtcttaccccttaaataacctcctcccacagtaaacacaaacacaaaccaccgcccctctggaagctgcctgcacaggatgtacattttctggcagactccacctcgcccacctgccctgggtggggaccctgtcaacggggctagagaaagccatacgttctcatctagggcacacagggtgatgctggcaggtggacgggaaaagcccacaggagagaggaggaagacaggttgctccagctgccctgcttcctcctgcacactatcctggaagccgctactctctggaggatggagagagcaggaagctcaaatgatccccctacgcagcagccctccaggactgccccatccaggtgtggcatagccaacaaagcccggtgctggcacagttgagtccttccaacaaaagagtagagggagggcagccagtgtggctctgaaggtgagtgccaggagagggaggagtggtggctgctcaggaagaggaggactggaggacagggagaaggaaggcattgagcaaccctgggaggcaagctgagctccagggcctggcccttctcagacaagtgaggcaggggaaggttgcttgcaggagagggtgggtgtggaccaggggtggacgggcaatggcagggcttggaggtctggcctgtgccagtgctcagtgtgattgctgcccagtgtaaakcccgtgtggtctacctggttcaactctgcttatcttgaggcaacaggatgcctgaggtcagaagctccccctggtgaccaaaaaggctaagactagtg

SEQ ID NO: 76486 - DNA, 1209 bp, Homo sapiens
gctcgcatttcattttatacttttatgactttgagaggtcaaaggacaagtattcatccattttcttcaagtgagagagtaagggagaaatgcttaatcatttgtcctcgttcattcacccaactggtagaaaagcaagactgagtcccagtccctggggacctcgcagtctcccactgcacacatcgggattgaagatggacagacgaaatacacactctgttggtctaattcttattcccttattccttcctgcattccacagacaatttccaccttcaaaacgttctttcttggggttacataaagagacccgtcaccttaatgggtgatgggagagatctgatgggcaggtgtgcacgaggataacatggcctaaggggacattcaggctgatgagagtctgggggtgccaagtacagagctgagaaaatcccccgcacccaagtaactcatagccatggggctttggggcgggtagagaaggtttgaccaggtgtgatagggtatggaggtggcgggatcaggtgggctgtgttcaccttggtctggagcaaagaggcttctgagagaaagggactcctaccatgtgaagggagcaaggsacagggtcggatgttgggggaggttggaggtggggatgtttgctccgcagggagggagatagtcggggttctttgaggaacacacgaggatgactgccaagcctgggcgctgtggggttgttgccaaagctgaatttagaagtcattggcatcccattgatcaatcccaactgtgagctggaccccgggtcatggtttctgactgtccctggaggtgcggtgctccagagtctggtcatctgtcctcgtgtttagccctgatagggaaagagggcttagtgcatctcttcagctatgctggacaccagcctcgagggtagaaccaatctgtgggtaacaagcttcctggcatgttttctcacttcgtggaggtcaaaccacattcaagggcagggacttgaccctgttttgccacttgctggttctgtgtcttcagtttctcagcttctctgaagaagtttctctgactcagttgtataggtgatgatatctacctatgatgtcattcatccacttttctgactagtccatccatccccacctatctacctatcacccattcatccatccactcacccatccatcctacccatctttccatgca

SEQ ID NO: 76487 - DNA, 1067 bp, Homo sapiens
tatgtaacaaacctgcacgttgtgcacatgtaccctagagcttaaagtataataaataaataagtaaatatatatatatatatatatatataataagtaagtaaattgcaagctgcttttaaaaataaatgtgtaggaatgactgtgtttggaaaactctgccctgcagctttgaggatgaccaagcaatggtccctttcccagacaggctccttaacttaaggctctcagagatgcctgggttgggggagcttcagaggtttgcaccaggcagtgggtaccatggggctctgagggtcctgacaataatcctgaccccgattccaacaccagccagtgcctgttgggcagctggcttcaaaccggacgtttctcatggttttcctccaatctccagaacaatcgtgaactgtgtgttcagtattgtcgttcctattttgcatgtaaggatgtgagctccttacatgcaaccggtccggggtctcacggcaaccggtccggggtctcacagccstatgagtttcagcctgaggatttgcatgtgggtcagctgacgaatggaacccctcactccttgggctcataaacagagaaccgacacaaacaccatccagagaaggtgagaaccggaagggatgatagttactgcttagttcaaaatctctctgacttagtaacgtgtaggtcactgttaagagggaaatctcctgcgttaaaacaacaacaacaaaaacacaaaacaaaaaaactattgtgaaacagaagttctgtctttgaaaatgtgaattacagccagggcctgtaatcccagcactttgggaggacgaggcaggcagatcacctgaggtcaggagtttgagaccagcgtgaccaacatggtgaatccccgtctctactaaaagtacaaaaaattagccagatatggtggcaggcgtctgtaatcccagctactcgggaggctgaggcaggagaatcgcttgaacccagaggtagaggttgcagtgagccgagactgtgccattgcactccagcctgggtgacagagcaagactctatctgaaaaaaaa

SEQ ID NO: 76488 - DNA, 1067 bp, Homo sapiens
tatgtaacaaacctgcacgttgtgcacatgtaccctagagcttaaagtataataaataaataagtaaatatatatatatatatatatatataataagtaagtaaattgcaagctgcttttaaaaataaatgtgtaggaatgactgtgtttggaaaactctgccctgcagctttgaggatgaccaagcaatggtccctttcccagacaggctccttaacttaaggctctcagagatgcctgggttgggggagcttcagaggtttgcaccaggcagtgggtaccatggggctctgagggtcctgacaataatcctgaccccgattccaacaccagccagtgcctgttgggcagctggcttcaaaccggacgtttctcatggttttcctccaatctccagaacaatcgtgaactgtgtgttcagtattgtcgttcctattttgcatgtaaggatgtgagctccttacatgcaaccggtccggggtctcacggcaaccggtccggggtctcacagccctatgagtttcagcctgaggatttgcatgtgggtcagctgacgaatggaacccctcactccttgggctcataaacagagaaccracacaaacaccatccagagaaggtgagaaccggaagggatgatagttactgcttagttcaaaatctctctgacttagtaacgtgtaggtcactgttaagagggaaatctcctgcgttaaaacaacaacaacaaaaacacaaaacaaaaaaactattgtgaaacagaagttctgtctttgaaaatgtgaattacagccagggcctgtaatcccagcactttgggaggacgaggcaggcagatcacctgaggtcaggagtttgagaccagcgtgaccaacatggtgaatccccgtctctactaaaagtacaaaaaattagccagatatggtggcaggcgtctgtaatcccagctactcgggaggctgaggcaggagaatcgcttgaacccagaggtagaggttgcagtgagccgagactgtgccattgcactccagcctgggtgacagagcaagactctatctgaaaaaaaa

SEQ ID NO: 76489 - DNA, 705 bp, Homo sapiens
agaggcagagtgtatggcagggaggcagcctggactgaatcccactttgccggtcactggcgctatgagcttgggcttgtttccagttatcttgatttgtcagctggggataatcacgaattatyggtaagatggaaatcagggtcatgagaatacaatgaattaaagaagggtgcctggcatacagtaggcacgcaaggaagatcagctttgttcctgttcttacgttcactgcccatgtgaagagcacgtcaggtgccatcacctgcaagctcgccgtggcgcagtgaacgctgcctggggttccagatagcgtggggtgtaactcactcctttgattcccgttagcccacccacgttggaatagacactttgtgacggttcaaatagacactttgtaacagttcaaagatgagaagcgtggacctggagaaggttagcgactggctcaaagtcacacagccaggtaagggtggacttggggctggaacccagcgctgtgcccacccactatccatgcctgctgccccagcactcctggggacatggacgtcatggtgctgtgtgcatgggcacccagtgggttgctggggatgaggatggagctgggcttcactctcatgggtggcgtggcagatgctgaacctaaccctaatcctgcccgcatgcagcatggtggaggggtgcagaaccccgacctacgtg

SEQ ID NO: 76490 - DNA, 1229 bp, Homo sapiens
cttcaaaacagtgatcacagcatgttctgattagggacatcatgtcaacctttcctgctaaatggtgattatggaagttggagctggtccagccagagtatgtgtgtgtgtacgtctacccgcatttatttccaacattcttttctgccagatattttattcagggccaaaataggatttttcaaaattagttgtagaggagggagaaagaacatttccagtagtatgacataaacaggtatataaatatgaattaaacgattgcgtgggggtccccagtcatgattactggagtcattttcagcctgcaagcatgttcctgcccccgcatcttcaagcctcccttggaatagctcacttgtagtaattcttaaggtctcatttaatacacaattttcacaggaaacccttcctttactctctccaaaacacctgactatttgaatcaatgagcgggttactagagaagggcccttggagtttcagaagcatcctgcattttagtaaatgtgaaggattgatgttttgttcatgatgaaagtgctcagcagcatatgtccagtggatctgaggacagtgctactgctgtttcttagatagacatgctactgcatttccgtgttgccaacgcagccactcagcaaaggcctgctgagtccctgccaccagtcaagggctggtttcaccctgaataaggcaggccccacacctctgtcttcccaaggtggctatgaaaggggcatccatccagggcccctgagagtgcagccctgcagaaggcatgctgggcagtcacccctatgtaagagggggaggaaggaaaagaaarggccgtggagactcccagaaaaggctgaaagggaagcagggagagcgattattcagaagacacagaggaaaagcagccttgggaaaaaataaaccataagcaccagaagatgcagagaactgtggcctctaagaagcagaaacaggacattaaggagcaaaaaggctgctctagaaggccatggaataagatgacaagggacgtggaggaaataaggattaccagaaaactgagctacaacagagaaataaaatctgcattggaggcagtaaaaaccaaaagtgacatggagggaaattgacagagtggtgtggaaaaaacatttcacaagccatttaatatatgcagaaagatctaagagctgaaacaacacagggggaggaggcgggagactaggcaa

SEQ ID NO: 76491 - DNA, 1013 bp, Homo sapiens
tgcatgcaatgtgcctgctgaaaaacaaggtttcagggtttcaaatagagagacttacttgtcttaccttttctcacaatcaaccatccctgtataggctctggtgtttcctccaatgtctacagtatgtttgaggaataaagaaaatgaaataacagtcaaggaaraattatgaggcatttcttttttcaaaatatgcaattaaagcaaaaagtacaaaatgcaattttcagatcagtaaggtaatttgtgtttccacagtgcaagtgttacaattattttttaagctcacactgtagtgcttttattcatttactcaaacttgttttgagcccctaatatgtgtcagccaccaaggattacattattagcaaaaactaaataaaaataaaaatagctgggcatggtggctcatgcctgtaatcttagcactatgggaggccaagacaggtggatcatttgatgaaacactgtctctacagaaaatacaaaaatcagccaggcatggtgaccctcacctgtagtcccagctcctcaggaggctgaggtggatggatcacctgaacccgggaggtggaggttgcagtgagccaagattgtgccactgcactgcagcctggctgatagagtgagactctgtctcaaaaaaaaaaaaaaaaggaaatgttgcatgtgttcacgaagctcacaatcaaatgggtgaggccaattgttagtcaaataatctcttaaagaaatctcaccttgtaactgtgacgagaacagagcagtggcccaggtcagtggtgacttatcacagtagaagtggtggccactcaaggaactgatgaaggaactgaaatctgatggatgagcatagctgagcctttgttttcccccaaagtctcagtataattttggaactcacatcaactttggattcagctgatacatgccacgacatcattgaccactgatccttttagaacctttgcacctcactttgggctcagttttcctggtttatttcccat

SEQ ID NO: 76492 - DNA, 1015 bp, Homo sapiens
ttttttaagaccttttactttcaaccagtgtcttaataattaaaatacattttttatagagtttgaagttgagtcttgctactttacctgcctgagaatcactgtcatttacctggagtgtctagtccatttataattcaggttgttattgacatggyacattttatgtcttctgtgctgggatataattttatttatccctcttgttctttctcccagtttctttccttttctgtcttttttaaacaattgaacaagtcaaatactttctagtacgtaattttttatctgttacatgtactttttactcatacctctttggtatggtattatttattggctgcctgtttcctattttacatgggtcacattgccttgctttttcatgttttatcacatttgatttttgttgggtattcttgtagaaaggaatagttaagagtgaagtagatgatactttcctgcaaagaggagtgagctggattctgccaggctgcagaagggcaggtccatcgccctaatttgcaggtgaatggggtctgggtttgctgcagagaggggtgagctggattctgccaggctgcagaaaggcaggtccattgccctgatttgcaggtgaataggatctgggtttgctgcagagaggggtgagctggattctgccaggctgcagaagggcaggtccatcgccctgatttgcaggtgaataggatctgggtttgctgcagagagtggtgagatggattctgccaggctgcagaagggcaggtccattgccctgatccacaggtgagtcaggtctgggtttgctgcagttgtagcttggctcaggtcaccatgtgctgaaatattttgagggacgatcagcagagccaagggtgttaacacaagcatggttccaggccctgtctgtgtttccgaaccgttgcctggcattgtctggaggcctgggaggggctccactcaggcttccactctgtctcctgttttctgagactggttctctgcaagtggg

SEQ ID NO: 76493 - DNA, 541 bp, Homo sapiens
caacgaagtgacaaaaataattgtattcgagtggtggaatgggcgatgcgctttcattgatctagaatctaaattttatttagtatgctttttaaagtaacgcttttattttagaatcattttagatttacagaaaatttgagaagacagtgtaaagaattcctatatatatatcctatccccagtttctgttattatgaacatcttacattagtgggatacatttgtcgcaagtaaatgagccaataacttaatggtattgtagtttctttctttctttctttctttttttttttttgagagtcttgctctgtcatccatgctggagtgcagcagcacagtcacagctcactgcagccacagcctcccaggctcaagctgagcaygatctcggctcactggaaccttcctctcctgagttcaagcaattctcctgccttagcctcccagatagctgggattacaggcacccaccaccatgcccagctaatttttgtatttttagtagggacggggtttcactgtgttggccaggctggtc

SEQ ID NO: 76494 - DNA, 863 bp, Homo sapiens
tccgcccaccttggcctcccaaagtgctgggattacaggagtgagccaccacacccagcctattttcagttttttgaggaatctccatactgttctccatagtgactgtactaatttacattcccaccaacagtgtatgaggatttctctttctctgcatcctcaccagcttctgttattcactttttgacaaamgccatttaaactggggtgagatgatatctcatcgtagttttgatttgcatttttctgatgattagcaaggttgaacattttttcatatacttgttagccatttgtaggtttcatttgagaaatgtccattcagatattctgcccatttttcatttaaatcataattagtctatggctgtggtctgtacccattctgataaatttcatttgaaaatgtgaggcatgtagatgttgcccacagtgaattctctttggccatgtacagaatcacaaaaaaaggtcctgactgaactcattccccaccctccaggtttttctgacgtcgtggactttcaggttgagccctcccatgttcagacccactcccatcagttgtagattatttgcagtgtttgcaatcttggacttgcagtactgcctgactttgtcatactaagtctttgaaagccattgtgtgttttaaatttaagtttatagcatatctcagtttagactagccacatttcaagtgttcactagccatgtgtggctactggccacagtatgggacagtacaggtctagatagtccccatattcttctattcaaaagatgttgttctgagttattcttcatcttaatttcaattaagtcaattaattaaatggtggtaataactcaatcatgga

SEQ ID NO: 76495 - DNA, 901 bp, Homo sapiens
ttatatgcaaatactatactgttttatataagggacttgagcatctgtggattttgatatccatggagggtactggaaccgattccccatggatacgcaagaacaacggaacaccatctctatgattagttcaccacctatggccttataacattctgctataacttcaccagtatatatgtagcacaaatccattttctaggcagaaagcactaagacactttgtctttacaatctttctcatgcctgtttaggaaaaatacattttatgattttaacagacatatttctaagtaaaatatgattcttgtttctccaatatcttgaatatttcttttaaatgacttaaatatggcatttctggaaaaggcagcaagatggaaagtgatctttcactaagaaaggatattataggctaggctyagtggcttacactcataatcctagcactttgggaggccgaggcaggtggtcacctgaggtcaggtgttcgagaccagcctggccaacatggtgaaacccttctctactaaaaatacaaaaataaactgggcatggtggcacacgcctgtaatcccagctacttgggaggctgaggcaggagaatcacttgaacccgggagacggaggttgcagtaagccaagatcatgccactgtactccagcctgggtgacagagccagactccatctcaccaaaaaaaaaaaaaaaaaaaggaggacattatagcttcttccaaaaaggtcatcagcatcaaaacatcttaatgcttatcccatgtgtggtaccagtgcatgggatcccatcagctccaggttttcgctgaagcactattttaaatgactgacaatatattttggtaacaaagctttcagagcagctagtaagattactataatgc

SEQ ID NO: 76496 - DNA, 901 bp, Homo sapiens
ttatatgcaaatactatactgttttatataagggacttgagcatctgtggattttgatatccatggagggtactggaaccgattccccatggatacgcaagaacaacggaacaccatctctatgattagttcaccacctatggccttataacattctgctataacttcaccagtatatatgtagcacaaatccattttctaggcagaaagcactaagacactttgtctttacaatctttctcatgcctgtttaggaaaaatacattttatgattttaacagacatatttctaagtaaaatatgattcttgtttctccaatatcttgaatatttcttttaaatgacttaaatatggcatttctggaaaaggcagcaagatggaaagtgatctttcactaagaaaggatattataggctaggcttagtggcttacactcataatcctagcactttgggaggccgaggcaggtggtcacctgaggtcaggtgttcgagaccagcctggccaacatggtgaaacccttctctactaaaaatacaaaaataaacygggcatggtggcacacgcctgtaatcccagctacttgggaggctgaggcaggagaatcacttgaacccgggagacggaggttgcagtaagccaagatcatgccactgtactccagcctgggtgacagagccagactccatctcaccaaaaaaaaaaaaaaaaaaaggaggacattatagcttcttccaaaaaggtcatcagcatcaaaacatcttaatgcttatcccatgtgtggtaccagtgcatgggatcccatcagctccaggttttcgctgaagcactattttaaatgactgacaatatattttggtaacaaagctttcagagcagctagtaagattactataatgc

SEQ ID NO: 76497 - DNA, 901 bp, Homo sapiens
ttatatgcaaatactatactgttttatataagggacttgagcatctgtggattttgatatccatggagggtactggaaccgattccccatggatacgcaagaacaacggaacaccatctctatgattagttcaccacctatggccttataacattctgctataacttcaccagtatatatgtagcacaaatccattttctaggcagaaagcactaagacactttgtctttacaatctttctcatgcctgtttaggaaaaatacattttatgattttaacagacatatttctaagtaaaatatgattcttgtttctccaatatcttgaatatttcttttaaatgacttaaatatggcatttctggaaaaggcagcaagatggaaagtgatctttcactaagaaaggatattataggctaggcttagtggcttacactcataatcctagcactttgggaggccgaggcaggtggtcacctgaggtcaggtgttcgagaccagcctggccaacatggtgaaacccttctctactaaaaatacaaaaataaactgggcatggtggcacacgcctgtaatcccagctacttgggaggctgaggcaggagaatcacttgaacccgggagacggaggttgcagtaagccaagatcaygccactgtactccagcctgggtgacagagccagactccatctcaccaaaaaaaaaaaaaaaaaaaggaggacattatagcttcttccaaaaaggtcatcagcatcaaaacatcttaatgcttatcccatgtgtggtaccagtgcatgggatcccatcagctccaggttttcgctgaagcactattttaaatgactgacaatatattttggtaacaaagctttcagagcagctagtaagattactataatgc

SEQ ID NO: 76498 - DNA, 901 bp, Homo sapiens
ttatatgcaaatactatactgttttatataagggacttgagcatctgtggattttgatatccatggagggtactggaaccgattccccatggatacgcaagaacaacggaacaccatctctatgattagttcaccacctatggccttataacattctgctataacttcaccagtatatatgtagcacaaatccattttctaggcagaaagcactaagacactttgtctttacaatctttctcatgcctgtttaggaaaaatacattttatgattttaacagacatatttctaagtaaaatatgattcttgtttctccaatatcttgaatatttcttttaaatgacttaaatatggcatttctggaaaaggcagcaagatggaaagtgatctttcactaagaaaggatattataggctaggcttagtggcttacactcataatcctagcactttgggaggccgaggcaggtggtcacctgaggtcaggtgttcgagaccagcctggccaacatggtgaaacccttctctactaaaaatacaaaaataaactgggcatggtggcacacgcctgtaatcccagctacttgggaggctgaggcaggagaatcacttgaacccgggagacggaggttgcagtaagccaagatcatgccactgtactccagcctgggtgacagagccagactccatctcaccaaaaaaaaaaaaaaaaaaaggaggacattatagcttcttccaaaaaggtcatcagcatcaaaacatcttaatgcttatcccatgtgtggtaccagtgcatgggatcccatcagctccaggttttcgctgaagcactattttaaatgactracaatatattttggtaacaaagctttcagagcagctagtaagattactataatgc

SEQ ID NO: 76499 - DNA, 658 bp, Homo sapiens
aaaaatcatgtcaaagaccactggaaaggaaataactcggtgttctttctctttgtgtgtgttattcttatgtctcttgcaaaagaaagaattttagtcacttgacttttttctttccttttttgaagagaggcttcaatttggaaagagtgatttttcttcccaaaggaggaagagtgctgaagagaagatatgaaaggaaaataagtttgttgttttgttttgttttacaaatgtgtttggagaacacagaacattaaatctcatgctttctgaatgacctggcaatcttaaataatcctaccatacaggcaaacatcactccmttctttaagtgttagatttaaatgaatttttaaaataagcctttgttagaagtcctggtggtagaatcctgtggattccagccagtgggtccatgggaatgctatagtgaggggctcagccagctggggaacagagcagtggaacctgctcaggtcacagtcctgtttgaactcaatcttgaatccagttaaatgcatgggaagaaaaagctaagggtccactccttctatcctcccacaactgcacacacacaattaaataaacaaaaagtaggaaaaccagcaggggttcaagttaaaaggaacagccttaaaaacagacctgatttgct

SEQ ID NO: 76500 - DNA, 760 bp, Homo sapiens
aacctctcccctgccagaaatgttcaaaacccccattttgtcacatgatatgtctgtgtaaagtcccctgcattgcaatatacatctcttcacaactatcctacctcacaagactactgagttcacgaaagagaaagaccagtttttaggaggaaaaataagaccactatacttagaaaaaggcagttcttggatggtttgtcaagtaactaagtccayatatttgtttttcatatgtgtgttgtgcgtgtgtgtatacacatagatgtatatgcatctatgaatatttatgacttcgaaaggacaatatgctgaggaaattgcgttgtctacctgagaactgcttttatatttaactccctttctccttcactttccctgcccctctccctacaagaagaatgttagtaaacatcaaactcttaaggtaaaatgttgattctaagatcttaatttctataatagatgagcacttcattacagtgaatgctatgacagagatgttactggacactgggtcctaccagttatttctctctcatatctttatctgtaagtacactcattcactgagggatctaccaagcaatggaagccaaatcaacatactgtaggccaaacgtatatggaaaataattagacaaaggactgagcttagatatctggatgctgatgaaagacagcttgtttaaccaagcttctctacatctcccaccactgaccagatcatccgcaacaccagttgcccacttctcttttt

SEQ ID NO: 76501 - DNA, 1013 bp, Homo sapiens
aaatttacattttaaatgagtatatgtaaataccttacaataacctcttattgtagaaacaaaggtgtgatatatcactcaatagcatgttgttaacactagattacagagtttttagcaattaagcactttcattctctgaaagaaaactgcaaatgagcarctctgaagaaggctgcttagatttgcctcccaaacaagcgtttgtaatcatttcattataagatttagggaacaaatactagaaatatcattcaatagcatgttcccaacactaggttacagagttctgtatttgttaaacagttccaatttctgaaagaaaacagcacaaaatgcctctctaaagaagcttgtgaagatttacctcttaaccgtgtttatgtaaacccatcatcataagccattgtgaacaaaggtaagaactatcattcaatagcattttctccacactagattacagaattctgtatttgttaaacagttccaatttctgaaagaatataccacataatccatctctctttttttttttttttttttttttttgagatgtagtctcactctgttgcccaggctggagtgcagtggcgtgatctctgctcactgcaagctccgcctcccaggttcacgccattctcctgcctcagcctcctgagtagctgcgactacaggcgcccgccaccacgcccggctaatttttttgtatttttagtagagacagggtttcaccgtgttagccaggatggtctcgatctcctgaccttgtgatccacccgccttggcctcccaaagtgctgggattacaggcgtgagccaccacacccggcccacataatccatctctaaagaagcttgcttacatttaccttttaaacaagtatatgtaaagttggcataacaagctcttatgaacaaaagtaagatagtgttgctattgaacaatgtttaacaatattaaattctcaacattagattggagttctctgttaaaagttccattttctgaaaga

SEQ ID NO: 76502 - DNA, 650 bp, Homo sapiens
ggaacctcaaagccatctgaaatctgagttctatatttctaacaagtataagatctgagtggatgacagctttttatttctaaaacgacggaaatgtctttagagtataacattatggttaaaaattattctcctgtggcaatatgtatcatgaaggttaaacatgcctgatagtttaactaagatgtatcatattttatttaaccagtcccctattaatgaaatttagattttttcccaatcttttgctatcacaaacttatgttgtttcatattttttttccccccgagatggattttcgctctgtcgcccaggctggagtgcaatagtgcaatctcagctcaccgcaacctcagcctcccctggttcaagtgattctcctgtctcagcctcccgagtagctgggattacaggtacgcrccaccacgcccgggtaacttttgtatttttagtagagatggggtttcaccatgttggccaggatggtctccaactcctgacctcatgatccgcccaccttggcctcccaaagtactgggattacaggcatgggccaccacacttggctgttgtttcataattataagagtttatctgtataataaattcctaaaaagtgaaacactaagtcaaagagtgtttgcatttg

SEQ ID NO: 76503 - DNA, 646 bp, Homo sapiens
ttcaccagaatgcccttaagtgccaaagatgggttaccagtggctcccaacaagttaacacatgttaccatttgggttggataagggagcctgtgtggcttagtggaaacccatccctgtggtttggtcaataccatatgttcataatgaaaaggactacacattcctgaggaagcaacacaccctccttggggggctttcagggaagtaggagagtacgcattaccaatgagaggagatataccgtacttgctggactggagccatctagggacctgagtgttattagccagaaggctctgcacagactggcctgttggtcctctcactgggggctgatgcaaccgcagcaatgcatatctgtggctcacctgccagtattcagtgtctactctagtatttggcattgaaggcccttagaaatatctgcacaaacaccgagttctaggctttccgatagagtgtagaccacggaggtggcaaaggctttcactaccttttaggatagaattagatgagaacccaggtcccaagaaagccaacagagacctgagcagatcaaacgactctttagcagcctcagtggcaatgctgtaggcatgtctaggtgaaatttcttgscttagtgttcatagcaaacacactc

SEQ ID NO: 76504 - DNA, 787 bp, Homo sapiens
ccaggctgtcattcattcagccccatgccaggcaccaggccctgtgctggagagacagctgtgcttgcatggaaattgttcctgtcctcaaaaccagcatcaaatgggagataaagactcataaaccagtgaatataattctctgtgataaatgctgtgctatcagaacctctctgcaacccacataccccaataatgacctttgataagccttcaagagatcatctagtacagtagttctcagggtgatttttgcccatcaggggcatttgcaatgtctggagatgtttttaattgtcacarctgggggagaggggtggaatctctacctacagggatcttgtgggtagaggctagaatgctgcaaagtatctttcagtcctacagtgcgtgggacagcctctttcagcaaagaattatccagcccaaatgtcaatagtgccactgttgacaaactctgctttagtctatccttctgcctcaagacaggcctgtgctgaacccatcctgagaactatctggcttctctcaaatcttcgtttcatgctgctgggctctgctcggccactgctgaatgggcttgagagagggaatttccttttgccctgttctgatacctggagatagaactgtattttaaaagtagcacaaatggatacaattatttatgtgaggtggtaggaatatctttaggagagcatctcaaattcagggtggagtagatgaaaacataaaatcctgcctggatgccttacatttctttttttgtggaactctctgtcacata

SEQ ID NO: 76505 - DNA, 533 bp, Homo sapiens
ccacaaataaaattaaccagtgtccaagaggttcagactattctcataaacatgaagggtttaattaaaaataaaatataatttgaaaagtaggattgcatttctttcttgcacctagaaataagccaaattgcacattttaaagaaactgacagaaatgaagcagtttctattagtgactaaacccacaaagattgtaaacttcttaaatataaaacataactgcaataacatttttcttttttctgtacatacataataattaattcagtttaaatatmtgatgaatataatttgaaatggaatattaattctaaagttctatagtaataaacatagaatctttgcttcctgagctcttgcttttctcaagccaattcaacatccttaagtctgagagtttgcaggttttccttcacagcctgtctagatgttagtcattggaatatcaacacacttattaattagcattctaaaatattataactgaaaatatttatcactgttgctgcctgatctaatttaaacaaata

SEQ ID NO: 76506 - DNA, 690 bp, Homo sapiens
ccttacagactaaataccagaccatcacacatgagctgaagatgccaggttcttaccccctgcataaaatgtgacttcctggtgtctccaccccattctcccagtgtgcacgtgggcccttagtctgagccactccacattgatttatctcccttaacacacatgagacagaatttttcaccttgggcatgtttaggcaagccccctgtgcacaaggaccagggtgagatttggctatcttctractctatcattcccctcattaaagaagtacatttaactctcattagaataagtacatggataaagatgaagacaatccttaacagcttcttgctgatggagggtgctgtcttgggaaaatggcagtcagagctccttcagaagcctatctaagagtccccagaaaaaaggggccatcactgaaggctttcttgcatggttgtttggagtttgatggcctgaaggcaagaagagacaaaccaggttattagaaaacatgtatcaaaacaaaacgaggggtggggcataagaacagctcaaaaatcctgaggtcttttaccagtgtgtacaggaagatggaggccaaaagcctgacttatacccttttacccttttgctggcatttcaggcttctgggctcttttcccccaagcacaattctaagccaacaagtttaaggttggaaaa

SEQ ID NO: 76507 - DNA, 1078 bp, Homo sapiens
tggcggtcaccaacatagcttactgtgctgatgaagaaatcccttttgaaagccacagtgtgcaatcctaaactcgttttttaagccaaataaaaatcagtgatgtgctggtaattattttaaaacatgattggggtgaaagaatgctttcattgatagggtttgctgatttccattataattttataaaattaatacataaaataaataatactccttcaggagttaatttcattaattaactgcaagacagtaacattaatactgtcagtaacattaataacagcaaaattaatactgctgcaggagttaatctcagattactagcagggcatcatgcagagctgggaattgatgtgaacaatcaactcctgcacactggtctagcacatcactcgataaaatgtgtcttgttggcaagagattattccactctcatttgtgaaaaatcatatgtgaaattccagcaaagaaacttttgactcgaattttttattttttttttaagtttccctgcactgtttaataagtgatctgtacatgtttctttcaggatatgtcattttyaaattctaattatttttatattcttaaccattttaatataatctatagacacacatcttctctaagagtgttttaacattgaaagaggtaggccatgcagaatgaaacagaaaaaggagagtccgggcggggtggctcaggcctgtaatcccagcactttgggaggccaaggctggtggatcatgaggtcagaagatcaaggccatcctggctaacatggtgaaaccctgtctctactaaaaatacaaaaaaattagccaggcgtggtggcgggcgcctgtagtcccagctactcgggaggctgaggcaggagaatggcgtggacccaggaggcggagcttgcagtgagccgagatggggcctgggcgacagagcaagactctgtctcaaaaaaaaagaaaagaaaaaggaaaaagaaatatttctgcaataaagaaaaatatcttaattctatgtaaagatatttttaaatagaattagcttagacagctgaataaaaatcactgaaaaa

SEQ ID NO: 76508 - DNA, 719 bp, Homo sapiens
tctatttttacaaaacaatacagcctaaatcttagtagcttaaaacactaactggcttaaaacactgttttatgttgttttataatttcttatgatttttaaattgactcagaacaactgcagtctttctgctttacgtgctgttgtctggaactgtgttcacctggaggactgactggggctgaaatattcaagacagctggctgacatgctagcatttgttggttgtagcctggatgcttggctggggatgaacagcatgtctttgctcctctcatatggcctttctcctgtttatttgggcttttcagagcatagtggttccaaaaagaaatattttaagatgtgaaggcagaatctgcagattttttaggacgctgcctgagaattacyacagcctctcttctgctgtattctatcggtcaaaaccaatcacagggccatccagatctgtgagaaggggggataggctatattgctcagtagaagaaatagcaaaggatgtgtagcccctttcgatctaacataagtgtcttcaggagaatggaaggagacgtcttctataaaactgatacagaaagaaataaaaaaagattcagaaaaaatagaaactcgaagaaaaaatttaagaatggattataaaaatatattttataagtttctgtccttttcatactttaagtaatgccttttgtcagattatcagtgtgcagtgtctt

SEQ ID NO: 76509 - DNA, 719 bp, Homo sapiens
tctatttttacaaaacaatacagcctaaatcttagtagcttaaaacactaactggcttaaaacactgttttatgttgttttataatttcttatgatttttaaattgactcagaacaactgcagtctttctgctttacgtgctgttgtctggaactgtgttcacctggaggactgactggggctgaaatattcaagacagctggctgacatgctagcatttgttggttgtagcctggatgcttggctggggatgaacagcatgtctttgctcctctcatatggcctttctcctgtttatttgggcttttcagagcatagtggttccaaaaagaaatattttaagatgtgaaggcagaatctgcagattttttaggacgctgcctgagaattactacagcctctcttctgctgtattctatcggtcaaaaccaatcacagggccatccagatctgtgagaagggggrataggctatattgctcagtagaagaaatagcaaaggatgtgtagcccctttcgatctaacataagtgtcttcaggagaatggaaggagacgtcttctataaaactgatacagaaagaaataaaaaaagattcagaaaaaatagaaactcgaagaaaaaatttaagaatggattataaaaatatattttataagtttctgtccttttcatactttaagtaatgccttttgtcagattatcagtgtgcagtgtctt

SEQ ID NO: 76510 - DNA, 451 bp, Homo sapiens
ccatcatcaactggagatgatggagaaataattacaatccatgatgtggccaaagtacacagaggacagtgtaggagcagaagcaaagcttaatggactagggggtcaaagagggctctttcaggtggaaacacaagctaagccttgaagaacaaatcatgacattagaaagagaagcaatcgtttaccaagcagcagacacagcatgttgaagaaacagaaacacagaaacatgaaacaccactggagtctccaagacggtattttcccagtggagttctccttttcctcaatgtgcagatagagattccaaacctgcccttgactctcaccctgacctgccacacctgcatcatcatcttgctaacactgagccagatttcacatggtgagaactgttctgaaatctcrccttagagtcctgaccacgaagcccttaagagtagtaata

SEQ ID NO: 76511 - DNA, 1580 bp, Homo sapiens
atacacttcttttaacaaagcctggccttggtggctttctagcttgcagtctaagtaacgtttggtttgcagaagggattccctgggagacggctgtgtggggcaacctcacttactggttgtgtgttctccatgggaaaagcaccagatggggaagcccaggatcagatgtaagctgcaagcttctttctctcttcaaactgcttgtccactgccagagacagggcctggaggaacccctctatggtgacggtgggggcctagaaggtacacggtcattgctggaggggctcaactcacgtttggtggggccatctggcatccacagcccctgccgccacccacagtgcagatagcacagaagggggtggtagctgataaggtgagcagtgagtgcgcaccacacacgtccaggacgcacatcagccaagctctttacttcagaaaaggcgaacaaggtggctacgtgacccccgcccccgccatgtcctgaatgtcagaaacagctgcgggggtgggcaggggagcaccaaggcagccacccacacactgagaaggatgagaagctgtagggagcagaccctggagggcccaccctatgtcccaggcttataaccagagaattcccatggcccagtgcccagagctgtcacctcccctgcatcaaaaggctcccactcatgatccatggccactgtcacctctgtgctgagcactgtgtccagcacagaggctgctactgatcagacagagcctgagtcacttctgatttgaaaggaaacattccaagatgggggttttctcttctcagatgtaagtgtatctgctctgccagacactgagtccttaccccaaccggctgctggggacagtgcaggggaggggtgagtgccccrggccgaagcatctgcaacaggcccagcacccagtgggtgaggctgtggatccaggtcactgttctatgtgagctgaacccagactgaaagagcacaaacctctggtgaggccagcgagggccctggccacgagctcagcacaccacagaggcagacgtgcatgtgtgtgcatgcatgcgtgtgagcagaggcatgtggcacagccgcctcctcccaaaggactcaagacagcccctgtgtttcggtgccaaggtcagctcctcctccggccccaggaccctgtggtttagaaactgagataaaatgaggctgataccccagggctactaagcggaatctccggcgaggctgagacctgtggacagggcgggtgctggaggacagcagtggagactcacctggacatacagcgcatgagccagaaaggggagttttctcaggacccggccgctgaggccctcgctcttcctgtgtaaagaaaacccagttcagagacagcaatttatacaatcacacgtttcaggactaattttcctcattggccgaggcatccctgggaacacaagccgaggcgtcccaagcacaccctgggttcacagggcacttcctgcccctcactggtctcctgagccttgccctctgaatgtctctttgcccccggcctctcgtatggggccggtctct

SEQ ID NO: 76512 - DNA, 1580 bp, Homo sapiens
atacacttcttttaacaaagcctggccttggtggctttctagcttgcagtctaagtaacgtttggtttgcagaagggattccctgggagacggctgtgtggggcaacctcacttactggttgtgtgttctccatgggaaaagcaccagatggggaagcccaggatcagatgtaagctgcaagcttctttctctcttcaaactgcttgtccactgccagagacagggcctggaggaacccctctatggtgacggtgggggcctagaaggtacacggtcattgctggaggggctcaactcacgtttggtggggccatctggcatccacagcccctgccgccacccacagtgcagatagcacagaagggggtggtagctgataaggtgagcagtgagtgcgcaccacacacgtccaggacgcacatcagccaagctctttacttcagaaaaggcgaacaaggtggctacgtgacccccgcccccgccatgtcctgaatgtcagaaacagctgcgggggtgggcaggggagcaccaaggcagccacccacacactgagaaggatgagaagctgtagggagcagaccctggagggcccaccctatgtcccaggcttataaccagagaattcccatggcccagtgcccagagctgtcacctcccctgcatcaaaaggctcccactcatgatccatggccactgtcacctctgtgctgagcactgtgtccagcacagaggctgctactgatcagacagagcctgagtcacttctgatttgaaaggaaacattccaagatgggggttttctcttctcagatgtaagtgtatctgctctgccagacactgagtccttaccccaaccggctgctggggacagtgcaggggaggggtgagtgccccaggccgaagcatctgcaacaggcccagcacccagtgggtgaggctgtggatccaggtcactgttctatgtgagctgaacccagactgaaagagcacaaacctctggtgaggccagcgagggccctggccacgagctcagcacaccacagaggcagacgtgcatgtgtgtgcatgcatgcgtgtgagcagaggcatgtggcacagccgcctcctcccaaaggactcaagacagcccctgtgtttcggtgccaaggtcagctcctcctccggccccaggaccctgtggtttagaaactgagataaaatgaggctgatacyccagggctactaagcggaatctccggcgaggctgagacctgtggacagggcgggtgctggaggacagcagtggagactcacctggacatacagcgcatgagccagaaaggggagttttctcaggacccggccgctgaggccctcgctcttcctgtgtaaagaaaacccagttcagagacagcaatttatacaatcacacgtttcaggactaattttcctcattggccgaggcatccctgggaacacaagccgaggcgtcccaagcacaccctgggttcacagggcacttcctgcccctcactggtctcctgagccttgccctctgaatgtctctttgcccccggcctctcgtatggggccggtctct

SEQ ID NO: 76513 - DNA, 385 bp, Homo sapiens
ggtttctccagacgtgttgcagcatacaaatggagtcaaaaatcaatatttctcaaagagatgattatcttagttgtatgcttaccccatactgctgaatacagtgaagaggttaaattaatgataatatcacaaatgatgcattataccatatattaaaaccatatgaaaatagacctgttataggttactaaggaaaattaataaagattttaaaaatgcacagaaatgcaattgagctgtgcttcaaattttattgatttaaaaatcaaaaattcaactctaattttcaatagaaataacctgtaaatacagtagattccagatttagtcacaaaatacatattcttaaaaataccatataaaatrtgtgtatatatatata

SEQ ID NO: 76514 - DNA, 385 bp, Homo sapiens
ggtttctccagacgtgttgcagcatacaaatggagtcaaaaatcaatatttctcaaagagatgattatcttagttgtatgcttaccccatactgctgaatacagtgaagaggttaaattaatgataatatcacaaatgatgcattataccatatattaaaaccatatgaaaatagacctgttataggttactaaggaaaattaataaagattttaaaaatgcacagaaatgcaattgagctgtgcttcaaattttattgatttaaaaatcaaaaattcaactctaattttcaatagaaataacctgtaaatacagtagattccagatttagtcacaaaatacatattcttaaaaataccatataaaatgtgtgtrtatatatata

SEQ ID NO: 76515 - DNA, 2824 bp, Homo sapiens
tccaaattaatgtattcaggcaaaaattatttgcccttaatagcatattattttacatttctgttcaccattcatccaaacaataatgacaatagaagtccacaggcagcaccacaacacattatgaatttactctgactttcaattttgcatattttcagtttgtttttttaacttgactcttgataattgcgaatatgaagtcagagaggtttggaaagacgatgctttccattgtgttttattctattttgaggagtctttgatatctaagaatgggcatcctctttgactacatagctgctttctagccattaattgggtatcatgttcttagtggaatgagaaaaacctggaagaaccctcgcccagatttaaataggagtgaatgcttgcattgtttgaacacattcacatatttgaacatctttgaatgagggggttatctctagttatctattaatgatttgtatttactaaattttatagttctttcttgttcttcaactgttttgagtattgagagtaaactatggaaatatgaatatagtgttaagttttaaaaatggtcccataaaacattgaaatctagataattaagacttacctctatttcttttcttaatttttcatgtgtctttttttcttcctcaagaaaacaagttttttcaatgatagattcttttacagttataattttatcctttaagtttgtaatgtcttcctgtatgttgacaacatttgaaatatagaagtcaaaaaaggatgatcaatataaatccaatttttcagtgtttctataatttaagaaaactagccaaatcaaaatttagttttgataaatagcattagaatattacttctatacgtatacaaaaataaagaactgttactcaaagaaaccttacatttgacacagaactaaaaaccaaatgaaaataagacaaaaaggaaagtggtagttatggtggcaactgccgaacaacagtgtaaaagacactttttaattctctagcaagaaatgatcaatattttaagtttgtgtcttctatcgtcttcaaagaacagtaagagaaatagtaagatgcttaaggttcagttattaatttatattgcttgcataacaccattaagtgtactaaattgatttgaattggtctggatccattggcatagaagctaagtctttaacatttttgtgaattacattttctacaacaaatggattaattgttcactgtgattttatttgaccatrtagttttataaatctacaggggatttgtggatgtttcctttatgcatttgagcatctagggtcgttgttatataacacatgtacttattccaagtttttttcaattatgaaaatagtttctgaaggtaataggacagctatgggcattttattaacttcacaataaatttatcatttaatgtatgtacttgcaaaaaaggagtaatagaaaaaatagttttactaagtaattttgcacacctgtacttgtgttattcggttccctcctggattttgaagatcttgcataagttcttctttcattgtctttaattttttaacaaaatctcgcttttcatggagttcagtcataaatgaccatttgctctctacttcccccaaactatttttatgtgcttttatttttgcataatatgcattatattttatcatgtgttcctcaaaatcttcttgggctgtttctatgtcaaatttaagctttacattttctgaatgtaaggatttgatttgagtttccaggctatcacaatgaagtttggtattctctatggcagaatcttgttgataaatttgtctttctgtttctttagtttctgcagagatagctgctatttctttttcaagctcatgaagttcattctgtaatacattttaacattatcattattaattcaaaatattaaacatgagaggaaaatcaatgttttaatccataatgaatataggaaaaatcacttataagaatatatttatcagatatttaaaaattaatgaatacaaggaaacatgcaataaacacaattattttataatttcagaaggacctcagttatatattttttaatgttcatctaattctaaatattaaaatctcattgttttatcttgacattttatatatgtaagatactttataataattttactaatttatttataggcatcagaagtatacactcagggaagacaatatgataaaaaatgataaagccctgagttaagaatcaaaagatctaggtccagcacacttattgctatttactacttcgtatgatcatgcataacaaacttaattaccccattcaaactacactttctccatttgtaaaatgagtataaagatatttactttgcctccctggggcattttgcattgctaactgctgccttctttttaaagcctagttttcacaccaccagtcttctggttctccttagaaatttctgagaattccttctcaatctcaacagttccttcaaatataggtcttctgcagatttcagtcatcataatttcctcttctcactctctatatatgctccttgggtaatttcacccaaatttacatcttcagctacatatctgccgatgattcacagaatataagtggctgctgagttctacacccagctgccaatggccacctctaattcactatatccaaaaattgaatgaatcctttctacaacctcagcctattactccttgtatcaattatctgttgccagaatcacaaaacctcagtagcatacaacaatacataagtatatattgctgacatgact

SEQ ID NO: 76516 - DNA, 2824 bp, Homo sapiens
tccaaattaatgtattcaggcaaaaattatttgcccttaatagcatattattttacatttctgttcaccattcatccaaacaataatgacaatagaagtccacaggcagcaccacaacacattatgaatttactctgactttcaattttgcatattttcagtttgtttttttaacttgactcttgataattgcgaatatgaagtcagagaggtttggaaagacgatgctttccattgtgttttattctattttgaggagtctttgatatctaagaatgggcatcctctttgactacatagctgctttctagccattaattgggtatcatgttcttagtggaatgagaaaaacctggaagaaccctcgcccagatttaaataggagtgaatgcttgcattgtttgaacacattcacatatttgaacatctttgaatgagggggttatctctagttatctattaatgatttgtatttactaaattttatagttctttcttgttcttcaactgttttgagtattgagagtaaactatggaaatatgaatatagtgttaagttttaaaaatggtcccataaaacattgaaatctagataattaagacttacctctatttcttttcttaatttttcatgtgtctttttttcttcctcaagaaaacaagttttttcaatgatagattcttttacagttataattttatcctttaagtttgtaatgtcttcctgtatgttgacaacatttgaaatatagaagtcaaaaaaggatgatcaatataaatccaatttttcagtgtttctataatttaagaaaactagccaaatcaaaatttagttttgataaatagcattagaatattacttctatacgtatacaaaaataaagaactgttactcaaagaaaccttacatttgacacagaactaaaaaccaaatgaaaataagacaaaaaggaaagtggtagttatggtggcaactgccgaacaacagtgtaaaagacactttttaattctctagcaagaaatgatcaatattttaagtttgtgtcttctatcgtcttcaaagaacagtaagagaaatagtaagatgcttaaggttcagttattaatttatattgcttgcataacaccattaagtgtactaaattgatttgaattggtctggatccattggcatagaagctaagtctttaacatttttgtgaattacattttctacaacaaatggattaattgttcactgtgattttatttgaccatgtagttttataaatctacaggggatttgtggatgtttcctttatgcatttgagcatctagggtcgttgttatataacacatgtacttattccaagtttttttcaattatgaaaatagtttctgaaggtaatagracagctatgggcattttattaacttcacaataaatttatcatttaatgtatgtacttgcaaaaaaggagtaatagaaaaaatagttttactaagtaattttgcacacctgtacttgtgttattcggttccctcctggattttgaagatcttgcataagttcttctttcattgtctttaattttttaacaaaatctcgcttttcatggagttcagtcataaatgaccatttgctctctacttcccccaaactatttttatgtgcttttatttttgcataatatgcattatattttatcatgtgttcctcaaaatcttcttgggctgtttctatgtcaaatttaagctttacattttctgaatgtaaggatttgatttgagtttccaggctatcacaatgaagtttggtattctctatggcagaatcttgttgataaatttgtctttctgtttctttagtttctgcagagatagctgctatttctttttcaagctcatgaagttcattctgtaatacattttaacattatcattattaattcaaaatattaaacatgagaggaaaatcaatgttttaatccataatgaatataggaaaaatcacttataagaatatatttatcagatatttaaaaattaatgaatacaaggaaacatgcaataaacacaattattttataatttcagaaggacctcagttatatattttttaatgttcatctaattctaaatattaaaatctcattgttttatcttgacattttatatatgtaagatactttataataattttactaatttatttataggcatcagaagtatacactcagggaagacaatatgataaaaaatgataaagccctgagttaagaatcaaaagatctaggtccagcacacttattgctatttactacttcgtatgatcatgcataacaaacttaattaccccattcaaactacactttctccatttgtaaaatgagtataaagatatttactttgcctccctggggcattttgcattgctaactgctgccttctttttaaagcctagttttcacaccaccagtcttctggttctccttagaaatttctgagaattccttctcaatctcaacagttccttcaaatataggtcttctgcagatttcagtcatcataatttcctcttctcactctctatatatgctccttgggtaatttcacccaaatttacatcttcagctacatatctgccgatgattcacagaatataagtggctgctgagttctacacccagctgccaatggccacctctaattcactatatccaaaaattgaatgaatcctttctacaacctcagcctattactccttgtatcaattatctgttgccagaatcacaaaacctcagtagcatacaacaatacataagtatatattgctgacatgact

SEQ ID NO: 76517 - DNA, 547 bp, Homo sapiens
agaaaggaaaggggacattttacagcatggagactatgatgattaatattgactatcaacttgattggattgaaggatgcaaattaytgttcctgggtgtgtcggtggaggtgttagcaaaggagattaacctttgagtcagtggactgggagaggcagacccacctgcaatctgggtaggcaccatctagtcagctgccagtgtagctagaataaaacaggcagaagaacatggaaggactagactgggtgagtcttctgaccttcatctttctcccgtgctggatgcttcctgccctcgaacatcggacttcaagttctttagcctttgggctcttgggcttacaccagtggtttgccaggggctcttgggccttcagccatagactaaaggctgcactgtaggcttccttacttttgaggttttgggactcagattggcttccttgcacctcaccttgcctatggtctattgtgggacttcattttgtgatcacgtaagtcaatactgcttaataaactccccttcatatatacatctatccta

SEQ ID NO: 76518 - DNA, 413 bp, Homo sapiens
  misc_feature (1)...(413): n = A,T,C or G
aaaggcacgttttatgacagaagaagccttaagacaccgtggcttcaggtgggtgtgggacagtgcctgcaagcataaaatacatgggaagccctgctgcctgagagacatgagacagaggacagaaacatgtttagtstgtttaatctaattgttttagatgtatgggggttatcttggaggatgggttacaacctgtatttttttttttcttttttgagacaggttctcattctctcaccctggctggagtgcagtggcacgatctcagctcactgcaacctctgcccccctggttaagtcattctcctgnnnnnnnnnnnnnnnnnnnnnnnnnnnnnnnnnnnnnnnnnnnnnnnnnnnnnnnnnnnnnnnnnnnnnnnnnnnnnnnnnnnnnnnnnnnnnnnnnnnnt

SEQ ID NO: 76519 - DNA, 584 bp, Homo sapiens
ctcacagtactacactgtgaagtgggtgtaatcatctccactttgcagatgaggaagacctctctgagaagtcctgcaatttgccaacatggcatggatagatagtgatgagcctgggtcacatttggactcttggaaacccaaggccagtattcttgccccattttcacgctgtctggatgggtggatgaggagtgggcatctggggtacacaatgccttgaccatgtacacgctgaactcagctcacaagatctttggtgatccccgcatgcttcccctattctcctctcccagcactcctgggaacatctgctctatctggtctgttctgtctgrtctactcagttttcttgctagtgttgttatagagaaagaaatttaaatgaagagagaaaataaaaagcaatagaaagaactgtcagtgatggcaaatgggaaccaaatatcccctttccaccaagtgctaactttttaagtaggcttcacctctaaagcatatgaagaggccagttgtcaggcatctttgtggagggtgtcccctggtggtgatggtgtaggggggtggggcattactctagacct

SEQ ID NO: 76520 - DNA, 1097 bp, Homo sapiens
attcatttgggtctttctgcacattcctgggctgtgaactgtgtaaaatactttacaatgttaagcattttcctaaggcactaatagtcaatagacaaatgtcttgcaggtaagttaaatttgaaggaattttcatatcctcttcccaactatttgatctttgttaatagtgtgatatccaatagtttcctattttagaaatttcattgccatctatccatcaaatcattcattatatatgtatttagcaaatatttactgagtgcctactgtataccaagcactgtgctaagcactaaggatttagtattgagcaaaacatatgtagttccctactgtcatggagcttagtctttttgtcctcatcacttgctcacccaccatgattccatcctccatttaaacttgtagtaaatttccagtctcccaataattcaatttgagaattattgcttgggtctgtcattctgtttctttgctattcctgtctcaggtcatatccacttcatctcccctataagactgtaattcctgatctccctgctaccaaagtagcttgaccatagtccacatcccatacagcatttgtaaaatcatcctcttggaaataaatctgatgataaatcttagtgtaactgtgagtgggtcaaccagataagtgcctcccaatgggatgcaatataaagtactcagcaccacctgggaagtattcctgcccttaacaaactaaagttgaattggattaggccttttagagtaaactacaagttataggaaacagaaaaggtagaagaaaatgttaaatgaaaccaamaaggaagcaaacagacaaatggagtatatgaaaaggtcctaggacattacatcaggtttctccagtaactcaacgttaacaaggtggagggaagagaaagtgctctcaattaagatctctaagaatcattacaacctagtacaacatgagacagtgattggggtcccaatttgagcaaacatactattaaaaagatatgagacatatgaatgtagacctgattaaatgatgccaataaaatatttttaatttagttagcttagaaaactgattgtggttggat

SEQ ID NO: 76521 - DNA, 665 bp, Homo sapiens
ttgcatacaaataaattgacatacttcaattgcatttccataccatgattcattatgttgttttctgtgaaatttactctaatctsccaactacagtatttataagcagtgtgtcagcctctcaccagcagtgagtgtcgccaaggcagcgcttttgttgtcatggcagtgatggatcatcaatgttcggtagcagacctgtaatttgcaaattgaatgacaggcagcattgaaaatgcactgcagtggccttttctaggtaagttggaagcttgtggtatgagagttctctctctttaagtcgtgttttattttagtcttcacaccagtttgacatttagattcagagagtataaatgagatatttaggttttgaacttaaaataaattctttgtgtaatagagcagtaaatattttactttttcaaaggatgctaaaactcatttaatcaggttacagttttgtgctcatctttccccagtgcaagccttggtctcttccagttgaaatctgtatcgttatctttctgtgtttgatatatatgaaggattgaacaaaagaagagaaagaaaaaaaaaacagcatctcttaagaagtagcatctatttttgtcattaccgttctttttcataggcaaagtcaattattctctagcctggaattc

SEQ ID NO: 76522 - DNA, 580 bp, Homo sapiens
caatattcaaggccaaagtctgtccttaattactaacacaatttccagtgcactgatgatgagggtcactgaaagggacygtttggttgggatgctcagaggtggaagctccgcatggactgaggccacagctcgggcaggcgggcaggagcagcctcttctcatgcctctagttatttgaaatggcatgaatccaggacaagactcacccctgtgagtcccacagaaatttaaaaatgtccttcggagtatttccctttatcaaaagtgtaatttctacattcctatttcaattttatttggccacttctcctcaagtaaaaccaatgaaaaatataatatatattcttatgcttggcagttactatggagctaccatttatcagcactaagacagatctttacactgtctttcttcttctaatcctgacttttttcttccaagtcacaaattatatatttaagctaaagtttcctagtatgcttgtaattcaaatactgacattttattttactcttaggcagttaatttcctacagagaggttaatttccccagtaccattttgtattccaaggaaa

SEQ ID NO: 76523 - DNA, 580 bp, Homo sapiens
caatattcaaggccaaagtctgtccttaattactaacacaatttccagtgcactgatgatgagggtcactgaaagggactrtttggttgggatgctcagaggtggaagctccgcatggactgaggccacagctcgggcaggcgggcaggagcagcctcttctcatgcctctagttatttgaaatggcatgaatccaggacaagactcacccctgtgagtcccacagaaatttaaaaatgtccttcggagtatttccctttatcaaaagtgtaatttctacattcctatttcaattttatttggccacttctcctcaagtaaaaccaatgaaaaatataatatatattcttatgcttggcagttactatggagctaccatttatcagcactaagacagatctttacactgtctttcttcttctaatcctgacttttttcttccaagtcacaaattatatatttaagctaaagtttcctagtatgcttgtaattcaaatactgacattttattttactcttaggcagttaatttcctacagagaggttaatttccccagtaccattttgtattccaaggaaa

SEQ ID NO: 76524 - DNA, 1062 bp, Homo sapiens
gtaagagacatttacaccccagaatataagggcagggcagcctcaagtgacatcaccagatcatctgcagcgtcaaccaaccgactcaaatatatatcctccacaccaccactcccctctttytctcactattagcaagccttccatagtcttcatgtttcttctttaaaagcaagacctatgcttactcaagtgaaaagcaaataagaaaaaccaaaggaaaagaataaaaaactagcttgagtacaattttcactaaattgacattcggatgataggaataacactaaaatgttaaaggaaaatttaacttgaatgatctagacagataatgaataaaagagaaagtcaggaagaagcaaagagagggaggagaagaaagaaaagaaaaataaattaaggaaaagaaaaaaaaaacaactaaatatccctgaaacgaagtcttgtttttaactctgatttgtcctgaaaccaggcaactgtgggaatcttgaaattctttctaaaaaaattaaataacaaagaggaagaggactccattgcttggtttcagttctcttctaatttttcatagcttatgttttacttacaggcgtttgttacagcaaaactgttggctgtctcaatgttgtccacatgaggtaccaaattaaaaggagcttccgacgcattggggctggtgttatgaagaaaaattgctaatcgaaaagcagtgtattcctgatctgtgtttcggatgaagagaccacctattaaaaacagcaggaaaagcacattcactgtttcctcttgtcaacattatacccaccccaagcacagtcaaatctactgccattcacaagcacatacaattaaagagctatacctgccacatctagggagactgccctttgtccctaaggtgcatgcttagtatttagtctttagagcagctcagctttttcttgtcctaatgtgtcttgctcacaatgacctctgagaccatttagtgaatgttcctttctctcccttgccctccccctgattcccagcacactgctacatcagccacctcagggcagc

SEQ ID NO: 76525 - DNA, 1149 bp, Homo sapiens
gcattattcgtggttctctagagattgtagaattctgggtgatttttattttcttttgcatacttttatcccagacaatatcattcaaactaaaatttattgttgctattattgtggtcattttgatattgatggtttaatatatcctttaaaatcatcacaataagtgataaatacagactttttaaagccaataaattgtaatctgttgtgcatgtatactaaatcaaattggttatgcttttatgtattgttattatagattgataatatctactaatctctcactgttctgaaatagtgggtgggatgcagctacagatgaaattgataactagattcctcataggaattttgtgggtagggatagatattgcacataagtaaaatatttgatcgtatggtacaaatgtaaaatattacttgagatatattttaataaaatcacaaaaaagtgaacatgaagcctaccctaagaaaataaatattaagtatgtaataagggagattactttcaaatgaaatattaagtttcatggattgatggagaaaagtgggtgaagtttgctttgcaattggagaaaataaaatgtgtagggccgggagtggtggctcatgcctgtaatctcagcactttgrgaggctgaggtgggaggatcacctgaggtcaggagtttgagaccagcctggccaacatggtgaaaccctgtctctactaaaaatacaaaattagccaggtgtggtggtgtgcacctgtagttccagctacttgggaggctgaggcaggagaatcatttgaacccaggaggcagaggttgcagtaggcggagatggcaccattgtactacagcctgggtgacagagcgagactctatctcaaaagaaaaaagaaaagaaaatgtacaaaacccaaaaccaaacaaattaaaatgcttctagaacaagtataaaagcatgcagattgtcttgcttggaggtagaatccatatcaaataagcaaaatccctggtaacatgggcagagaaggaacatatcaaatggacagaaaaattgagtatcagacaggctatgaaaaggcactgaagcggggttgtatgttttctactggtagactttctgggcatttgcagagttttcattctagatgca

SEQ ID NO: 76526 - DNA, 566 bp, Homo sapiens
cagacagttccaaattttcgggtaaatggaagtcatgtagtccaactacatagtaattaataattttttttcagtgactgcattatactatagcctatatttggccacagtgttactactatattcataggccgtctgctccatcgcttttcttccaactaagccaatacaaaaatcatcctgaggcggatatgtttctagatcatctagtagctaagttacagmagtctaaacttgactatttgagtaaatttaaaaatcacccctcccctgcaactctctcacacaaatcatcaacttagcaaaattgttatttaatcaaccattgctaaaattcattgtgaaattgatttacttgcatggtaaaatgttaaaacaccaggctaccaaaatgagatatatgcatatttcataaacatgattgtaataaatcggtagaatgtttcactattaaatagaagaaatacatattaaaagtgctcactatccagttccacatatatttacacattctccatgctttataaatgttgcaggcaaataacaagttctacttgatatgcaaa

SEQ ID NO: 76527 - DNA, 566 bp, Homo sapiens
cagacagttccaaattttcgggtaaatggaagtcatgtagtccaactacatagtaattaataattttttttcagtgactgcattatactatagcctatatttggccacagtgttactactatattcataggccgtctgctccatcgcttttcttccaactaagccaatacaaaaatcatcctgaggcggatatgtttctagatcatctagtagctaagttacagcrgtctaaacttgactatttgagtaaatttaaaaatcacccctcccctgcaactctctcacacaaatcatcaacttagcaaaattgttatttaatcaaccattgctaaaattcattgtgaaattgatttacttgcatggtaaaatgttaaaacaccaggctaccaaaatgagatatatgcatatttcataaacatgattgtaataaatcggtagaatgtttcactattaaatagaagaaatacatattaaaagtgctcactatccagttccacatatatttacacattctccatgctttataaatgttgcaggcaaataacaagttctacttgatatgcaaa

SEQ ID NO: 76528 - DNA, 733 bp, Homo sapiens
gcaatatgtttttattgtctatataggttctctgtatatttcaattcctttcttagcgytgcaaatatttaccctatataaatataaaatatttaccctgtataaaaaagagggttgctttgtgtatgattgattgagcttatctatattatgctgataatgtggaaaatgtggatctcccataactcatacagtgatagttcctgaacctattttcaaattgaaatagcactgtcaggaaatggattatagtttgctaagaattgattacagtagactcctaataaatattttgattgacttattgaaacaaccaaatgattttttttgatttcataaaatcatatgctttattacaatctgacattatcacactccctaacgcatttgccattacaaaggtgccagaaccattatagtttatatttcaactaaaaacatatatttgttaattatatttctcagtaaactgaattaaacaaatacctctaaagtaacacatgaataataggaacaaggcattagaatgacataaatatattttggtttactatttctggatgacaattttagcacctagcctatttatataaagagtatagactttcttccaatcttgtatgtaaataaatatttaagtaaagtatgacagataaaataaatgtttatacaagaacatttaaatttattattttagtattggttcagtgccttcttgtagtcaaattatacc

SEQ ID NO: 76529 - DNA, 851 bp, Homo sapiens
catagggagtcatcaaagctaagaaattaacatcggtacaggtacagacttcattcagattttacaagtttttccaccaatgtcctttttctgtttcaggttcccatactatttagttgtcatgcctccttagttccctcgaatccgatagttccttgactttttcatctttcaaaaccttgacgctttctttttttatttttattttttgagacggagtctctctctgtcaccaggctggagttcagtggtgtgatctcggctcactgcaacctctgcctcccgggttcaagcgattctcctgcctctgcctctcaagtagctgggactacaggtgcaggccaccacgcccagctaatttttctatttttagtagagatgggttttcaacatgttggccaggctggtctggatctgctgacctcatgatccgcccatctcagcctcccaaagtgctgggattataggcatgagccaccgtgcccggcccttgagtagtggaattataggcatgcaccaccacgccgagctaatttttgtatttttattagagacggggtttcgccatgttggccaggctggtcttgaactcctgacctcaagtgatcctcccaccttggcctcccaaagtgctgggattacaggcatgagccaccgtacccagtcccccccaaattttttttttaaaggttcaggagaatagatctttcgtcagtaacttctatgaatattcaggtaagataaggagaagcctgaagattacaaattcctgtcatcacaaagtaatctcagtggaacaaaggtctttgctaacaamcgactgaacatcactctgggatgctctggtacaa

SEQ ID NO: 76530 - DNA, 763 bp, Homo sapiens
acagggtttctccatggtggtcaggctgggctggagctcccaacttcaggtgatgcgcccgccttggcctcccaaggtgctgggattacaagcgtgagccaccgtgcccggcctttagctactattatacatattataatttaaaaattattagtaccgaagcctgagacaggagagaaatggtaaaaatagtagggactgcgggagagagaaagagtagtgtcccctgacaagtactagaatgacataggtgccaccattaaacgaaactagctaggatggttactttcgattaacactttgctactcaagagtgtggtctgcggcatcaccaggagcttgttagaagtggagatctcagacctacctcagatttactgaatcagaatcgttttttttttttttttttaacaaactcttcagcaggtttagatgtagctttgtttggaggaagtgtgagattcgttttaggatttctcaaggagttccagccttcaatcagtgaccatggggatctggcaggagggcttgaatttctagctgattcttctattctgtcttaccctcctgtcttccatcatttctgcattgctaatctctatccctggagaaatctatggaactgctggttattactgtagaaagtaacatagttgccaatagtacgactttgtggatgtcacagtcaaaactcaactgcctggctggcacagtggcwcacctgtaatcccagcactttgggaagacaaggcggcgggcaggg

SEQ ID NO: 76531 - DNA, 678 bp, Homo sapiens
cagtttcaatttctgcttagaagaatgatgtcagtattctagcaatagtgatggcatcccattattgtaaatgcagaaaatgataatgtctgtacaagtgaatctatattctatgtgaaagttttcaatggtgcaagtttataaccaaagctgggtttaacagatgctttctgacttctgaaaacatcataaaawtccttcctaaagtgaacaaactaaagttacaagtaggtgacaccagttgttttttccctttatgcgtgatgaacttcatgaagcattaactcctgaggtatatttatttctggactatacaacttacatcctcttctttcaaggcagctaccatctgctttacaacttcatcaaaaaacaatgtggcaagctgagagtgtagaagagattgcaattcaaaagaaattgaaaaatcagaggtacacatttttcagtagcctggaagacctgggctaaaacaccagtctccaaatgatcgagaagtttcccatcaatacaggatgcctttccaaaatgaggtttcaccaaggttactactgatgtatattgccccaacacaggtggaaacccaatttctaattgtgttttacaatatccggatgtctttgatactacatttgatgttttacaccaaggaatgaaatgcttgtaatcctctattcc

SEQ ID NO: 76532 - DNA, 657 bp, Homo sapiens
cagggccaggctacatgagtttcagtggctccaccactcaatctgtaaatctcaggctggtatgagattatcgaagactgttgggcaatgtgcttctgaaacctagctcctctccacccctcactaacatacagagatagcactagaaataggcacattgctaggatgtatttctagattagaattgggtccctccataataagtggaagtacctgcccttgtagaatgaccagcttgtccctgtttatttggcatttactcagcttagcactaagtttctcatacctactttctaaaccagttgcaggcagaccaaatggtcagcaatcatgtaacagcaaaaggtaatgaataaaatattaacacattgtgcctagcgtacttagaattcccctagagaggttcactaaataaattgaagcttttaattttatagttattaaatataaaggaatgcttgagaaaatgagaaattgccaaggcaaattaaaccctagctattcaacatgtgtgtctttgaaccaataatgcccacatcaactgggagcttgatagaattgcaggatctcaggccccaccctggactcgctggaccagaatctacattttaacaacgtcacctgggtatctctaygcacagcgaagtttcggaggca

SEQ ID NO: 76533 - DNA, 715 bp, Homo sapiens
attaaggcaattaacagttcaatatttaaaatatttttgctataatgggctcaaactctatttaagagaaaaaaacatcaattactttttaaattattggtaaaattgttgaatttctccccaataatatacgcaggtttaatttaagtcttataaacatgaagcacattaagtcagacaccccaaatgcaagcccagatcatgttcatttcggaaggtcagaaaatctcattttggtagacatgcatcatctgtgatgatgccttgattaaagtgaccctaaaggggcaaatgtgcatttgggttttggaacgagcttatcattacttctgcagaagtgaagtaatcaagacttttatcacttcttcttcctcccatagatctttagaaggaacactgtggtagtggatattcacattaaaagagaaacaacaggaggaaaaggcacccgacaaagggaaatattttcgagtcaaattttcctgcacctaactagcaagcttaaaatgaataggcttaatacccttaagacagtaatatttcaaaacacatttatgtatattaatttaaactttatcaagaaacagaaaatagataggagtgtgggaaaaccaaggcatgagtgaatgagttacctgtatccaccttcacaagtttcttcaattctaattatcacacgagacactgyctatccactgtcatgtgcatggggtga

SEQ ID NO: 76534 - DNA, 643 bp, Homo sapiens
gcagactgaagtttaagaaagtaagagtctgtgaacctgataattgacagaaataaatatccatactttagaaagagtaacaagatagaaaatataagcaatatgggacaatatcaaaatgtctatgatttggcagaaagagaagaaatagaaaatgaagcaaaaaatatagttgaagaaagagtggctgaaatttttttcttatatagttagagatataaattttttaattcaaaaaagatcaggcagcatcaaacagacagactataaaaaaatactatctagacccatagtcaaactaatgcaaattaaacaaagaaaatcttgaaattaatcagagaaaaatgaaacattacataaaagaaaacaatgaatgaaatgatgccaacattttactagagactgtggcagacggaaggcagtaaattaacatctaaaagtagtgaaggaaaagagctgttaattgagaataatayatagaaaaaatatgttcttcaaaaatgaaatcaaaacaaatacctatgctgatgagataaaactaatataatttgcccctagcagacttgcactgcaacaaaagttatagaaagtgcttcagatataagcgaaatgatctcagatgaaatattggcatttcagaaaa

SEQ ID NO: 76535 - DNA, 648 bp, Homo sapiens
cattccttcaaaacggaagatcaatgtgacatcattcccaactttcccatcttttccaaacaaataaaaatcctggattaactattttgaaaaataaartatgttgccaaccttgaaagcaatttgaattattcggaaacaaatgggaaggtcacaggttacagcagttataattacatcagaagctgtgcagttctagtcccaaagaaaaagctcctattccttaagtttcccatattagactttagagttacatgttaatttgtctgtacactgagtttaaaactgctttgtactagcatccatcatgcagccttatttctgccttttagagtcatactgaaagatttaacatttttacgtaaaggaattctttgcaaatataaaaatagtttttaatccaattgctacacttcttttttctttttttaaaaaattatccaacttaaacttagtttgcatcctttcattgttcctcatgagaggggctcactcaacttggcctcagtcttttgcttgctgccatttaacaatgttcttcatgtctgaggccccaggtataagccaagtttccaggtgtgactgtgaatatttcagggaataggagggcagaccagccctctctttgctctgaaaccatactgtaat

SEQ ID NO: 76536 - DNA, 414 bp, Homo sapiens
tatcygaagaaaatttactaaagtaaacacaacatattttagaagaaaaaaatcaacatccctcttctaaaatgagaggtgagatcagaaataaatgtcctttagattcaatctttaagctttagctttattttttttattattttatacctactttatgaagaccctgtaggagtctaaagcctgaatcagcttttatgaaatagtatgcatcaaactgagatgctctcagtgggcagatcatttgaagctggtgctgccagaggagacactggtagttttagaagcgtttgcattttagaaaactgttttttcccacctgaccaccaataaattgtgaagtcttcaaaacttacgtctgacagaggaaaagaaaaagctattgtgtatttttgaggtctttcttttgtatgt

SEQ ID NO: 76537 - DNA, 714 bp, Homo sapiens
ttaaggcaattaacagttcaatatttaaaatatttttgctataatgggctcaaactctatttaagagaaaaaaacatcaattactttttaaattattggtaaaattgttgaatttctccccaataatatacgcaggtttaatttaagtcttataaacatgaagcacattaagtcagacaccccaaatgcaagcccagatcatgttcatttcggaaggtcagaaaatctcattttggtagacatgcatcatctgtgatgatgccttgattaaagtgaccctaaaggggcaaatgtgcatttgggttttggaacgagcttatcattacttctgcagaagtgaagtaatcaagacttttatcacttcttcttcctcccatagatctttagaaggaacactgtggtagtggatattcacattaaaagagaaacaacaggaggaaaaggcacccgacaaagggaaatattttcgagtcaaattttcctgcacctaactagcaagcttaaaatgaataggcttaatacccttaagacagtaatatttcaaaacacatttatgtatattaatttaaactttatcaagaaacagaaaatagataggagtgtgggaaaaccaaggcatgagtgaatgagttacctgtatccaccttcacaagtttcttcaattctaattatcacacgagacactgyctatccactgtcatgtgcatggggtga

SEQ ID NO: 76538 - DNA, 551 bp, Homo sapiens
tgagagcagcatacgaatactttcaaatatgcaaagtcttaaaaagagagaagtaaaagggacacatggaattatgatgaagagagagtctcaagataacaattgtgtactagggtagaaagcaatcagtctggaatagaaaaatcagaacaattccatctggaaaagatggtttcgagaaattgaaattratagaatatttgatatatttgaaaatataaagagaacatttaaacattatgagagtatttagagctgaggtttgtgaagagctccagaagcactttttgatgatatctatttacatatctgttctaattaatgataactgcattgaaaactaagcaaattataaaataagacaactaatcactaacttctaggaaaacaaaaaatgtacaagacagaaaaagcaagagtatatatatatataaaaacatggttccatggtgagcagtgtttacatagtcctaattatgtaaacactgattattgatacattctacattatcatataaatatactgtatcgagacaataaggggatgagaa

SEQ ID NO: 76539 - DNA, 551 bp, Homo sapiens
tgagagcagcatacgaatactttcaaatatgcaaagtcttaaaaagagagaagtaaaagggacacatggaattatgatgaagagagagtctcaagataacaattgtgtactagggtagaaagcaatcagtctggaatagaaaaatcagaacaattccatctggaaaagatggtttcgagaaattgaaattgatagaatatttgatatatttgaaaatataaagagaayatttaaacattatgagagtatttagagctgaggtttgtgaagagctccagaagcactttttgatgatatctatttacatatctgttctaattaatgataactgcattgaaaactaagcaaattataaaataagacaactaatcactaacttctaggaaaacaaaaaatgtacaagacagaaaaagcaagagtatatatatatataaaaacatggttccatggtgagcagtgtttacatagtcctaattatgtaaacactgattattgatacattctacattatcatataaatatactgtatcgagacaataaggggatgagaa

SEQ ID NO: 76540 - DNA, 551 bp, Homo sapiens
tgagagcagcatacgaatactttcaaatatgcaaagtcttaaaaagagagaagtaaaagggacacatggaattatgatgaagagagagtctcaagataacaattgtgtactagggtagaaagcaatcagtctggaatagaaaaatcagaacaattccatctggaaaagatggtttcgagaaattgaaattgatagaatatttgatatatttgaaaatataaagagaacatttaaacattatgagagtatttagagctgaggtttgtgaagagctccagaagcactttttgatgatatctatttacatatctgttctaattaatgataactgcattgaaaactaagcaaattataaaataagacaactaatcactaacttctaggaaaacaaaaaatgtacaagacagaaaaagcaagagtatatatatatataaaaacatggttccatggtgagcagtgtttacatagtcctaattatgtraacactgattattgatacattctacattatcatataaatatactgtatcgagacaataaggggatgagaa

SEQ ID NO: 76541 - DNA, 592 bp, Homo sapiens
gggtatcaacatgcctttgtgctgatcacagttttttcagaatccaattctcaagacaaaattagggtgggtatgtttacacactaaaaactctgctaataaacactaatatttcaagtatccatcttacttatttaatttttctctcatttttagagatagggttgatttgatgttattttcatgtactcagactcctgattaaacacattttcatggtataaatctattactctctacctagctacttcttaaagcctttttgcctttagggttctsatgacgttattactgttacagacacatggatattaagtgtttacattaagcatctgtctgtaggagtgaggctgtggattcaggctgtgcaagctgtgaaatgcctggatgtgagtggaggaaatggctaagtaattgcactttgtgcatacccattacagcacttagagtgggcataatgcttggttgggtgtctgaccagaagcccaggagagaagaaactccttggaaataaatactctgtattatctttctctgtattacttccattctctccaatgattaccaaatagatttatattgactaactaac

SEQ ID NO: 76542 - DNA, 2146 bp, Homo sapiens
ggcctttgtgcaaggttgtggcttttggaatcttttgtgatagttgttatcaggcataccagcatgagaaccctcctttcatggccctccgtgactctatttgcccccttcattcatgcaacacatatttattgcacaactactatgtgccaggtactgcaacaggctgcatttggcaatgtctgaagacatttttggttggtgggagtgctgctgccatcccgttgtagggaacctgggatactgtttagcacttgaccaatatatgggacagcccaccctacctccccaaaggattatgagacccaaatccattgacatttgtgctgggattgagaaacctcgcttcagtgggattggtccaggttgtagcatacagggttgttgccatggagacaggcagataacgaacctgttcagtgggttgagagcagcatcccaaataaataaataaataagagaatataatagaattaaaaggcatcaggggctgggcacggtggctcacgcctgtaatcccaacagtttgggacgctgaggtgggtggattacctgaggtcaggagtttaagaccagcctggccacatggtgaaaccccatttctactaaaaatacaaaaaattagccaggcatggtggtgggcaccggtaatcccagctactcgggaggctgaggcaggagaattgcttgaacccaggaggcagaggttacagtgagccgagatcgcgccattgcgctccagcctgggcaacaagagtgaaacatcttctcaaaaaaaaaaaaaaagaaaagaaaaaagaaaaaagtattttcatcatgcatctataagcaaaactggtcacaatggtaggaagtggtactggtacactggtacacaatacattgcacactggtacacaatgtgcaatgtatttcttaccatggatcccagtctaaaaagactattagactttttagctaatagctaataattaatgttagctcctgcatcagctcatcgtctgataggcagcacctgccttcctccctacctcatctctttgcctcgttctctcaatactgggagtcactgagaaagaggatgtctcagatcacaggggagctgggtcagaatcactagggtcttacagacccagtctgcccagggtcaaagcccagccctaccacatagcagctatgtgcccttggacaggttgcataactaactgcgccttggtttccttttctgcaaaatggaaatgataataggacgtacctcctattgtcctccaagttgttatgaggatttaatgaattcatatctgtaaagagcttaaaagagtgcctggtacatgttagtgttccctgttagctattatcattatcatgacttgctctagaatagcacttaccccagagtgtaattctttttattattaggggaagggggcaatgtgggttcagagtcactgagagggggtggatcagagccaggataaggatgagaagcccggctcagattcactgtgtgttggggacagggttggcagagctgcaagtgctaggacaagtgcaccaaacaggtctgacaagggttaaatgaagcagatgggattgttcagggtgggatgaaaggtccagggagggtggggacaatcaggcaggctgcctccctgcaccgcagtgtttgtttccttgacaggtgggaggcccagctccactcaggtatgtggccagaccagccagggcagccccctggacctctcatcccaggcagagatgaggagagggacagggtggggccctccagcccaggatggccccggcccacctcctctctcccacccaggaagggctgagccactttggacaatgggctgagtccctggccccattcagccccactggcctggcctgtccccacagggactgctggaggtccttggggggatgttggcaccaactgctcctttgtcttgctacttaccctagaaagaacaagctaagggctctcctccccaatctgaggaaagcaggatattttgccacgagcggcaaaggaggacccctgctgccccagaggaagaggagggaaaacatatktacccacacatgcacacacacaaacactcatgcacacatctctcacacttatgcacacacaaaa

SEQ ID NO: 76543 - DNA, 556 bp, Homo sapiens
tgcctgagaaagccgatttgaactggtgcaagttggcctgtggcaaatattttggggtgtgtgtgtgtgtgtgtgtgttgtgtctttttgttttgttttttttacaaaactcaggtctggagcagccagacactgcaatgagaagatggcgttggagaagagtttatggcttatacatttcttcctcccacacattgctttgggatgatctctgtctgccacatttacccagacattatcagcaaaagcccaggctagatgacgtcagctgtatctaacagcrtagcctttaagccaattacaaggagaagttgatggaaagaagtgcagactaatcagatatacccttccaccacttccaaaccctcagctaaggagagaggcttccagctccagcttagaaacatgtagagagcttggaaggcatcactcacatcctcaccacaagcaaaaaggtaaacaaactgaaaaccagcgattcctcttagatccatcagatagctgaggtcacaggacacactgccaccctgaaaactggagaagtaggtggatacag

SEQ ID NO: 76544 - DNA, 556 bp, Homo sapiens
tgcctgagaaagccgatttgaactggtgcaagttggcctgtggcaaatattttggggtgtgtgtgtgtgtgtgtgtgttgtgtctttttgttttgttttttttacaaaactcaggtctggagcagccagacactgcaatgagaagatggcgttggagaagagtttatggcttatacatttcttcctcccacacattgctttgggatgatctctgtctgccacatttacccagacattatcagcaaaagcccaggctagatgacgtcagctgtatctaacagcatagcctttaagccaattacaaggagaagttgatggaaagaagtgcagactaatcagatatacccttccaccacttccaaaccctcagctaaggagagaggcttccagctccagcttagaaacatgtagagagcttggaaggcatcactcacatcctcaccacaagcaaaaaggtaaacaaactgaaaaccagygattcctcttagatccatcagatagctgaggtcacaggacacactgccaccctgaaaactggagaagtaggtggatacag

SEQ ID NO: 76545 - DNA, 621 bp, Homo sapiens
cttgggaagctgaggcaggagaatcacttgaacccaggaggtggaggctgcagtgagccgagatcgtgccactgtactccagcctgggcgacagagtgagaccctgtctcaaaaaacaagaaaaaaaacaattgcaattcagggcatacacacagaccaggtggtcctcgatatgtccaaagaatgaagaggaagttgtaggttttattagaaggagaaatgttacatattgtttttccagaaagttcattggcactagtcgagttttggggagctggcaagctctgactggtgagtgaccatggtgggtaaaatttgtctttgagttgcagcaggtttttcagaagccattagataaaactagttactacaggcagtttcagcagccaggctcacagctaattgcattttgggagcaatgttatgtgccctgcctgctttttttccctgacttctcaactctggtttagtagttggatacaacaagaaggacccaattcaaatgatcagatttcacaggtgtgtgacgttggttaggcaaatcactgtatctctttgtgctttctccttcatttgyaacacgtaataaaaaaaaaatgcccatcacagctgacaattaac

SEQ ID NO: 76546 - DNA, 557 bp, Homo sapiens
accatgaggcctagagaattggattttctttgctaagtgggtggtattgcaaaatgggaactattctgttcaaagctggttctaggagtgttttgaagtagatgaactttccctcagcctgcctttctgaaatttgttctttttttaaaaaatggttaattcacttttttcctaatgtagcttatgttcttctactttcttacttgcttaggatcaacatctgctcttaggaaaacacttacttttttcttttttctttttttttttyagacagagtcttgcttgcttagtaacccaggctggagtgcaatggcgcgatcttggctcactgcaacctctgcctcttgggttcaagcgattctcctgcctcagcctcctgagtagctgggattataggtgtccgccaccacacctggctaatttttgtattttcagtaaagatgggtttcgccatgttggccaggctggtctcaaactcctgacctcaagtgatccacccatctcggcctctcaaagtgctgggattataagtgtgagccaccacactggctggaaaa

SEQ ID NO: 76547 - DNA, 557 bp, Homo sapiens
accatgaggcctagagaattggattttctttgctaagtgggtggtattgcaaaatgggaactattctgttcaaagctggttctaggagtgttttgaagtagatgaactttccctcagcctgcctttctgaaatttgttctttttttaaaaaatggttaattcacttttttcctaatgtagcttatgttcttctactttcttacttgcttaggatcaacatctgctcttaggaaaacacttacttttttcttttttctttttttttttcagacagagtcttgcttgcttagtaacccaggctggagtgcaatggcgygatcttggctcactgcaacctctgcctcttgggttcaagcgattctcctgcctcagcctcctgagtagctgggattataggtgtccgccaccacacctggctaatttttgtattttcagtaaagatgggtttcgccatgttggccaggctggtctcaaactcctgacctcaagtgatccacccatctcggcctctcaaagtgctgggattataagtgtgagccaccacactggctggaaaa

SEQ ID NO: 76548 - DNA, 557 bp, Homo sapiens
accatgaggcctagagaattggattttctttgctaagtgggtggtattgcaaaatgggaactattctgttcaaagctggttctaggagtgttttgaagtagatgaactttccctcagcctgcctttctgaaatttgttctttttttaaaaaatggttaattcacttttttcctaatgtagcttatgttcttctactttcttacttgcttaggatcaacatctgctcttaggaaaacacttacttttttcttttttctttttttttttcagacagagtcttgcttgcttagtaacccaggctggagtgcaatggcgcgatcttggctcactgcaacctctgcctcttgggttcaagcgattctcctgcctcagcctcctgagtagctgggattataggtgtccgccaccacacctggctaatttttgtattttcagtaaagatgggtttcgccatgttggccaggctggtctcaaactcctgacctcaagtgatccacccatctcggcctctcaaagtgctgggattatargtgtgagccaccacactggctggaaaa

SEQ ID NO: 76549 - DNA, 602 bp, Homo sapiens
catcctcctgcctcggtctcccaaagtgctggggttacaagtgtcagtcaccgcrccatgccccctctccccatcattaaaggggaggggccattgtgtacccagcccacttgtctctgtacctctctgggcctccgcagggcgccacctgtaaatgctaacgtgggtttccctttttatttatttattttttgtttttgagacaagagtctctgttgcccaggctggagtgcagtggcgcaatctcggctcgctgcaagctccgcctcccggtttcacgccattctcctgcctcagcctcccgagtagctgggactacaggcgcctgccaccacgcccggctaatttttgtattttcagtagagctggggttgcaccatgttggccaggctagtcttgaactcctgacctcatgatccacctgcctcggcctcccaaattgctgggatgacaggtgtgagccactgcactggactgctaatgtgggtttctaaggttccagcagcctccctaagcctcctgtttggaagtcctgggttcctgccctgtgtggggtggagaaggggcttttccaggagcacagagctgccagcccaggtgga

SEQ ID NO: 76550 - DNA, 734 bp, Homo sapiens
agcgaaactccgtctcaaaaaaaaaaaaaaaagaaaaaattagccaggagtggtggcgcatgcctgtaatcccagctacttgggaggctgaggcaggagaatcgcttgaacccaggaggctgaagttgcggtgagctgagaccgcaccattgcacgccagcctgggtagcagagcaagaccctgtctcaaaaaaaaaaaaaaaaaaaaaaagagagagagaaagaaagagggctacattatttatgaaacagatactgttaactcagtcaccagaaagcctgtgtataaatgagcagtgagatattcaagcacagcacacacacacttctcaggacagctgtcgtgagagttccatgctcatttccttctgggtacatcagcaactcactctgctatgatcctgcaatacatctcatgttagaattagagacatctgggccaggcacagtggctgacgcctgtaatcctaacactttgggaagccgaggcaggcagatcacctaagttcaggagttcgagaccagcctagccaacatggtgaaatgctgtctctaccaaaaatacaaaaaattagctgggtatggtggcgcacgcctgtaatcccagctactcgggagcctgaggcaggagaatcgcttgaacccgggaggtggaggttgcagtgagccgagatcgtgccactgcactccagcatgggggacggagmaaggctctgtcaaaaaaaaaaaaaaaa

SEQ ID NO: 76551 - DNA, 527 bp, Homo sapiens
ctcatgaatagattaatgtcctccatggggtaagtgaattccattctcacaggaatrgataattcctgcaggagtaggtaattaaaaagagtctggcttccttggcttccctcttgctttcacttttgctatgtgatctctggtgcaccccttgctccccttccactttccaccatgaggtgaaaaagactgaggccccatcagatgcaactgcccaatctgagacattccagccaccagtattgtgagccaaatgaaccttttttacttaaacatcagaatatttatgcctacgcataatattcagaatacgcagcctcaggtattctgttacagaagcacaaaatggactaagacacaaatgtaggtaaaaactcactgaaggtgtagagaaaatggtgttgacctaagtcactttgaaaatgaatagaatctgtaggctgaaggcaagtgaactatacttcatcattggattccattttataaagttctttccaacagaagcaattgtgaacaattgtaaaacc

SEQ ID NO: 76552 - DNA, 527 bp, Homo sapiens
ctcatgaatagattaatgtcctccatggggtaagtgaattccattctcacaggaatagataattcctgcaggagtaggtaattaaaaagagtctggcttccttggcttccctcttgctttcacttttgctatgtgatctctggtgcaccccttgctccccttccactttccaccatgaggtgaaaaagactgaggccccrtcagatgcaactgcccaatctgagacattccagccaccagtattgtgagccaaatgaaccttttttacttaaacatcagaatatttatgcctacgcataatattcagaatacgcagcctcaggtattctgttacagaagcacaaaatggactaagacacaaatgtaggtaaaaactcactgaaggtgtagagaaaatggtgttgacctaagtcactttgaaaatgaatagaatctgtaggctgaaggcaagtgaactatacttcatcattggattccattttataaagttctttccaacagaagcaattgtgaacaattgtaaaacc

SEQ ID NO: 76553 - DNA, 527 bp, Homo sapiens
ctcatgaatagattaatgtcctccatggggtaagtgaattccattctcacaggaatagataattcctgcaggagtaggtaattaaaaagagtctggcttccttggcttccctcttgctttcacttttgctatgtgatctctggtgcaccccttgctccccttccactttccaccatgaggtgaaaaagactgaggccccaycagatgcaactgcccaatctgagacattccagccaccagtattgtgagccaaatgaaccttttttacttaaacatcagaatatttatgcctacgcataatattcagaatacgcagcctcaggtattctgttacagaagcacaaaatggactaagacacaaatgtaggtaaaaactcactgaaggtgtagagaaaatggtgttgacctaagtcactttgaaaatgaatagaatctgtaggctgaaggcaagtgaactatacttcatcattggattccattttataaagttctttccaacagaagcaattgtgaacaattgtaaaacc

SEQ ID NO: 76554 - DNA, 1323 bp, Homo sapiens
gaaggagtctcaggtctcccaaacacagccaccaacctcagggactgccatatggaaggctgggcactgccaggaatacacagatgcctgatgggacctgggccagggggttgtgcagggcagagtcttagccccctccttccttcctccatccaccaggcacttcctggctgccagaaatacaccatgccctgagacccaccacctgcagctcccgaaggacctcacgaggcagggtggacaaagtcaggcccccatttcgggtcctggactcactctatctctcttgcctctgtggaagccacagccacaggcctacggtttcctcctcagacttaaggcccactgccccaagtctccagtcagcaccctcagtggggaaggtgtcctagggcccgtcacatgcctgtgtcttccctgtaagcccacctcctgcacggctctcgagaccatgtgccttaatcacggctggcgcatggcgttccctgcctcccaggcactcccctggaaggagcccacagctcctcacgagagccctttgggtgctgcccttgctttacaggcgaggaagctggggctcagagagggcggagggcttgtccaagcttaccctgccaggaagcagcagggcttggaaagaggactggggccctggggatccagtcctgcccttgcctctcactcagtgatcaggaaggcttccttccccatgcccaaggctccttgggaaaataaggagggaggacaaggtccctgcctgcccccacccctcctctagattaaagaagccagggagcctgtactgcctaggcttccctcatctcacgagcagaggctgctctctgctggagctgcgtggagcatcctctaggcaaaggagtatgaattaagccagccccctaccgagcctgccagtaacaagccaacaggcagaaggaacgtcagaaaaagttaaggctgcctgtggtgcagggtccaccctggcacagggagccgggggccaccagccctgctagtccactgactgcactggarctgggagctgccagaggctcagcatcctgaaggcaccgccaccagtatcacctggaagcgggaaaccaccagctgcctcccgccactctgcagtgggccttgcctgaccaagcagagtatgagttcctgcagggcggggcctgagcccagctctgctttcccatctctccacaagccccagttaacaacggtgaaagaataaagtgtcacaggctaactgcccagctctgaaatcgccacaggaccctcttgtgacatgcctgtctgggcaaagacaaggggtagaaa

SEQ ID NO: 76555 - DNA, 761 bp, Homo sapiens
cattcaatccagcaatcccattactgggtatatgcccaaaggaatagaaattgttctaccatatagacacatacatgcttatgttcattgcagcactattcgcagtagcaaagacatggactcaacttagatgaccgtcagtgatggactagataaaggaaatgtggttcatatataccacagaatactatgcagccataaaaaagaatgagagatcatgtcctctgctggaagatagatggagctggaggccattaacctaagcaaattaatatgggagcagaaaaccaaataccacatgttctcataagtggaagctaaacattgagtacacatggacacaaaaaagggaacaagagacactgagacctagttgagggtggagggtgggaggagggtgaggattgaaaactacctatggagtactatgctcattttctgggtgatgaagtaatctgtaccccaaactcctmtgacatgcagtttacccataaaacaaacctgcacatgtaccccccgaacctaaaataaaagttggaatggcaaaaaagaaatgctaaaaatatattatttcattatcccaataagctcttacagtaattttttatctgtgtggcttttttggggggtatatctccagtataatttaaaataatcagttaatttttgttttctggattcagtcatctttactaccatattaaattatttcgaagacatattttttttctccacattttagcatctctgaaactagaatg

SEQ ID NO: 76556 - DNA, 818 bp, Homo sapiens
ttttttcctgatttctcagtagacacgagctttaaccccattattaaaaaagacatcccacttatggccaactcaatttgaatttccagtattaacaaagtttatatcgtcttttccctgaagttccattagttttgaagctctgtgattcacatgcttgggggaaggactggagccaacttgaaaagatctgaataacagtcttaggttttcttgataataatatttgtgaaataactgagaaacggcttttcttaacctaacagtgagaaacttgatgcccacagcagaagtaaaagtcgtctcaaacatagaaaataaagaaaaacaaaaacaaaaaaaattaagaactcctccttttgttgttgtttttgtttttgagatggagtcttgctctgtcacccaggctggagtgcagtggcacaatctcagctcactgcaacctccgcctctggggttcaagcgattctcctgcctcagcctcccgagtagttgggattacaggcgcccaccactacgctcggctaatttgtgtatttttagtaaagacagggtttcaccatgttggccaggctggtctcraactcctgacctcaggtgatccacccgcctcggcctcccaaagtgctgggattataggagtgagccaccaagcctggccaaaagctttcttatgagaaagaaaaaaaagaagaaagaaaaagttatggaaaaggaagagatgcaaagccaagctaacagatattaagctaaaagacttcaaattgtcagtctccaaaagaaatctctcgtcatctaattcattccttaatggagga

SEQ ID NO: 76557 - DNA, 695 bp, Homo sapiens
tggcgggagccactgcggtttcagctgcatccgataggccccaagcgggaggcgattctgaggccagcgctggcccaaagaccagaggacctgagcaaaatgaaaagtcactttgttcctcacgccgtgckcagcccggcctcctctaatgacattaggagccgcagccacgacggcgctcacgggggcgcagaagtcccgctggctttgatccgcgcctctccgctgccgagagctgacagtcggctgcgcagcggccccgctttcatttgtcagacacgcgtttgccggtgtacccgcgcaggcagctacacctgtactgagagaatttacatcgccttgcttcgggatggcattgatttgggacgggtgaaatacaaacacaaactaattaaaaaccgcataatggagccctacaggaacaaggcagaaaaacaaataaatacaagtgcagctggcacggcgatggtgcctctgcccccgagcaaccgtctggtgacatcaaataagaagccctgagaactctcacaccgctgctgttgttcatattggaggcataatggaaatgatctggttaattaaggggaggtttataaaatatttacgtgtgtgcacacgcatggtaattcacttccttcgacactggggacggcgtcgtagcggcactccaggccaggccactgcggtccattcct

SEQ ID NO: 76558 - DNA, 766 bp, Homo sapiens
tccgacaggctctgctcctstaggacacctgtcaatctagtgggagaagcatgatatcaaagatagaaacacagagatacatgacaagtgatgcgactgacagagaaacagccaggtaagggggacgtggggtgcaggtgttgggagggtggagtcacccttggtgcaaagaggctcagttggcgggacatctggagggcagtatccttggcatagggcacccggtcgggtctctcaaagcaagagcaagcccctgtagccagagagagccacaggactcagtgctcagggacctggaagaccagtgggaggccaggcctctacccaggcaagacaggagccactcagcagtggaaggatctgattgacaccagaatgtgtctgtgtgggctgctgcactgaggatagcatgggggacggtaggaggcccaggacactggctctgacctgccagcacagccacaggggaggtggggagcaatgcagggaccctgagtgcattttgaagggaccacacgctgggcagtggcccaagcctgtaatcccagcactttgggaggccgaggtggatggattaccaggtcaggagatggagaccgtcctggccaacatggtgaaaccctgtctctactaaaaatagaaaaaaaaattaaaaaatagctgagcgtggtggcgtgttcctgtagttccagctactcaggaggctgaagcaggagaattgcttgaacccaggaggcagaggttgcagtgagccgagatcgcacca

SEQ ID NO: 76559 - DNA, 766 bp, Homo sapiens
tccgacaggctctgctcctctaggacacctgtcaatctagtgggagaagcatgatatcaaagatagaaacacagagatacatgacaagtgatgcgactgacagagaaacagccaggtaagggggacgtggggtgcaggtgttgggagggtggagtcacccttggtgcaaagaggctcagttggcgggacatctggagggcagtatccttggcatagggcacccggtcrggtctctcaaagcaagagcaagcccctgtagccagagagagccacaggactcagtgctcagggacctggaagaccagtgggaggccaggcctctacccaggcaagacaggagccactcagcagtggaaggatctgattgacaccagaatgtgtctgtgtgggctgctgcactgaggatagcatgggggacggtaggaggcccaggacactggctctgacctgccagcacagccacaggggaggtggggagcaatgcagggaccctgagtgcattttgaagggaccacacgctgggcagtggcccaagcctgtaatcccagcactttgggaggccgaggtggatggattaccaggtcaggagatggagaccgtcctggccaacatggtgaaaccctgtctctactaaaaatagaaaaaaaaattaaaaaatagctgagcgtggtggcgtgttcctgtagttccagctactcaggaggctgaagcaggagaattgcttgaacccaggaggcagaggttgcagtgagccgagatcgcacca

SEQ ID NO: 76560 - DNA, 766 bp, Homo sapiens
tccgacaggctctgctcctctaggacacctgtcaatctagtgggagaagcatgatatcaaagatagaaacacagagatacatgacaagtgatgcgactgacagagaaacagccaggtaagggggacgtggggtgcaggtgttgggagggtggagtcacccttggtgcaaagaggctcagttggcgggacatctggagggcagtatccttggcatagggcacccggtcgggtctctcaaagcaagagcaagcccctgtagccagagagagccacaggactcagtgctcagggacctggaagaccagtgggaggccaggcctctacccaggcaagacaggagccactcagcagtggaaggatctgattgacaccagaatgtgtctgtgtgggctgctgcactgaggatagcatgggggacrgtaggaggcccaggacactggctctgacctgccagcacagccacaggggaggtggggagcaatgcagggaccctgagtgcattttgaagggaccacacgctgggcagtggcccaagcctgtaatcccagcactttgggaggccgaggtggatggattaccaggtcaggagatggagaccgtcctggccaacatggtgaaaccctgtctctactaaaaatagaaaaaaaaattaaaaaatagctgagcgtggtggcgtgttcctgtagttccagctactcaggaggctgaagcaggagaattgcttgaacccaggaggcagaggttgcagtgagccgagatcgcacca

SEQ ID NO: 76561 - DNA, 766 bp, Homo sapiens
tccgacaggctctgctcctctaggacacctgtcaatctagtgggagaagcatgatatcaaagatagaaacacagagatacatgacaagtgatgcgactgacagagaaacagccaggtaagggggacgtggggtgcaggtgttgggagggtggagtcacccttggtgcaaagaggctcagttggcgggacatctggagggcagtatccttggcatagggcacccggtcgggtctctcaaagcaagagcaagcccctgtagccagagagagccacaggactcagtgctcagggacctggaagaccagtgggaggccaggcctctacccaggcaagacaggagccactcagcagtggaaggatctgattgacaccagaatgtgtctgtgtgggctgctgcactgaggatagcatgggggacggtaggaggcccaggacactggctctgacctgccagcacagccacaggggaggtggggagcaatgcagggaccctgagtgcattttgaagggaccacacgctgggcrgtggcccaagcctgtaatcccagcactttgggaggccgaggtggatggattaccaggtcaggagatggagaccgtcctggccaacatggtgaaaccctgtctctactaaaaatagaaaaaaaaattaaaaaatagctgagcgtggtggcgtgttcctgtagttccagctactcaggaggctgaagcaggagaattgcttgaacccaggaggcagaggttgcagtgagccgagatcgcacca

SEQ ID NO: 76562 - DNA, 685 bp, Homo sapiens
gggactcagtctccctgggcgaaggggagcaagataaaaagtgcgaggctcgcagttgtcattctgtatgtagattcaggattaaaatatttcaaaaaaaaatctttatcagaaacaattccatgctgggcatggtggctcatgcttgtaatcttgtaatcccagcactttgggatgctgagtcaggtagaccccttgagcttgggagtctgagatcagcctggccaacatggtagaacctcatctctatgaaaacaatacaaaacttagctgcacataatgggctcgcctgtggtcccagctacttgggaggctgaggtgggaggattacttgagccagggaggttgagtgagctgtgttcatgccactgctctccagtctgggtgacaaagcaagaccttgccaagaaagtaagaaagaaagggagagagagagagagagagagagagaaagagaaagcgagagagaaagaaagaaagaaagaaagaaagaaagaagtaagaaagataagaacagaaagaaagaaagaaagaaagaargagagataagagaaagaaagagagtctagtcaggaaggaaggagagaaagagaaagagagagagggagagaggcagggagggagggaggaaggaaggaaggaaggagaagggaaggaaggaagggagacgggaggaaaggagagg

SEQ ID NO: 76563 - DNA, 685 bp, Homo sapiens
gggactcagtctccctgggcgaaggggagcaagataaaaagtgcgaggctcgcagttgtcattctgtatgtagattcaggattaaaatatttcaaaaaaaaatctttatcagaaacaattccatgctgggcatggtggctcatgcttgtaatcttgtaatcccagcactttgggatgctgagtcaggtagaccccttgagcttgggagtctgagatcagcctggccaacatggtagaacctcatctctatgaaaacaatacaaaacttagctgcacataatgggctcgcctgtggtcccagctacttgggaggctgaggtgggaggattacttgagccagggaggttgagtgagctgtgttcatgccactgctctccagtctgggtgacaaagcaagaccttgccaagaaagtaagaaagaaagggagagagagagagagagagagagagaaagagaaagcgagagagaaagaaagaaagaaagaaagaaagaaagaagtaagaaagataagaacagaaagaaagaaagaaagaaagaaagrgagataagagaaagaaagagagtctagtcaggaaggaaggagagaaagagaaagagagagagggagagaggcagggagggagggaggaaggaaggaaggaaggagaagggaaggaaggaagggagacgggaggaaaggagagg

SEQ ID NO: 76564 - DNA, 685 bp, Homo sapiens
gggactcagtctccctgggcgaaggggagcaagataaaaagtgcgaggctcgcagttgtcattctgtatgtagattcaggattaaaatatttcaaaaaaaaatctttatcagaaacaattccatgctgggcatggtggctcatgcttgtaatcttgtaatcccagcactttgggatgctgagtcaggtagaccccttgagcttgggagtctgagatcagcctggccaacatggtagaacctcatctctatgaaaacaatacaaaacttagctgcacataatgggctcgcctgtggtcccagctacttgggaggctgaggtgggaggattacttgagccagggaggttgagtgagctgtgttcatgccactgctctccagtctgggtgacaaagcaagaccttgccaagaaagtaagaaagaaagggagagagagagagagagagagagagaaagagaaagcgagagagaaagaaagaaagaaagaaagaaagaaagaagtaagaaagataagaacagaaagaaagaaagaaagaaagaaagagagrtaagagaaagaaagagagtctagtcaggaaggaaggagagaaagagaaagagagagagggagagaggcagggagggagggaggaaggaaggaaggaaggagaagggaaggaaggaagggagacgggaggaaaggagagg

SEQ ID NO: 76565 - DNA, 885 bp, Homo sapiens
gggatcccagggacttcacagaaattaagctttcaatcccaaatttgtgatgctgtgccaatttgtaataaggagtttaggaaaaactctctaagcagggagggacaggctctgccatcacaagtcagtggagttacacagagagccataactttacactttaggatttatccaaatgttaaaagaaagtaaacatttcagcttggtggcccatgtgatctctgtcacaactattcagttctgccgttgtggcctcaaaacagccattgatgcattgtaaataaatgcacgtggctgtgtgccaagaaaacattatttacaaaaataggctttaggctggattttccaygcctgctgtgtctgaacattttctcttctccagtgataaccagtcgttctgctcagtggtgggggtggtatttgccgagccagaatgtgtgtgctgttttaggaatccgtcacctttgaggatgtggccgtggagttcatccaggagtgggcattgctggacagcgcacggaggagcctgtgcaaatacaggatgcttgaccagtgcaggaccctggcctccaggggtaaggctggcgtcacctggctccttcctgtacgcaggcactaaatgcttcttaagcgcctgccatgtgaagaagacagacgtggcttaggctttgtggcacttagcgtccacaggatgacaaagcttcatctgttgcattgacttctttccctctgtagtaaggccctgtttgggtctccttgaatttggccccaggcttctgaggtgagacagcctcagccccttggggcagaggggagggtgtttgtgggttgggtcctgagttcattagctattgggcaagatccctttgctacccatcacacttg

SEQ ID NO: 76566 - DNA, 946 bp, Homo sapiens
tgcatgtaagaagccaacccaaatagctggagtgtgttagaccatgcgggcagctcagctgttagatggagcaggcatatttcccacaagggactccatgagggcaagagaactggtggtcccatctgagacccactgtagccctgaccttcaaatcagggctgtagaagaagcacccatgacagtggaagttcttctttctgaatcatagtttgcattgacatgttccaactctctgttcagtatgaatgaaagactttcatactttcccaaaaatgacttagcccctgctctctcatattttatctaacatggtgaaggtcagcctagcactgttatccttaagcactgggcaaaatatcccagctccgattgattttcactctattctaaggtgatatgccttgtggagaaactcagggagtttatttaagtaacatgtgcattatagtgcagccatatgaaaagaatgacagtccttgggaasttaaagctttaattctgcatctttaataacctgcctaggatcagattttagttttgtggcaagctcctgctgagtgattactctgagtgaggtttgttattagatccaagggaaatagagataggaatgaagccagtgtcttatgctgttgaaattcctcctaatagaggcaattgaacacaacaactcttatcgcagaaaacgttcctccacgttcagagtactgcatacgctcagctcctccaagctccatgaggggctccagaagtgtattcacgtggtcttatgttcttaaaaatgtgcaaaagtgagatattttaaccacagtcagtcagataagtttattgtagtggcatacagagtagtttcattgcttaaaatccctattcatccctctttttccctaatccctttttattgtcttcatacgtttaccttttccagaatgttgtatagttg

SEQ ID NO: 76567 - DNA, 1520 bp, Homo sapiens
atgcaccgagtggccaggaggcgacacaacaagaggctgctgggccacctctaagcgagggagagaacacagaaggaaccaaccttgccaacaacttagccttggactcttaagctccagagcagggagaagacgaacgtctgctattgaagcccccggtccctgggactttgcttcagcactcccagccaaggcacacaggtggacaggattctgcagcctctctcaaacctggctctaccatcagcagcatctgagaaggaaatcactgacaagggggatgcagaagtcctccttcccccaaagagtgattgggaaggaagctgcttctcccctaaacctccagcaaaagtgtgggtgtcccctaggagctttgggtgactgctctatggccccttattaaaatgtagatgttctctctgcaggagattaagctaacctatccctgtcaattaacaaatatcctaggtcatattagaatctttgattcgtctgccagtccctcagtttattcccaagagaatggaccacaggccccatcaatcttcactggaggtggcgggagcccaaaaatgggtcataggtggcattgaaggtcaacccaggcagcctgccatcagcatgaggacctttagggcgggctctaaaataggggggtttgggaagggcatctggaggaatgcagaggactgagaagaggaacttcccgatctggggattttgcctagattgggctcctcttggtcacaggtgtattatgttctaggggctaaattccccactggaaatgtgtctgggagaagaaaatgtttcctcttcttcctctcttctcttccacccccatggtattttcacctttcacaagcatgcatgcactcacacagcacccaaagctggtgtaagattggaaggtccggaggcctttcttcatgtctacaaaagagaggatgggagtggtgggggcctggctaagaaccccagactagggtacagctctggagatgatgttgggtgacagttatgtaagaggcaaagtcagagcaagaacagatatgggacccatggttcaagggatattttaagttttcctccttagactcatttcataccccagatttttctataacagtggtcttggaatatgctggtagactgtaagtgtcttcagaacttcccagaaactttccctgaacttccaatgtctgttaggctttgagacactaygctgtgctgttgagctggtgtccctaaagtctgatgaacagattttaacctatgggcccaggaggtctgctgttgcacacgttcattaaaaacctgaaatgtgctatgctttctgcttgggaggtgttttttgggcatatatttgtcagtggatttttaaagagatttgtagtaggtgggcttttatctttaataatgtataagtggttgagggctgatatgaagtcattggagacagaacactggtctaaattttaaatatttttgaaacatcaaacacaaatacaccatttagt

SEQ ID NO: 76568 - DNA, 564 bp, Homo sapiens
agtaaataagaaagaagtgaatggtataatttattgatggttatttaattgatggattcctttattcattcgtattcatgcaaagatcaaggtctatcaaggttctacctctgcaagacataccaggctttggatatgtgtttgggttcactttatattgatactagaatgagagtttcctattactgtttagcctaacatgatattttgatatatattttatataagaatataataaaggaatttttatttaacatttttaacatttacaaagcacagttgacgtactattcagaaaatcagagagaggtacatttttgtatcagtagagtcaaggtcyaggatactgacagagaaaagataatactatttagtatccgcttgctgaaagtatgacgttacacttagctgaggttgggaaagtattttatccatattcacagtggtgcacaataatccaaatgcacagaaaagaaagtttgtttggcagcatgtaaagtcagggattataagtcataggagatactcccctgtcttgcacaagtattgcagaacctctcatgt

SEQ ID NO: 76569 - DNA, 537 bp, Homo sapiens
atacaattccatcctgtttttcatgtttccttgaaaaatatcaggatattttaaattaatagcttatattatttgtttttaactgggggtaattcagtttcaaagtggaagaaaaataaatgcaagttaggtrgaattactgaaaaatattttgaggcacccaatgtcaacattggagcgagtcatttaacctgagtccgattccacttacacaaaataagatagggcaggggctgaacaaatgctttctaaggccctttcaagtttgcagaaaaaaaaggaaaaagaaaaatgaattcatataatgaaaataattttgcaaataactatttgaatgtgtttttgcattctcaatcagttatttaaaaactggatgtttgatcaataccaaatgtttattgttaagaggagttaatgttttgtcattaggagttaaggtagaaattaataccatgtcattgaaattaattttcaacttttttgtcacaactagttgacttcctaatctcaactagtcaacttatctgagatagtcca

SEQ ID NO: 76570 - DNA, 714 bp, Homo sapiens
tttacatcatttaagggagacagtttattaatttttaagcatattggaatatatttcacatctaggtctccatggaatccagagttgctctccatgataatttctaaactagagcagaagttcaacaatagttcctttttttcacatcagtatgaataagctaaattctaagaatgcattagacaaaaaataagggaaatgtggcaagcctggtgtattagtccgctctcacactgctataaagatactacctgagactgggtaatttataaacaaagaggttcaattgactcacagttctgcatggctggggaggcctcaggaaatttaaaatcacagcagaaagggaagcaggcatgtcttacatggtggcaggtgagagaaagtgagaaagagcaggaaaaactgcctcataaaaccatcagacctcaagagaactcactcactaactatcatgagaacagcatgggggraactgcctcaatgatccaatctccttccaccaggtccctctctagacatgaggagattatggggattacaattcaagatgagatttgggtggggacacaaagcctaaacatatcacttggcaaaactcaaaatgcatctcatgcattccagggaagtgacctaatatttctatgtatgcgtatgttttgttatcctattgaaaatctttttgggatgcatgatgtcggtatccaaggatcc

SEQ ID NO: 76571 - DNA, 714 bp, Homo sapiens
tttacatcatttaagggagacagtttattaatttttaagcatattggaatatatttcacatctaggtctccatggaatccagagttgctctccatgataatttctaaactagagcagaagttcaacaatagttcctttttttcacatcagtatgaataagctaaattctaagaatgcattagacaaaaaataagggaaatgtggcaagcctggtgtattagtccgctctcacactgctataaagatactacctgagactgggtaatttataaacaaagaggttcaattgactcacagttctgcatggctggggaggcctcaggaaatttaaaatcacagcagaaagggaagcaggcatgtcttacatggtggcaggtgagagaaagtgagaaagagcaggaaaaactgcctcataaaaccatcagacctcaagagaactcactcactaactatcatgagaacagcatgggggaaactgcctcaatgatccaatctccttccaccaggtccctctctagacatgaggagattatggggattacaattcaagatgagatttgggtggggacacaaagcctaaacatatcacttggcaaaactcaaaatgcatctcatgcattccagggaagtgacctaatatttytatgtatgcgtatgttttgttatcctattgaaaatctttttgggatgcatgatgtcggtatccaaggatcc

SEQ ID NO: 76572 - DNA, 1115 bp, Homo sapiens
gcatatgtatcttttggctcttgtgagtttggggactggttttccagcataatttgagtaagatacctatttttgaattggctaataattataagctgaattttgttagctttaatccagcagaagctggagggtgtagacgtgttagaacagtacaattggatgctcactcctttcatctgtatacaaagcaatttcattgaaaaagaaggtaaatgattaattccttggcttactgatttttcattgaagggttataatcatttataaaacttttttttaagcttctgaaagttctttgaaaaccagatattcccctctccactccccccaaaaaagtcccacactttttgaagtattttgaggtgtttctatcttcctatgttaggatttgaatggaaatagtctgttttggttttcatttttaatacaaatttactttacccttgaaacatacattagaactaaaatgctcacctgttcctcttctgatatcaaccttatgacactaatacaatagcattgttttaaagatgctattatgtggtagatcaccatgctgtgcactgagggcacattgtacttcacctttaggatagatgattgttcattgcactctggcatcttagaacaacaatttgtgtcttccatctcctgtcctgactatttaggaaagtttctgaatgcttgttaatttgatactacgttctcaatgctttcctcatatctaggaacagtgccctgtctgyaaattagataaaagcttctggcaaactgttttcttatgtaacagtcatattatagacactgagtgcgcttagctaatcactgaccattctgtgagacacttcttttaaacatatcacctaagaaaaactaaactgtgatcaaatgagattattttgatgtttcaggacctcaaactgctttacaatgagaataagagatgtttctcagtgagagtgaggtattgggtccagagcctcaaagtagttgatgtgatatagaaaaataattatacacagaataactagctccaacaaggataacactagaaaaagtactcagaggagtaaaatgatgagtctcgtgtgctttctagttttacccatgta

SEQ ID NO: 76573 - DNA, 549 bp, Homo sapiens
gcactgcctgtagtcccagctactagggaggctgaggcaggagaatcgcttgaacctgggaggtggaggttgcagtgagaggagatcttgccactgcaytctactctgggcaacagagcaagactccatcttgtgggggtggggggaagctcataggccaggcacagtggctcacacctctaatcccagcactttgggaggccgaggtgggtggatcacttgaggtcaggagttctagaccagcctggccaacatggtgaaaccctgtctctactaaaaatacaaaaattagctcagtatgatattgcgcgcctataatcccagctactcgggaggctgaggcaggagaatcccttgaacccgggaggcggaggttgcagtgtaccaagatcaccccaccacactccagcctgggtgacagaatgagactgtctcaaaaaaataaaaagctcttaagtggcaaatttttctggtcatagttgattttatgttatttatgtgtagtaaacatattactatgaaacttttgaaaaaaattattgaataccc

SEQ ID NO: 76574 - DNA, 549 bp, Homo sapiens
gcactgcctgtagtcccagctactagggaggctgaggcaggagaatcgcttgaacctgggaggtggaggttgcagtgagaggagatcttgccactgcactctactctgggcaacagagcaagactccatcttgtgggggtkgggggaagctcataggccaggcacagtggctcacacctctaatcccagcactttgggaggccgaggtgggtggatcacttgaggtcaggagttctagaccagcctggccaacatggtgaaaccctgtctctactaaaaatacaaaaattagctcagtatgatattgcgcgcctataatcccagctactcgggaggctgaggcaggagaatcccttgaacccgggaggcggaggttgcagtgtaccaagatcaccccaccacactccagcctgggtgacagaatgagactgtctcaaaaaaataaaaagctcttaagtggcaaatttttctggtcatagttgattttatgttatttatgtgtagtaaacatattactatgaaacttttgaaaaaaattattgaataccc

SEQ ID NO: 76575 - DNA, 1381 bp, Homo sapiens
atagatatccagcaatgggttttagaggaatctgtgaacctaaagaattgtaggctrcatttcggacacatgtgtatgtgtgcacttttttcaataaggtcacaaatggatctgtgactcctaaatatttaataacgatgactataaagatatttcactaaattatttgtatgtaactcttctatgagatcgaacagcagactctgaaagcactggtcttaggagtttcagagatactcataagctatataatttttcactttgtttttagtaggtatgtagaattggttaaaataaactttcttactgaatgtatttacagactggatttttccaactaccacatggagactttttcattgaacccgtgaagaagcatccactggttgagggagggtaccacccgcacatcgtttacaggaggcagaaagttccagaaaccaaggagccaacctgtggattaaagggtattgtgactcacatgtcctcctgggttgaagaatctgttttgttcttttggttgttttattaaaacatgacctattcttactcaagtctcttatctcctctgtattcttttttttttaatatcttcatgacattcaaatctcttctgtattctcttgccagaaagtgtacattctttttgcttgtataaaccctttcacttgtcaatactcgagtctctgcatattcttaatgagaaggaaataaaagcatctttgccacattaattgatgatgctcataagacatttacaatgaattttttttaaaaaactcttctgaatagtctacaggaaaataattaaaataaagacgtaatgattttcagtattagcagtgttataatacattagtatggaatattaccagacagctcatcacatctgcatatggaaggcagatttaaatgtttgatgatgccgataataatgtgtgaagaaaaactgaaaaaaattatcaacacattgtcagatgatgaattcagtaaagcctcttttggctacacagtgttgtgtctgcagtttgctgagctgcgttccctgcccttaagccccaagaatgatctgaattggtcctcttggccttgtcccaaataatttcaggtagttttcagaagtaaactgatccaagtcatttccttgcaactcccacattcttcttagtgtgtaggagataataagctatgcattagtttatcgggattgggaatcgggacagtttcttaaatattacataatgtctcctttcttcagagaaaaaaacaatgccagaggggctgttaacaaaaggaatccctaacattatttatgagtcttgaggatttggaaacaatggacctcaaagggaaaacagatgatgaggcagtgagggaaggt

SEQ ID NO: 76576 - DNA, 924 bp, Homo sapiens
tgcatagttactgtttaaacagtagctagagatccaagaattgctaatgtgcttgtgaatattcttaaactacacatgacgtttaaaatttttaaatcttggtgtaatgaaatgttcttggccttgctgaaccaggtcattgcagtgttcttataccatattgccctgcagagagaacagaattaactgacagtggtggtgtcattaaccaacattaaagtacatttcatgcttaggtcagttgatgttgccagactgaattactgtgattatatgaaaaaaagatcacctttaccatatatggagcattttgcttttgtaacgttcaaagaggaacactctagatattgaagaaagatgtaatttaaaagtaccctagtgcttcaagagagaaaggatatcaattcatttctcctaaaatctgtcctttcactcatttttatttcccacatagaaaggtgcccaaatgtcacaatatgacttaatttctrttttccaggcctttaatgtgatgctattttgtttttgattttctcaattttaactatgttttcttaagttgttatgctagttttgtttgcttttctaagccttatgtttgctaagccctgctgcaattcttgtttcctctaagatcgactttctagaatctatggtaaacagtgggaaaataaagcttccctgaattaaatccaggggaaatttcaaaacctcattttatcaacgatgacaagctcctttctctaaggctttttggtgagaacatgatcacactgggatttgagtggtgttaggtggaagtctctgtgggaacttttgttccagaaatctggggaagaagaattaacactggtcagatcaatcagatgagaacagatactgggtcatctatggcagaaaagggtcctggcaggtaaggtcaga

SEQ ID NO: 76577 - DNA, 559 bp, Homo sapiens
caccaccccgctagtgcctggtggaaattctctctctgagcatgcgcattgccagatggtagaaattgtacacgttttgctgagtctttaatgtctaacacatttacttgcacatttgttgaatggaactcgatttaaatctgagtacaagaagagggaattcaattttgtgcttgagactattccaattacaatgattattttcagttttcatatagtgactttaagtagatgtactgtgcccatatccaaagggtttttttttcctcacaaaatgttcagttatttattgggttgttctcattgcaaagcaaataggtagaacctgttcatatagtacaaatgaggaaactgaagcatagtaagcttgtggacttcgatgaatctcacacaaggagtcaggggcacaacttgggaatgaataaaagacccccttcctatctaattatttcaatcaccaacttatatatcctcccatacaatcccaggtttttctttggaaatcaaactgcagatactgttcacaccttttcrtgtgaatctatcagatagtttcagc

SEQ ID NO: 76578 - DNA, 605 bp, Homo sapiens
gcttttctttactgggagacttttcattatggcttcaatcttgatggtattggtctgttcaggttttggatttcrtcatggttaaatcttggtaggttgtatttgtctaggaatttatcatttttttaggttttccaatttatttgcatatagttgctcctagtagcatctaatgatcctttgaatttctgtggtattgcttgtaacgtctcccttatctttccttatctttccttcccccccccccccatagagtcttgctctgtcatccaggctggagtgcagtggcacaatcttggctcactgcaacctccgcctcccaggttcaagcaattctcctgcctcagccttctgagtagctgggattacaggcacgtgccaccacgctggctaattcttgtatttttagtagagatgggatttcaccgtattggtcaggctggtctcaaactcctgacctcatgatctgcctgccttggcctcccaaagtgctgggattacaggtgtgagccattgtgcccagcaacatctcccttttcatctctgattttatttattagcatcttctttcattgttttaaattctaactctcttttgttcttac

SEQ ID NO: 76579 - DNA, 605 bp, Homo sapiens
gcttttctttactgggagacttttcattatggcttcaatcttgatggtattggtctgttcaggttttggatttcatcatggttaaatcttggtaggttgtatttgtctaggaatttatcatttttttaggttttccaatttatttgcatatagttgctcctagtagcatctaatgatcctttgaatttctgtggtattgcttgtaacgtctcccttatctttccttatctttccttcccccccccccccatagagtcttgctctgtcatccaggctggagtgcagtggcacaatcttggctcactgcaacctccgcctcccaggttcaagcaattctcctgcctcagccttctgagtagctgggattacaggcacgtgccaccacgctggctaattcttgtatttttagtagagatgggrtttcaccgtattggtcaggctggtctcaaactcctgacctcatgatctgcctgccttggcctcccaaagtgctgggattacaggtgtgagccattgtgcccagcaacatctcccttttcatctctgattttatttattagcatcttctttcattgttttaaattctaactctcttttgttcttac

SEQ ID NO: 76580 - DNA, 873 bp, Homo sapiens
tgctctctagaagcaattatgctttctcaaattcgtgatttcaaaataatgatttctaggtccttcaatctttgctaacactgtgctttgcaatatatagacaaaggtaagaaaacaatgtttgggataactgagtcctgggttcacttttcataactctgatgcttttctttttttgtaatgacattgaattgagggaagagagcttttaaagacagagtagtaggaaaggattgacgggtagactgcagtttggtaacagcttgtaagaggctatggtattagcttagtgggcatacagtagaaataagattattwaaaaaatttcatagagtaaaagtttaatttcttcttttatcgccaccgaacatgccattatacaaggaatcttaattataaactgaaatcattgcaactccaggatgtctctcctccagtggattctcctcataggctgatataattcttctactttgaattttaagtggctcctctttgcttgcaaaatcaagacactttccaaaaacatctgcttctcagtttccagtgaagtatacccaatagtagagacatgaacttgaaccctggaaaatctggggagtggcttgaagctgacagcagcaagtgggacactctttagaagtcttgtgtttaatcttaaaaattcacatgattgtcacattcaatgtgtatttctctgtattaaatctgtatttctctgattatacaaatatttaaaaacactatcaggaaaaaacagacattgacaaaaaattttcctgcctaaattcctgtttcattgagtggttggttggtgtataaaatattgtactgaatttatccatgttagaaaattgtgctgaattcaagagc

SEQ ID NO: 76581 - DNA, 873 bp, Homo sapiens
tgctctctagaagcaattatgctttctcaaattcgtgatttcaaaataatgatttctaggtccttcaatctttgctaacactgtgctttgcaatatatagacaaaggtaagaaaacaatgtttgggataactgagtcctgggttcacttttcataactctgatgcttttctttttttgtaatgacattgaattgagggaagagagcttttaaagacagagtagtaggaaaggattgacgggtagactgcagtttggtaacagcttgtaagaggctatggtattagcttagtgggcatacagtagaaataagattattaaaaaaatttcatagagtaaaagtttaatttcttcttttatcgccaccgaacatgccattatacaaggaatcttaattataaactgaaatcattgcaactccaggatgtctctcctccagtggattctcctcataggctgatataattcttctactttgaattttaagtggctcctctttgcttgcaaaatcaagacactttccaaaaacatctgcttctcagtttccagtgaagtatacccaatagtagagacatgaacttgaaccctggaaaatctggggagtggcttgaagctgacagcagcaagtgggacactctttagaagtcttgtgtttaatcttaaaaattcacatgattgtcacattcaatgtgtatttctctgtattaaatctgtatttctctgattatacaaatatttaaaaacactatcaggaaaaaacagacattgacaaaaaattttcctgcctaaattcctgtttcattgagtggttggttggtgtataaaatattgtactgaatttatcmatgttagaaaattgtgctgaattcaagagc

SEQ ID NO: 76582 - DNA, 1470 bp, Homo sapiens
tgcattaattttttattcaccaaatacttattggagtgttcacacattctacagtttatcattgcatcactggctgcctcaacactgattatggttggattggactataagctagtaattgtgccaataaaaataataaaaaacctcagttgtttgtttttggcactgtaatacaattaactatgttatttaatcttcacaataatcctatgaggcacaggcagttttaatccacattgtacagacgatgaaaatgggacacagagaggttgtgtcagagcgctcattttctactgctgcgtaaaaaattgccacaaatgtagtagcttaaaacaacttccttttagcaactaaaagttctccaggtcagaagtctatcaaggtatggctggattttctgcttaggatatcacaaggctgaaatccttgtggctccagctgagtcgtcatcacaatgctctggggaaaactctgcttctaagttcattcaggtgttggcagaattcaatcccttgtggttgtaagatggagattctgtttccttgctctttgtcacctttgggacccttctcagcttctagaggccacctacaatttttgccatctggttccctccatctccaagccagtaatagcccatgacatccttctcatgctgcaaatttgacttctcccatttcttgacctctagatgcagaattaaaggactcttatgattagtctagtgacactcagataatttccctttcttagagttaactgtgccacataagataacctaattgtagaagtaaaattcatcatactcacagacttggattttataggtcatatataccagggaatgggaaatattgagtgccatcttaaaattctacctagtacaatcagttaactctggcttcagtgatgcttatcacatcaccacaaaccctcagcagcatgcaacyctctgcatttatttgcttcacacatctgtgggttggttggtcgggggaggaggtctgttggtctggtctaggctcattttgggttccttcactggggcagttttctgacatgcatctcttgtcctctgtcctaggctgatgggctagttaggcctgatgttgctcaagcaaagatgcagaggcaagcagaacgttgcagggctcttatggcctaggcttagatttaatacttctgatattggtcgcttgctcttcattttattggcataggcgagaaaaaagatgaacaaagtgaaaaagatgaacaaagtcaaagaaatactattttttttgctcctttagtgagaagaactgcaaagtcagaagacaaggtaaatacaggggtgagtgcagaactgggggcaaagctccatctatcagagctaggctttgccacagtgaacttccccccagcttctcctgggggtcccatctagcagctgtgcagcctaaatgggtgtttagttctaatcactacttg

SEQ ID NO: 76583 - DNA, 561 bp, Homo sapiens
cactttgtggggctgaggtgagaggatcgcttgtgtctaggagtttgagaccagcctggacaacatagcaagaccctgcttctacaaaaaaattgagaaaaaaaaaaaagaatgtggaggaacacaggggtcaccgaagctacaactacttacattccatgtttcttttcattttccaagagaactgaaggaagaagtaayggaaagggactgggcactgtgggtttttttcacttctcaggtgattttaatgggcaatcactttaatagttaatcagtcgattcttctgggtttcctagattatatactttacatataatttatcttcctttctagtctttatgccacttatttaattttccatgtattacgttatttatcagaacttccaatacattcaaatggtggtgacagccataatccttgtttgattacaatgggcatgtttctgatgcttcaacattaactataattttattgtagattttagttgatacctttaatcaatctgagaaatcactttctcagtttgctaagaatctagttttcactaaatcacg

SEQ ID NO: 76584 - DNA, 443 bp, Homo sapiens
tgaacatgctctttgatgattctattaagggaaaaggtgataaaacaagagtaattttgaaaaaaagatcacctctatttccactaaactgatgtatttctagtgcttgtccacctgcaaatgtgcctttatatggctgtaataatatgtgcctatccttatattttttacatttactgtaatgargacatattttcagctattccatagttttgatcttctgcaggaatttcaaaatgcagttaccctattcagtgtatcttcctccctatcattctaaagcagtttaatctaattaaatatttatttgtacattttcactttttactatgaaaaattttaaacacacagaaaagttgaaagaagaggataatgaacatatacatactaaccacctagattcagcaatgaataaccttttgccaggttttacatgtatacac

SEQ ID NO: 76585 - DNA, 1786 bp, Homo sapiens
ccagcctgggtgacagagcaagactccgtctcaaaaaaaaaaagagggaagagcaggaaagaaggaggacagaaagagaatgtaggacaaacaggaaacactctgaatagagagaaaggattgggcagaaaagtattagggatctggggaagaaaagggcaaaagctaaatggtttaacaaggcagttctaatagttcaaaatggcaaccaaagaacactgtctaagaaagtggcataatgacaaaataggccggcctggtggctcatgctgtaatcccaggagttcgagaccggcctgggcaacacagcaagacccccaactctacaaaaaattttttaaaaattatccagccatgatggcatatgcctgtagtcctagtactcaggagactgaggtgggaagatcatttgagtccaagagctcaaggctatagtgggctgtgatcacgccactgcactccagcctgggcgagagggagaccccatttcaaaaaataaaacaataaaaataataagaataacaatacaggttgaatatcccttatccaaaacgttatgtttcatatacaccttatacacatagcttgaaggtaattttacacaatattttaaataatcttgtgcattaaaaacaagtttgtattaagtgcttatgcatagaattttccacatggtgtcatgttggcactcaaagagtttaagatttgggggcatttttcgtttttgaattaggggtgttcaacctacaacttatagaaatattttgaaatttttaaaaaagtagtttatttccaaagaaaaatgtcaaagttatggtgggaaattaaactataaaaaatgaaattttgcactttgggaggccgaggtgggcggactgcctggggtcaggagtttgagatcagtctggccaacatggtgaaacccgtctctactaaaaatacaaaaaaaaaattagccagcatggtggcgtgggcctgtagccccagctacttgggaggctgaggcaggggaattgcttgaaccaggaaggtggaggttgcagtgagtcaagatcacaccactgcactccagcctggtgacagagcaagactctgtctcaaaaaaaaaaaaaaagaaaaagcaaaagaaaagaaaaaagaaactttagtcccaggacagaaagacgggaaataacttggcaatakggcctaaaatacaaggttgtcagaagacaaaaagctgaataaattttaagatgaattttcttaatgagtacatgctactctttcctggaatgccaactcacaggtaaaaataacacagactcacagaaggattgtactcttcccaagaacagcatttgtcaagaagcctgtgtactgttaagcacatttagatgtagaacctagaacgctccaagacttaaggctccagctgaaaagagagctgaactcaactgccgtaacataattttcttaaacttcccctatggagatttattatattgggtatcttgctaaccttacaatggtagtgctgttcctgttgaacaaaatcagcaacagttcatattttaaattgttttaaattatatcaatatgccctcaaggactaataacacagtctgcgtgaagtagcaggagctgagtgaaccaaggaaacagaaaacagttgaaaaactatcctaaaccctcatctcttgacatctcccaattatttgacaatgaagactaaggaaaaacaggaagcaatatccattttcagactgcatttcatcctcctatttctgaaagtctcacttgtaat

SEQ ID NO: 76586 - DNA, 809 bp, Homo sapiens
tttgggttgactccacatgttggctgttggaattagtgctgctatgagcatggggtacatgtgtgagtatctgttttcaattctttggagtacattcctagcagtggaattgctgtgacatatgggaactctatatttaactttttgaggaaccgccatactattttccacagtggctgagccatttcacatttctgccagcgatgtacgagggttccaatttctccacaaccttgtcaacacttacttttcgtttttaaaattatagccatcctggtggatgtgaagtggtatctcattgtggtttttatttgcttttccaagactttttttttttaaaaaactgaaagagttggcaattttatgttcacatttcacaatacagatgaaaactgtacttttttggtctcacttctcccctccaaaactattctctggtaggaagggggagcaggtcttccttatgctgctaaggaaacacccagcgtcacagcaccatggtctcctggagaagaacaaatagcaaaaagctgatatgacgaggtctctccactattctaatctgtctggcttagttattctgggctgcgtgggctccaccatgcgatgggtgggcgggctcatcctgggggcctgggtaacactggcatgtgacatcccatgggtggcctcattccaggagcaggtcccatggcatcaccctcaggaggaggtgggcctgtcactggyaccataggaggaccccccatagagggtgctggcatcacaccagggtggcgaggaggacctgggcgctggtggaagtggga

SEQ ID NO: 76587 - DNA, 531 bp, Homo sapiens
cacctgaggatttcgtgacacttagcaaacactgaggagtaaaaacagacttggccggctcagcatttataaacagcaattcctcagaaaattccaggtctatattaaggtttcaatgttgtcgttaaataaacaaaccaagaaggctcatagtttttgctgagttgtgttactcatgcggactagccttggcttctaaactactgctctctgcctcactttcttcatctgccacgtgaggataaccatagtatctgccttgtggatttggggctggggtaaaatgagataatccctgtaaagtgcccagttcaacactgacagtaatagcagctgctcgaaaaatgggagttattagcattgtgggaagtggaatcatggccccctaaagatgctgcccccaaccttattcccagagacagtaactaagtcatgccatggggcaaagtgggctttgcagacrcagttgaagttcaggagcttgagatggggtggtgatcctggattttttcaggcaaaaacaatccaatc

SEQ ID NO: 76588 - DNA, 654 bp, Homo sapiens
agggggacggctaatgttggcctatgtaagaaaggaaattcttggaggaaaaataagtcagctaatttttgatgtaatcatcatgaaaacattttgtaagtagataatgaaatcagacactgaagaatcttttctgatcagtaaccctgaggagagaagttgcaggttacggtgctggctggcggggcggcgtaactccagccctctctctcctgcaccaggaggcgagcragcgagtaacagacacgggtcgggggtggaaggaggtggggagaggcggctcacaaggagacaggcagcaaagcggtggggagccaaggccccagagctctcagatacatcagtgtggtctgtagccaaccaaggcctcagtttcttcatctgtaaaatggagggattatcagtagctacctcatgggattgcaaatgacacaatctgtgtaaaaacacaattcgagatctcctcatatgatatttataatccactctaatttacaaatacaaaaagtttgccaccttttgcacttttactgttattaacagcaacgacctgtctttatttgcacagcttaccaggccctccagggtgacagtcaccaagagccagggcttgggcctcagctttgcagctcctggctcttggtttagtctgga

SEQ ID NO: 76589 - DNA, 900 bp, Homo sapiens
cttctcagacccaggataaaggactatgccttatcctgtgtgatcagcatcacacactcacacactcacccgcagtcacactcacacgtgcacacacacacccacacatcacgcctcccctgggtggtaagctacattttagtttacccaatagtgatcaacgagagcgcagtgtacgtgttgtacacggggtttccaagtctctgtttgctttttggtcgatggcagtggtgaaagtttatgaagcaagaaaggagcgcgggggaggtgaggcgagaggtggggtggaaagctttcaaatgaggccagctccttatggaaatgaggctccgtcatttttccctgagtggcctaaacccaatgtttacttgtagcttctgtgcaatgagctcaatatcacacgtattatattggatcctgatagtctgatattttatgggatgtctcctagatcttctttgctgaccccagcggtcccagcccagattccaagctgaacaagtcgggctgcttgctctgtgagcagtggagtccctgctgagcttgggcagctttcccgaggccccgccctctggcctcctgccctgctaacaggcacgtactctgtggatgggaccctgaaccagttatctcaatgtcagggggaatttacttccaagaaactcccctctcctcccaactgtgtccattcattcctgcggagtcygcacgtgggctgctcttcctctgggttcccgcccctgaaggcgcaggaggctgtgaccacgccccttttggagccttcctgggctcagggaggggctttgcctgcgggtgagtgtgtgtgagtgtgtgatgctgatgacacacacacggccctgcctcgaaggaggcatctgggaccgaatgggcttgggcgtc

SEQ ID NO: 76590 - DNA, 559 bp, Homo sapiens
cctggctcagtaaacgtttttttttttaatgattgaaagctcatctttatggtacttaaagtctgtttcaattactaagggtctttgtcgcttttttcttagggcagacttgtccaggccagaccacactctgtggggtgttgggagttgggttttcttgctgcaaggaatatatgttcttyaaggcagtcatctgccttaaagatcctaaggtgaggaattaggggagccttatacttgaaagggaggtcccctttgggcctggggagcattggtctgaaggctcaggtatggaggatgcaggaatatctgctggtgaggattgagctggaacctccctccttcccactcccatcttagtccctccggcctttaaaaaaatttattttattttatttttattttttaagatagagtttcactcttgtcacctaggctggagcgcaatggctcgatctcggctcactgcaatttccacctcctgggttcaagtgattctcctcccttagcctcccaagtagctgggattacaggcgcccgccaccacacctggctaatt

SEQ ID NO: 76591 - DNA, 559 bp, Homo sapiens
cctggctcagtaaacgtttttttttttaatgattgaaagctcatctttatggtacttaaagtctgtttcaattactaagggtctttgtcgcttttttcttagggcagacttgtccaggccagaccacactctgtggggtgttgggagttgggttttcttgctgcaaggaatatatgttctttaaggcagtcatctgccttaaagatcctaaggtgaggaattaggggagccttatacttgaaagggaggtcccctttgggcctggggagcattggtctgaaggctcaggtatggaggatgcaggaatatctgctggygaggattgagctggaacctccctccttcccactcccatcttagtccctccggcctttaaaaaaatttattttattttatttttattttttaagatagagtttcactcttgtcacctaggctggagcgcaatggctcgatctcggctcactgcaatttccacctcctgggttcaagtgattctcctcccttagcctcccaagtagctgggattacaggcgcccgccaccacacctggctaatt

SEQ ID NO: 76592 - DNA, 938 bp, Homo sapiens
cttttttccttccctgtggtgaagagggaggcattgtccagtgtactgggtcaaagtgatataaatattcttaagatgtaagccaaaatgaaagaagaacagattacatacatcccccaatttatcccaatagaaaatattggatttgccaatactgtatctcttgactctgcctctaataggagcttagcctaaaactggtttctattcatagagttaaaggctgagggagaatgaataaatgattctgtgaaaatagccttagtatgtattaaccagctgtacccaactgactttctcttgttagctgcacaaggcaaaggatgctgagatctagagcatgtgcttacaggagcagaggtaagttaggtacaagttacttgtacttcctggcgtttgaacaataactgggctcctttctctttcaaccagcaaaacatattgtaacactactgcattgaatgagtgtgatggattagagggaaattcttgaatgccatctcatttacatttttattaattgattcccctgcaacctttggtacttatgaaaagtaacaaatttctaatagcagccacatacccaacaccaaatacactggtccattaaacaggacttaggtgaaatggggtttgagcagtaatgttcggaccctattctaggtgtatcaggtttatttattttcttgtttgtaggatgctcactcttggcctatgtacgcaggctgccaagtaccagagatgatgcagaattcagattcccaaggaggggtaatggacggaaatgaaccctttcctgcttacacagtaaatattcacaaagaagtaaaagctaacctgagraaaaaaaaaaaaaaaaaaaaaacaggagaaaggggaaggggggaaaggcattttttattttcatagtgggaagaaatgtactctgggaagaaatg

SEQ ID NO: 76593 - DNA, 1773 bp, Homo sapiens
tgtctctttttaaagtgttgcagaggaaaaaaaaaaaaaagaatttaaagattttcttcaccccctccccatctccatttcccttcatcaggattacaaagccttatagctcagaggttcaaaggacttgtgcttggggtctgggagacataggtctgattcctgactcagtcactaactttatacagcctcagttgctccctctgcaaaatgaaaataataattccgtttgtgcagggtccataggaagtttagaaaagatatctgtaaagtaagaaactcagagtgggtttttcatcaatgataagtgtcattattattcagcaattcttgctcttctgtttgcaaattagatctttaaaatcattttaccacattagcatggagggtctttataataacacaaccagctctcaatttcttaaggactcaaatgaataatgtattctatggacataaaactttttgattatgaattatttccacagcaaaagtgctgtcttccccactgctagattataaaatctcagacagtaggttttctgtcttttcccttcctccagtagacctacaacatagtagatgccagtaactgtttttctaccagaatgagaagtgtggctattatgtaacctctcgtgaaataaacacttctctgttgtgccctatgaggctctaaagcatacagaggctaggtaagttgggccttcttgattttatacagcagattcaaattcatgcttcttcagattccagccacatgctctcataagaggaatatacttcctttcataaaattagcagaaatggtatttaccactcactcatttcaaatttgaactctggtttttgggtacttctcctttgataaaataagaattttttgaaaaaaagtttctgggttgtcaaaatgaatatcaggtcccttatatgctctttactttacagataaaggaattactgatgttttcttccttggcaggttccggccaaggctgcaccattataaggaatagtattagatttggcttaagagaaaaagcacttcttgtttttctccatgtgttccaaaactgmtgagtaggacgcatttcactaagcccaaattctttctgcaagtaaaatttagaagaaaggaaaataatttgtgagatattaaatgcattactaagagatagcatggtgcccttttgcaatggctgtgcttccaggacaacagtatcaattgaacaaatcagtctcaagtcataatgttatctaagcacatatgcaaatacagtgttttgtcctacagcagactcttagtcaataacaagcaaaaagaagcaggattcaaagtagtccctacttcagtaattccttacgctatttactccctgcacaataacagtatttaaagacaatatacattgcagcacagttgtttttatagattttcattaatttttttctattgaaaactagagcaaatctaagattaaaagtctaggccaggcacagtggttcacgcctgtaatcccaccacttcgggagtgggaggcaggtgaatcacttgacgtcaggggtctgagaccagcctggccaacatggtgaaaccccatctctactaaaaatacaaaaattagccgagcatggtggcgggcacctgtagtcccagctattcaggaggctgaggcgcgagaattgcttgaacctgggaggaggaggttgcagtgagccaagatcacgccactgcactccagcctgagggacagggtgagactccgtctcaaa

SEQ ID NO: 76594 - DNA, 1422 bp, Homo sapiens
  misc_feature (1)...(1422): n = A,T,C or G
agtttttcagtttttccttgtttttcatggcctgatacatttgaggggtagtagtgagatattttatagagcattcccaatacagatctgtcaaatgggttttcatgcttggactggagttacagatttttgtaaataacacgacagaggtgtggtacatttgccaacatcccaccaggaatacatggtatctacatgtattcctaaatggagctgttaaaccttatctcttggttaaaatagtgtctactgaaaatttattcacaaagttactatgattcttgtccaattgtttttcatttactatgtatttacttnnnnnnnnnnnnnnnnnnnnnnnnnnnnnnnnnnnnnnnnnnnnnnnnnnnnnnnnnnnnnnnnnnnnnnnnnnnnnnnnnnnnnnnnnnnnnnnnnnnnaatacaatgagtgcataaccaggtgtgagtaatcggaattagtgggacatgcatgaacatcagttttcaagttctagaccagtacttcttagctctgtctccagaatagtgtcaaccgaagagtacttacaaaatactgatgcccacaacccattgcagaaaaattacctcagcacctcagtaggtaaggtctagacattagttgtgttaattttttgattcatccagatgattcaaatatgtaggtcatttttcactaataatagatttcccattcataagaaccctctggggagcttttagaaagtcagattctgagcaattcatctggaaatttttaataaataaaactagagagactgttttttgccttgtataaatttagccataatattctgatttgcattaaatattgtgaaatgtattgcttccattttaatgtagcagtatcaaaatactgactaccagtctagagacttaagctgcaatttgggttgctttattgagtgtccaaactgaataagaaggcagaacttaatttcatttttttaaatcacaaaataaaattctttatcacatttctacctttatattttgtctattttggggtgtgttttagratcttaacctatgcctttatatgactttcctttaatcagatattgaatgaatgctatttagtttttaacaaggacaaaaagtaggatataatgtagttttactttgtttttaatgtccttaataaaattgatagtaactttattcctatttcttgttttaacttgattttcagttgtaatgaattcagaaatccaaaaaccactgaatcagcaaattttaaaaataattaaagagagagtaaataggaacctgaatctaggcaatcacagaaacaattgggaacaaacaatgaaaagtctgtttcaaagagagagccccaggattctgtgatcaaatgaagatgtaggtataaagatgaagtgtaacatgagccccaaatgtatg

SEQ ID NO: 76595 - DNA, 1422 bp, Homo sapiens
  misc_feature (1)...(1422): n = A,T,C or G
agtttttcagtttttccttgtttttcatggcctgatacatttgaggggtagtagtgagatattttatagagcattcccaatacagatctgtcaaatgggttttcatgcttggactggagttacagatttttgtaaataacacgacagaggtgtggtacatttgccaacatcccaccaggaatacatggtatctacatgtattcctaaatggagctgttaaaccttatctcttggttaaaatagtgtctactgaaaatttattcacaaagttactatgattcttgtccaattgtttttcatttactatgtatttacttnnnnnnnnnnnnnnnnnnnnnnnnnnnnnnnnnnnnnnnnnnnnnnnnnnnnnnnnnnnnnnnnnnnnnnnnnnnnnnnnnnnnnnnnnnnnnnnnnnnnaatacaatgagtgcataaccaggtgtgagtaatcggaattagtgggacatgcatgaacatcagttttcaagttctagaccagtacttcttagctctgtctccagaatagtgtcaaccgaagagtacttacaaaatactgatgcccacaacccattgcagaaaaattacctcagcacctcagtaggtaaggtctagacattagttgtgttaattttttgattcatccagatgattcaaatatgtaggtcatttttcactaataatagatttcccattcataagaaccctctggggagcttttagaaagtcagattctgagcaattcatctggaaatttttaataaataaaactagagagactgttttttgccttgtataaatttagccataatattctgatttgcattaaatattgtgaaatgtattgcttccattttaatgtagcagtatcaaaatactgactaccagtctagagacttaagctgcaatttgggttgctttattgagtgtccaaactgaataagaaggcagaacttaatttcatttttttaaatcacaaaataaaattctttatcacatttctacctttatattttgtctattttggggtgtgttttaggatcttaacctatgcctttatatgactttcctttaatcagatattgaatgaatgctatttagttttwaacaaggacaaaaagtaggatataatgtagttttactttgtttttaatgtccttaataaaattgatagtaactttattcctatttcttgttttaacttgattttcagttgtaatgaattcagaaatccaaaaaccactgaatcagcaaattttaaaaataattaaagagagagtaaataggaacctgaatctaggcaatcacagaaacaattgggaacaaacaatgaaaagtctgtttcaaagagagagccccaggattctgtgatcaaatgaagatgtaggtataaagatgaagtgtaacatgagccccaaatgtatg

SEQ ID NO: 76596 - DNA, 1422 bp, Homo sapiens
  misc_feature (1)...(1422): n = A,T,C or G
agtttttcagtttttccttgtttttcatggcctgatacatttgaggggtagtagtgagatattttatagagcattcccaatacagatctgtcaaatgggttttcatgcttggactggagttacagatttttgtaaataacacgacagaggtgtggtacatttgccaacatcccaccaggaatacatggtatctacatgtattcctaaatggagctgttaaaccttatctcttggttaaaatagtgtctactgaaaatttattcacaaagttactatgattcttgtccaattgtttttcatttactatgtatttacttnnnnnnnnnnnnnnnnnnnnnnnnnnnnnnnnnnnnnnnnnnnnnnnnnnnnnnnnnnnnnnnnnnnnnnnnnnnnnnnnnnnnnnnnnnnnnnnnnnnnaatacaatgagtgcataaccaggtgtgagtaatcggaattagtgggacatgcatgaacatcagttttcaagttctagaccagtacttcttagctctgtctccagaatagtgtcaaccgaagagtacttacaaaatactgatgcccacaacccattgcagaaaaattacctcagcacctcagtaggtaaggtctagacattagttgtgttaattttttgattcatccagatgattcaaatatgtaggtcatttttcactaataatagatttcccattcataagaaccctctggggagcttttagaaagtcagattctgagcaattcatctggaaatttttaataaataaaactagagagactgttttttgccttgtataaatttagccataatattctgatttgcattaaatattgtgaaatgtattgcttccattttaatgtagcagtatcaaaatactgactaccagtctagagacttaagctgcaatttgggttgctttattgagtgtccaaactgaataagaaggcagaacttaatttcatttttttaaatcacaaaataaaattctttatcacatttctacctttatattttgtctattttggggtgtgttttaggatcttaacctatgcctttatatgactttcctttaatcagatattgaatgaatgctatttagtttttaacaaggacaaaaagtaggatataatgtagttttactttgtttttaatgtccttaataaaattgatagtaactttattcctatttcttgttttaacttgattttcagttgtaatgaattcagaaatccaaaaaccactgaaycagcaaattttaaaaataattaaagagagagtaaataggaacctgaatctaggcaatcacagaaacaattgggaacaaacaatgaaaagtctgtttcaaagagagagccccaggattctgtgatcaaatgaagatgtaggtataaagatgaagtgtaacatgagccccaaatgtatg

SEQ ID NO: 76597 - DNA, 1422 bp, Homo sapiens
  misc_feature (1)...(1422): n = A,T,C or G
agtttttcagtttttccttgtttttcatggcctgatacatttgaggggtagtagtgagatattttatagagcattcccaatacagatctgtcaaatgggttttcatgcttggactggagttacagatttttgtaaataacacgacagaggtgtggtacatttgccaacatcccaccaggaatacatggtatctacatgtattcctaaatggagctgttaaaccttatctcttggttaaaatagtgtctactgaaaatttattcacaaagttactatgattcttgtccaattgtttttcatttactatgtatttacttnnnnnnnnnnnnnnnnnnnnnnnnnnnnnnnnnnnnnnnnnnnnnnnnnnnnnnnnnnnnnnnnnnnnnnnnnnnnnnnnnnnnnnnnnnnnnnnnnnnnaatacaatgagtgcataaccaggtgtgagtaatcggaattagtgggacatgcatgaacatcagttttcaagttctagaccagtacttcttagctctgtctccagaatagtgtcaaccgaagagtacttacaaaatactgatgcccacaacccattgcagaaaaattacctcagcacctcagtaggtaaggtctagacattagttgtgttaattttttgattcatccagatgattcaaatatgtaggtcatttttcactaataatagatttcccattcataagaaccctctggggagcttttagaaagtcagattctgagcaattcatctggaaatttttaataaataaaactagagagactgttttttgccttgtataaatttagccataatattctgatttgcattaaatattgtgaaatgtattgcttccattttaatgtagcagtatcaaaatactgactaccagtctagagacttaagctgcaatttgggttgctttattgagtgtccaaactgaataagaaggcagaacttaatttcatttttttaaatcacaaaataaaattctttatcacatttctacctttatattttgtctattttggggtgtgttttaggatcttaacctatgcctttatatgactttcctttaatcagatattgaatgaatgctatttagtttttaacaaggacaaaaagtaggatataatgtagttttactttgtttttaatgtccttaataaaattgatagtaactttattcctatttcttgttttaacttgattttcagttgtaatgaattcagaaatccaaaaaccactgaatcagcaaattttaaaaataattaaagagagaktaaataggaacctgaatctaggcaatcacagaaacaattgggaacaaacaatgaaaagtctgtttcaaagagagagccccaggattctgtgatcaaatgaagatgtaggtataaagatgaagtgtaacatgagccccaaatgtatg

SEQ ID NO: 76598 - DNA, 1009 bp, Homo sapiens
ttatttggagactcaaaaaccaaaaagcctttaggggcaaactccccaaatgaagtcataataaaagaggaaatgacagactgttttttaacgtttatagagaaagatctctcctaattcctcattcaaaaaccagtctatgtattcatcgtagaaaaaatgagggtatctcaggttttatactgccccaaacctcaaccaccctcttattcccttactcttattaagttgaatacttacaaacagcctgcttttcctccaaggagaataaaacgtgagaaggcatattctctttcaagggtactagagttaattatgtcaacttgataatctaatttactttttggacacacctagctgatctcaagttctgatgatctgaagaacatttatcatctatctcacacttttcaaacttgtagttattaattgggctaatattcattaaagtacctccatggtcaatgagtaatgactggaaacacatctagtaaataattcatttttatttatgacccgtctacttcagcaagatctgtttcagggattaaaacgaggaatttaaaattycctcttcattatttattcctctccgcaaccccttacccatactgttactacttatcctacactttctcagaatcacccagacttgtcattcttagtggcttttatgtgcagagtgtcagcatcacattttactcatgacccaccacagcgtgccttctcttgttctcatccttgatagagatgtggcccaggaaagcatgctcattcagcagttaacaaatatctaattgtgcgaattcaagtttgcactttcaaatattgttagctagtatctaataccagaaaatttcctttttgaaggtttgaacatccatacaaatatcatatttttattaatcttagcttaatatcattttctccatcaagcctttgcacagctaagacattcagatactcctgcctttaccctatggtatgctataaagagaacccacatttg

SEQ ID NO: 76599 - DNA, 1272 bp, Homo sapiens
tttagttgttaattaaaatatgtgagaaatggcccctctctcatagacacattcacaaatgtaagaggaacattttaaacttatccgattctattttgaagcaaataaaaattgagataaataaaatgcattcattaaggtacagtcatagaacttactgaaagagagtctctaacttagttattaaaaggaactcctaaatwtatttttaaatgtctcctgctacaagtttcttttttttttttaaacaaatgatgcaatgagtataacacagtaaactttgctggatgtataatgccatatatatttaaaggaaaaaaacacactggccaggcacggtggctcacacctgtaatcccagcattttgggaggagactgaggcaggtggatcgcctgaggtcaggagttcgagaccagcctggccaacatggtgaaaccccgtctctattaaaaatataaaaattagccgggcatggtggcaggtacctgtaatcccagctacttgggaggcggaggcagggagaatcacttgaacctgggaagcagagttgcagtgagccaagatcgctccattgcactccagcctgggcaacaagagcgagatttcatctcaaaaaaaaaaaaaaaaaaaaatcatatggatccaaagcccacttgatcaagccaggaattaataaaaggaatttagaatatacagaacaaaaacaactttaaaatgaagattgataaaaacatgattaatatcaacctgagttcttacctttcaacatgttatctctcataacaatttcaggaaataacagcctgattcttcttttttttcattccaaagatgcttcaaaacatgctgtgctagattacatggtgaataactttctataggacccacaaggcctgcaagggaagttgggccccagggtggaggtgggagactgaacataaattaaaactaaatgatctgcttccctgtcaggaacctatagagatggttagggccactgagaacagtgggagaattacaaggaacaggacttgggagactagcagtattctagtttgtatgattatttttagaaatatgaaggagtcagaagaaacctcagaccttcatcttttattttatcctagtcacttcatctgaaagctctatggatcatccataaagctaattatttttttccttgggtagccggttttatgaaaaatatgaatgctccttgatttaacaataggattacatacagataaagaagtcaaaggttgaaaacatt

SEQ ID NO: 76600 - DNA, 1272 bp, Homo sapiens
tttagttgttaattaaaatatgtgagaaatggcccctctctcatagacacattcacaaatgtaagaggaacattttaaacttatccgattctattttgaagcaaataaaaattgagataaataaaatgcattcattaaggtacagtcatagaacttactgaaagagagtctctaacttagttattaaaaggaactcctaaatatatttttaaatgtctcctgctacaagtttcttttttttttttaaacaaatgatgcaatgagtataacacagtaaactttgctggatgtataatgccatatatatttaaaggaaaaaaacacactggccaggcacggtggctcacacctgtaatcccagcattttgggaggagactgaggcaggtggatcgcctgaggtcaggagttcgagaccagcctggccaacatggtgaaaccccgtctctattaaaaatataaaaattagccgggcatggtggcaggtacctgtaatcccagctacttgggaggcggaggcagggagaatcacttgaacctgggaagcagagttgcagtgagccaagatcgctccattgcactccagcctgggcaacaagagcgagatttcatctcaaaaaaaaaaaaaaaaaaaaatcatatggatccaaagcccacttgatcaagccaggaattaataaaaggaatttagaatatacagaacaaaaacaactttaaaatgaagattgataaaaacatgattaatatcaacctgagttcttacctttcaacatgttatctctcataacaatttcaggaaataacagcctgattcttcttttttttcattccaaagatgcttcaaaacatgctgtgctagattacatggtgaataactttctataggacccacaaggcctgcaagggaagttgggccccagggtggaggtgggagactgaacataaattaaaactaaatgatctgcttccctgtcaggaacctatagagatggttagggccactgagaacagtgggagaattacaaggaacaggacttgggagactagcagtattctagtttgtatgattatttttagaaatatgaaggagtcagaagaaacctcagaccttcatcttttattttatcctagtcacttcatctgaaagctctatggatcatccataaagctaattatttttttccttgggtagccggttttatgaaaaatatgaatgctccttgatttaacaataggattacatacagataaagaartcaaaggttgaaaacatt

SEQ ID NO: 76601 - DNA, 1120 bp, Homo sapiens
tagtgctgcaagaatgagtgattcctcaaattaaaaagaatggagctttgccctaaaatcttcattcagatgcagtccatgctgaaataagctayaagtgcagcttcacaaaataggctaggttgtagctggcttttctggaagacaatagggtaaatggggagattaattatcacaatttattagtaaatcacaaatggaagatggtctttcttagacatttcttattaaaaaaagaggtctagcaaatgatattagtagcactagacaaaatagtatatgtggtactagaccataattttccccaaagtaaaatcatcctttttttgctattgctcctttctgtgaccatcagaaggttacagtggaggttactgtgaagttattctcatttttatatgttaaaatgataaactttagaaaatatgttaaattttcaagattctagaaccttgatcatgtgtttgctgcagtacacagatggttgttaaagtggaacctataaattctctcaaattattatgaggctttaaatattataccaaaacacaatccaggatgtgaaaatctggagtcatttttaagaagataaagtatatgacactacatcaaaacaatatgccaatatgtgaaaatctagagtcatttttaagaagataaagtatgtgacactagatccaaacaatatgcgatcctactcacattcctgcctctgacagtagcctcaagaaacctcagaagtcaggctcccataacggcagtttaaatagtgtgcatgataaaatcttaagctcaataacatattagataatcattcattcagcaaacaataatccatcatctattctgctagtaaaagttctatattaaatgctattgagttgaacggatcaatgaggaagaaaggaggacataaaaatgaagaaacatattttctttgcagactttattgttttggtggagtataaggcagatgtttaaatcaaccaaaccatgctcatttaaataaaaataataataattaaaaattcataaataaggagataaattgtttatggtatgtatctataagacaatggtatatgatatagttcaaatcaaatttacaattaattttaat

SEQ ID NO: 76602 - DNA, 1120 bp, Homo sapiens
tagtgctgcaagaatgagtgattcctcaaattaaaaagaatggagctttgccctaaaatcttcattcagatgcagtccatgctgaaataagctacaagtgcagcttcacaaaataggctaggttgtagctggcttttctggaagacaatagggtaaatggggagattaattatcacaatttattagtaaatcacaaatggaagatggtctttcttagacatttcttattaaaaaaagaggtctagcaaatgatattagtagcactagacaaaatagtatatgtggtactagaccataattttccccaaagtaaaatcatcctttttttgctattgctcctttctgtgaccatcagaaggttacagtggaggttactgtgaagttattctcatttttatatgttaaaatgataaactttagaaaatatgttaaattttcaagattctagaaccttgatcatgtgtttgctgcagtacacagatggttgttaaagtggaacctataaattctctcaaattattatgaggctttaaatattataccaaaacacaatccaggatgtgaaaatctggagtcatttttaagaagataaagtatatgacactacatcaaaacaatatgccaatatgtgaaaatctrgagtcatttttaagaagataaagtatgtgacactagatccaaacaatatgcgatcctactcacattcctgcctctgacagtagcctcaagaaacctcagaagtcaggctcccataacggcagtttaaatagtgtgcatgataaaatcttaagctcaataacatattagataatcattcattcagcaaacaataatccatcatctattctgctagtaaaagttctatattaaatgctattgagttgaacggatcaatgaggaagaaaggaggacataaaaatgaagaaacatattttctttgcagactttattgttttggtggagtataaggcagatgtttaaatcaaccaaaccatgctcatttaaataaaaataataataattaaaaattcataaataaggagataaattgtttatggtatgtatctataagacaatggtatatgatatagttcaaatcaaatttacaattaattttaat

SEQ ID NO: 76603 - DNA, 1120 bp, Homo sapiens
tagtgctgcaagaatgagtgattcctcaaattaaaaagaatggagctttgccctaaaatcttcattcagatgcagtccatgctgaaataagctacaagtgcagcttcacaaaataggctaggttgtagctggcttttctggaagacaatagggtaaatggggagattaattatcacaatttattagtaaatcacaaatggaagatggtctttcttagacatttcttattaaaaaaagaggtctagcaaatgatattagtagcactagacaaaatagtatatgtggtactagaccataattttccccaaagtaaaatcatcctttttttgctattgctcctttctgtgaccatcagaaggttacagtggaggttactgtgaagttattctcatttttatatgttaaaatgataaactttagaaaatatgttaaattttcaagattctagaaccttgatcatgtgtttgctgcagtacacagatggttgttaaagtggaacctataaattctctcaaattattatgaggctttaaatattataccaaaacacaatccaggatgtgaaaatctggagtcatttttaagaagataaagtatatgacactacatcaaaacaatatgccaatatgtgaaaatctagagtcatttttaagaagataaagtatgtgacactagatccaaacaatatgcgatcctactcacattcctgcctctgacagtagcctcaagaaacctcagaagtcaggctcccataacggcagyttaaatagtgtgcatgataaaatcttaagctcaataacatattagataatcattcattcagcaaacaataatccatcatctattctgctagtaaaagttctatattaaatgctattgagttgaacggatcaatgaggaagaaaggaggacataaaaatgaagaaacatattttctttgcagactttattgttttggtggagtataaggcagatgtttaaatcaaccaaaccatgctcatttaaataaaaataataataattaaaaattcataaataaggagataaattgtttatggtatgtatctataagacaatggtatatgatatagttcaaatcaaatttacaattaattttaat

SEQ ID NO: 76604 - DNA, 1120 bp, Homo sapiens
tagtgctgcaagaatgagtgattcctcaaattaaaaagaatggagctttgccctaaaatcttcattcagatgcagtccatgctgaaataagctacaagtgcagcttcacaaaataggctaggttgtagctggcttttctggaagacaatagggtaaatggggagattaattatcacaatttattagtaaatcacaaatggaagatggtctttcttagacatttcttattaaaaaaagaggtctagcaaatgatattagtagcactagacaaaatagtatatgtggtactagaccataattttccccaaagtaaaatcatcctttttttgctattgctcctttctgtgaccatcagaaggttacagtggaggttactgtgaagttattctcatttttatatgttaaaatgataaactttagaaaatatgttaaattttcaagattctagaaccttgatcatgtgtttgctgcagtacacagatggttgttaaagtggaacctataaattctctcaaattattatgaggctttaaatattataccaaaacacaatccaggatgtgaaaatctggagtcatttttaagaagataaagtatatgacactacatcaaaacaatatgccaatatgtgaaaatctagagtcatttttaagaagataaagtatgtgacactagatccaaacaatatgcgatcctactcacattcctgcctctgacagtagcctcaagaaacctcagaagtcaggctcccataacggcagtttaaatagtgtgcatgayaaaatcttaagctcaataacatattagataatcattcattcagcaaacaataatccatcatctattctgctagtaaaagttctatattaaatgctattgagttgaacggatcaatgaggaagaaaggaggacataaaaatgaagaaacatattttctttgcagactttattgttttggtggagtataaggcagatgtttaaatcaaccaaaccatgctcatttaaataaaaataataataattaaaaattcataaataaggagataaattgtttatggtatgtatctataagacaatggtatatgatatagttcaaatcaaatttacaattaattttaat

SEQ ID NO: 76605 - DNA, 1120 bp, Homo sapiens
tagtgctgcaagaatgagtgattcctcaaattaaaaagaatggagctttgccctaaaatcttcattcagatgcagtccatgctgaaataagctacaagtgcagcttcacaaaataggctaggttgtagctggcttttctggaagacaatagggtaaatggggagattaattatcacaatttattagtaaatcacaaatggaagatggtctttcttagacatttcttattaaaaaaagaggtctagcaaatgatattagtagcactagacaaaatagtatatgtggtactagaccataattttccccaaagtaaaatcatcctttttttgctattgctcctttctgtgaccatcagaaggttacagtggaggttactgtgaagttattctcatttttatatgttaaaatgataaactttagaaaatatgttaaattttcaagattctagaaccttgatcatgtgtttgctgcagtacacagatggttgttaaagtggaacctataaattctctcaaattattatgaggctttaaatattataccaaaacacaatccaggatgtgaaaatctggagtcatttttaagaagataaagtatatgacactacatcaaaacaatatgccaatatgtgaaaatctagagtcatttttaagaagataaagtatgtgacactagatccaaacaatatgcgatcctactcacattcctgcctctgacagtagcctcaagaaacctcagaagtcaggctcccataacggcagtttaaatagtgtgcatgataaaatcttaagctcaataacatattagataatcattcattcagcaaacaataatccatcatctattctgctagtaaaagttctatattaaatgcyattgagttgaacggatcaatgaggaagaaaggaggacataaaaatgaagaaacatattttctttgcagactttattgttttggtggagtataaggcagatgtttaaatcaaccaaaccatgctcatttaaataaaaataataataattaaaaattcataaataaggagataaattgtttatggtatgtatctataagacaatggtatatgatatagttcaaatcaaatttacaattaattttaat

SEQ ID NO: 76606 - DNA, 1345 bp, Homo sapiens
tgtctttccgctccctgcagcacaccacttttcctacttgttttaaaatgtgatagtaaaatgcaagttccttaatgaaaatgccctgtttatcacaatatcctttgtgtatagaccctcaagcatcccaaactcatttccatattagagcctttacaaatgctgcttcctctgcttgcagaacccttcttccaaatacccatatagaaactgccacttaaaatgtatgtctcagctcacaaactattttcatgcaaacagcccctatcaccctttccaggaatgsttctttcctaaagttgttattatattttctacctttatatcttatttagtccttaccatcatttcaaatcatcttgttgtttttatgtttaatgttcacttttaacaaacttttttgaaggctggtatcctatctgtggcatcatcagtttctaacacaacacacgcttgttatataaaaaattaagcaaaccctccagagaatataggttagtgttttgttacaagagaaaatgatgaaatatttatcattttatcttatatattagataagaaattatttcatatattaaaaaatactaccatttacactgtataatatgaaaattttataagaaagtatttctcatatgtgatcttaagatggtggaaaatttaggaggtagatttttttggtgtgtgttagtacttttctcagaaaaaatgcattttgtctggggacaacaagatataccttgcaaagacaactgtgcccctaatatctaaactctacataaatgaaactttacaagatgtttttcatgttaccttaactcttttaaatgaagacaccaagtcctgaactgccagctttggaaagaccatgagagactgtgaggccaaacactttctccctaactttatttctgccatgaaatcagctcagagagcccgggaaagtcattcaatattttgagacctctgctccagtgatattcaggtcccatgtatgtgggatgactagaatgtttattcatttaggtcaggtctttatttttaattaagaagtatttattatattcctgctatgtgccagacactgtgtggttgcaaaaagatttctcattctgtattactcagtcattggagtctgtgtaggtcacttaccctacctatgtcatctgtaatatggatgtaataatgtatgctttcccgggtgtgagggacagatactatataaacatttttagtgtaaaagtttgagagatttttcttagcataaagcttcttttatattccagtagctgaggccaactatatataattcataagatactgccaaataaataactgatgggaa

SEQ ID NO: 76607 - DNA, 1345 bp, Homo sapiens
tgtctttccgctccctgcagcacaccacttttcctacttgttttaaaatgtgatagtaaaatgcaagttccttaatgaaaatgccctgtttatcacaatatcctttgtgtatagaccctcaagcatcccaaactcatttccatattagagcctttacaaatgctgcttcctctgcttgcagaacccttcttccaaatacccatatagaaactgccacttaaaatgtatgtctcagctcacaaactattttcatgcaaacagcccctatcaccctttccaggaatggttctttcctaaagttgttattatattttctacctttatatcttatttagtccttaccatcatttcaaatcatcttgttgtttttatgtttaatgttcacttttaacaaacttttttgaaggctggtatcctwtctgtggcatcatcagtttctaacacaacacacgcttgttatataaaaaattaagcaaaccctccagagaatataggttagtgttttgttacaagagaaaatgatgaaatatttatcattttatcttatatattagataagaaattatttcatatattaaaaaatactaccatttacactgtataatatgaaaattttataagaaagtatttctcatatgtgatcttaagatggtggaaaatttaggaggtagatttttttggtgtgtgttagtacttttctcagaaaaaatgcattttgtctggggacaacaagatataccttgcaaagacaactgtgcccctaatatctaaactctacataaatgaaactttacaagatgtttttcatgttaccttaactcttttaaatgaagacaccaagtcctgaactgccagctttggaaagaccatgagagactgtgaggccaaacactttctccctaactttatttctgccatgaaatcagctcagagagcccgggaaagtcattcaatattttgagacctctgctccagtgatattcaggtcccatgtatgtgggatgactagaatgtttattcatttaggtcaggtctttatttttaattaagaagtatttattatattcctgctatgtgccagacactgtgtggttgcaaaaagatttctcattctgtattactcagtcattggagtctgtgtaggtcacttaccctacctatgtcatctgtaatatggatgtaataatgtatgctttcccgggtgtgagggacagatactatataaacatttttagtgtaaaagtttgagagatttttcttagcataaagcttcttttatattccagtagctgaggccaactatatataattcataagatactgccaaataaataactgatgggaa

SEQ ID NO: 76608 - DNA, 1345 bp, Homo sapiens
tgtctttccgctccctgcagcacaccacttttcctacttgttttaaaatgtgatagtaaaatgcaagttccttaatgaaaatgccctgtttatcacaatatcctttgtgtatagaccctcaagcatcccaaactcatttccatattagagcctttacaaatgctgcttcctctgcttgcagaacccttcttccaaatacccatatagaaactgccacttaaaatgtatgtctcagctcacaaactattttcatgcaaacagcccctatcaccctttccaggaatggttctttcctaaagttgttattatattttctacctttatatcttatttagtccttaccatcatttcaaatcatcttgttgtttttatgtttaatgttcacttttaacaaacttttttgaaggctggtatcctatctgtggcatcatcagtttctaacacaacacacgcttgttatataaaaaattaagcaaascctccagagaatataggttagtgttttgttacaagagaaaatgatgaaatatttatcattttatcttatatattagataagaaattatttcatatattaaaaaatactaccatttacactgtataatatgaaaattttataagaaagtatttctcatatgtgatcttaagatggtggaaaatttaggaggtagatttttttggtgtgtgttagtacttttctcagaaaaaatgcattttgtctggggacaacaagatataccttgcaaagacaactgtgcccctaatatctaaactctacataaatgaaactttacaagatgtttttcatgttaccttaactcttttaaatgaagacaccaagtcctgaactgccagctttggaaagaccatgagagactgtgaggccaaacactttctccctaactttatttctgccatgaaatcagctcagagagcccgggaaagtcattcaatattttgagacctctgctccagtgatattcaggtcccatgtatgtgggatgactagaatgtttattcatttaggtcaggtctttatttttaattaagaagtatttattatattcctgctatgtgccagacactgtgtggttgcaaaaagatttctcattctgtattactcagtcattggagtctgtgtaggtcacttaccctacctatgtcatctgtaatatggatgtaataatgtatgctttcccgggtgtgagggacagatactatataaacatttttagtgtaaaagtttgagagatttttcttagcataaagcttcttttatattccagtagctgaggccaactatatataattcataagatactgccaaataaataactgatgggaa

SEQ ID NO: 76609 - DNA, 667 bp, Homo sapiens
tataggttagcatgcagttagctcaagtgctgtgagtatccacttaaaatactacatgatgttaatcatttctgcatgagcagtttctctctctagtaaattgtatatcacatcaaaaagtgatctctcatagttctcatgtatttttcattgtacttagttcaatactataaacctygaataacaccacaggacccttatgaaatggctctactgatgctggaggacttaagcagagaaaagacatgacattacaagaaaaagttgaattgcttgatatgtactacgggttgaggtctgcagctgcagtttcctgcagttgtctgcagctgcagacagatgatttgccttgtaagcagacagagtattaatacaatgcagtagtataaatatattttctcttccttataatttccttcataaccttttctttagtttcttaactgtaataatttggtatataatacatacaacataaaaaatacacgttaattgactgtttatggtatcagtaaggcttccagtctacagtaggctattagtagttaagttttgggggagtcagaagttatacatggatttgacactttaggggtgattggtgtcccttagccttcacgttgttcaagggtcaactatgtaagtgtgtgtctgtatgtgtgtataa

SEQ ID NO: 76610 - DNA, 667 bp, Homo sapiens
tataggttagcatgcagttagctcaagtgctgtgagtatccacttaaaatactacatgatgttaatcatttctgcatgagcagtttctctctctagtaaattgtatatcacatcaaaaagtgatctctcatagttctcatgtatttttcattgtacttagttcaatactataaaccttgaataacaccacaggacccttatgaaatggctctactgatgctggaggacttaagcagagaaaagacatgacattacaagaaaaagttgaattgcttgatatgtactaygggttgaggtctgcagctgcagtttcctgcagttgtctgcagctgcagacagatgatttgccttgtaagcagacagagtattaatacaatgcagtagtataaatatattttctcttccttataatttccttcataaccttttctttagtttcttaactgtaataatttggtatataatacatacaacataaaaaatacacgttaattgactgtttatggtatcagtaaggcttccagtctacagtaggctattagtagttaagttttgggggagtcagaagttatacatggatttgacactttaggggtgattggtgtcccttagccttcacgttgttcaagggtcaactatgtaagtgtgtgtctgtatgtgtgtataa

SEQ ID NO: 76611 - DNA, 667 bp, Homo sapiens
tataggttagcatgcagttagctcaagtgctgtgagtatccacttaaaatactacatgatgttaatcatttctgcatgagcagtttctctctctagtaaattgtatatcacatcaaaaagtgatctctcatagttctcatgtatttttcattgtacttagttcaatactataaaccttgaataacaccacaggacccttatgaaatggctctactgatgctggaggacttaagcagagaaaagacatgacattacaagaaaaagttgaattgcttgatatgtactacgggttgaggtctgcagctgcagttkcctgcagttgtctgcagctgcagacagatgatttgccttgtaagcagacagagtattaatacaatgcagtagtataaatatattttctcttccttataatttccttcataaccttttctttagtttcttaactgtaataatttggtatataatacatacaacataaaaaatacacgttaattgactgtttatggtatcagtaaggcttccagtctacagtaggctattagtagttaagttttgggggagtcagaagttatacatggatttgacactttaggggtgattggtgtcccttagccttcacgttgttcaagggtcaactatgtaagtgtgtgtctgtatgtgtgtataa

SEQ ID NO: 76612 - DNA, 667 bp, Homo sapiens
tataggttagcatgcagttagctcaagtgctgtgagtatccacttaaaatactacatgatgttaatcatttctgcatgagcagtttctctctctagtaaattgtatatcacatcaaaaagtgatctctcatagttctcatgtatttttcattgtacttagttcaatactataaaccttgaataacaccacaggacccttatgaaatggctctactgatgctggaggacttaagcagagaaaagacatgacattacaagaaaaagttgaattgcttgatatgtactacgggttgaggtctgcagctgcagtttcctgcagttgtctgcagctgcagacagatgatttgccttgtaagcagacagagtattaatacaatgcagtagtataaatatattttctcttccttataatttccttcataaccttttytttagtttcttaactgtaataatttggtatataatacatacaacataaaaaatacacgttaattgactgtttatggtatcagtaaggcttccagtctacagtaggctattagtagttaagttttgggggagtcagaagttatacatggatttgacactttaggggtgattggtgtcccttagccttcacgttgttcaagggtcaactatgtaagtgtgtgtctgtatgtgtgtataa

SEQ ID NO: 76613 - DNA, 2203 bp, Homo sapiens
ataacttgaacataatacataaaaattatataactaaagcatattcacaacaggcaacattctggcatctacaatccagtgttttctaagataagttatttaaaccaaaattttaaaagggaaacatttcaaaaattataaagttaatcttattaaatagcacgacttaaaagaaaatcaagagaataggtcacttcttactgggtcaactttattttcattttatcttttacatttagaaatactaaaggataaaaaacgagtatggctaagacagtggtaggactgtgggtgattttcttcgaattgttttttttttaaggttagttaggttgtttatagcttttaaaacatcatgagaaaaataacatatttctctggctaccaggccagaaagaatatgagtagtacaacaatgataacaaaaacaatggtttctctgcgagagttctttataaactcttcaaagcccatttctatttcctggtaagagatcacagattctcttggcatcagcaataagcaacgttagccactatactcactgatcaccttagtctctctgtgccttaagactggaatgatgctaacaataagaagagtttccatggccaggcgtggtggctcatgcctgtaaacccagcactttgggaggccaaggcagatggatcacctgaggtcaggagtttgagaccaatctggccaacatggcaaaaccccgtctctattaataatacaaaaatgagctgggcatggtgatgtgtgcctctaatcccagctactcatgaggctgaggcaggagaatcgcttgaacccgggaggtgggggttgcagtgagccgagattgcgccactgcactccagcctgggcggcaaaagcgaaactctgtctcccccyaccagaaaaaaaaagacagtttccaatctgtgagcacaaactttgtgccacatatagtattatgcatgtctagcctcatcaagaaactgaagcttagaaagtttaagtgacttgcaagaaaataagcaacacttaaaattcaaagctaattccaattctaaagctcatattcttttcataaatgacaccatggtaccatacctactaaacatgtgggtgcctagttactatcaaaagcattttcctgctaccagatgcttttgccactgctctcgtcttttacagtcacaattaaagttactgaaggtataagcaaatgactctactttgggactcctctgttggtatctttccaacagaaatgaaaacatatatgtacacaaagatttgtacccaaatgttcactgtagcattttcacaatagcaaataccggaaaccattcaaaacacccttgacctctacctacctacaggagcctgctcactagccttatagatgtcgtatctcatcttcatgactaatggcagtgcagaaacacaagcaggaccagggcccagccaaggaataaatcacttaaacaattccagccagttgcagtggctcacacctgcaagcccagcactttgcaaggccaaggcaggcagatcacctgaggtcaggagttcaagaccagtctggccaacatggtgaaaaccccgtctctaccaaataataaaaaaatcagctggctgaggtggtaggtacctgtaatcccagctgcttggaaggctgaggtgggagaatcacttgaaccctggaggcggaggctgcagtgagcggagatcgcaccactgcactccagcctgggcaacaaaatgagaccctgtctcaaaaaaaaaaaaaaattactaaattgtacactttaaatgaatgaattttataatagttaaaatgaattttatagtagttaattatacctcaataatttttaaaagaacataaaacgctctctgcaagatacaaaactagacatcaacaaatgaagacatcccatattctggaatacaaggactcaaaatcccaagatgtcaactctctgtaatgtaatctacaaatggaatcccaataaaaataccatcatagacctccccacccccaaacacctccatgtaaacaaactgattataaagttcacttggaggaataaacaaacaacaatatctaggaaaacattaaagattttataattaaaagagtgttcttcctgtacatggacagacagagcaataagacggagtaaaaactccataaacaggcccaaatgca

SEQ ID NO: 76614 - DNA, 698 bp, Homo sapiens
tgtgactgcaagcaggtaggcacatctgatgacgggaagatgccacacccaggtgtgtaccacctaccgagctccatcccctgccccaggttccatgtgactgaggtactcggtaaatggtagttaaatacataaataagtgggtgagtgagtgaatgcatgaatgagtgacaaaatgagagggtaaacacatcatgttttccacctctctcccttgtcctctagagctcactgtgtttgccattgggtagggtgtggtaaaaggtgagagggcccttgctgtgtggccagtagagaatcggctgaaacccgggagacctgagttaaacaggaggcagttggcactgggagatgcaagagagagtgccattgtggaaggacggggccagggttctagttctggctttcactgaatatgtgaccttggccaaatgtctttacttccctatgtcacagctgtgttatctgttaaacagatgtttagagtagattatttcttagtttttcatctgttaaatagwtgtttcgattagattatttcttaggtttttttttctttgcttttttacttctttacccccttcctttttttacccatgttttttgcttgatttacgttagacttagtctctgcccctaaggaactttcttactgtgttctcagtccgtcattgacttcctagacaaggagaggatcc

SEQ ID NO: 76615 - DNA, 708 bp, Homo sapiens
accggagcctttcgaggagcaaacctgggccactgaccctcctgaacctaccagacaaaatgttcctccctggggctccggtgtggagctcacacacctggggagctgggtccatcaggacrggctggagccttgccaggagcaaacccgggccactgaccctcctgaatctaccagacaagatgctcctccctggggctccggtgtggagctcacacacctggggaggcccctctgcccagagggagcacaggcagaacacagcatcaccagggtcaccagtgaacagccatctaccggggagcccaaagcagaaccggagcacgtccacacaggtagtgttctgggcaggcatcctgcaggcccagatgtgtgtcctagacctggaggaggagctggagaagacggaagggctcaaggctgggctgaaatgctgtctccccacgccccctgtggacctccccggggacacgggcctgcactccagcccacctgagaatgaagactcaggggaagacagcagtgagcctgagggagagggccaggcatgctgagagagggaaccccagactcttccccacagtggggagctgaggaggagagcatgttcttcagcaaccccctcttcctggcgagtccttgctcagagaacagtgcttctggagagtgcttttcctggggggcttcagactcccatgcaggtgtgag

SEQ ID NO: 76616 - DNA, 572 bp, Homo sapiens
gacttctcagggagataggcttggtcctgctccatctgcagcaccgtgtgtggacgaagcattgacctgggaatcaggatgtgtcggatctgatcttggccctgctgcacatcctgtgcaaccttgggcaagtcacttcccctttctgggccttactttctccatctttggaggaggaatatgagcccattcatttccagggcctagcaccaacaatcctaggatgtggggcttctcacatcaggactccccttctgaactgaggctccagcctgggtgggaggaggatggaggggcttctgcctactcatggcatccttcccctcccctcctttccccttctccctgcctggcctctcccccatccacctctctgtgtmtccagggctcatgggaatgcctttgcctctctcaacaggcctctctcagccctgagggctggcagagaggaggtcctttttggccccaggtgactcttaactcccaggacagaggtgagccctaataagggggtttgggaaattgggtcctgggaggatttggaatttggagtggggacaaagatcattctt

SEQ ID NO: 76617 - DNA, 1271 bp, Homo sapiens
catgtgggttgttctttccatttaccatcttggaagtcttcaaagaattagtgtccaggaccactggtcaaacattataccttttgttggttgctttccccctggttggtattttcttttatggaaagggagctacagaggagggatcacagaactggagagagggccagcaaacattctgagtctctgaggactaaggctagtccacgagaagctggcctgggtttgtgaaggaggtctcaggtctcagctcttaagattttcttctgggattccaagacagtgtcctctgctgcttctttccgctggctggactctgcctgtaattcaggcaggagccaccaggtggagaaatgtgtagatgacatcctggggacacacacacacacacacacacacacacagacacacacacacacacacacagacacacacacacacaggttcattcatagcaaacattgtacatttatgaaagttagttaccattaattctctcctggccttagttgcctcatctttaaagtgaaaaggttaaggaaagtgatttctaatgtctgctctgaatttctaggattctatagtattgcagttataacaaggcttcttttactttttaaaaacgtattgcaggtccttaaggttttggggtcacagccatgttccccattccttcctttcccacagtttacttgagctctctttgaacatcacctaccactcaaagtcagtttcctcaacttctctgtattttaaaaatgtctctatattttcatttacttgtttttctttttttttcccccttaattttggacacaaactttgtgtgctttcttggatttcttcaactgcctctattttctctcgttaggtgcccagacaattctgagttttccctccttttccaggcttgatcacaccatgggatttggttttgtggtgaatggggattggatgatgcaatccagaagcccagggggatttgctcactgttgggtaaatcttgactggtgggaaatgggagactggaggaagatsgtcagataaatcctcctcctccttcctgtgaatactttaaggtatgatttctccctgcaaatcctacagagaagcccagcatgtcaagcaagcgtgtctcatgagtgacctgctgtatgtctgtgatggttaattttatgtatcaacttgactagaccatggggtgcccaggtgtctggctaaacattatttctcgggtgtttctgtgggtgtgtttctggatgagatatgca

SEQ ID NO: 76618 - DNA, 1187 bp, Homo sapiens
tacatttagtaaatgaaagtgatatttgcatattgtttttacctttcatgacaagttacagacccatttgttcatatagggcagtttcaaaagggaggagggctgcttaacctgaatttgactttaaatgaaagaacaataaaagtttttattcttaaatcattactagttgagaaatttacctgataccacaaggtagcttattcttttctgattatagtagaaatactttcagatttttaagcaatatatagtacagaaatatgttgattggtaacaaatatatctaacacttgtcatttcacacattctatatttttctctttactttctatttcgtgcatgacattgtgctaagcaccaatgtaccatattagaaactgacctctcagaaattacacatttttgtaattacctaatataacattgccctggtgctgtggcattaggtattttacgcatatgattagctaagacatttgtcatgggaacctcatataatttcaaaagaaatgatttactaattccttcagtatgaatgttrgagtggcaggatcataatcctcattttatagatagttctacccaagaacagagagattaaaatattgtctaacgatgatgattgaagaggatctaagtccccatttctgatcctcacacgctttctatttgtcaacttgtatatgttctttctctggtatacatttgatatcttggaaatgagagaaaatcgtctcccgtgggagcaaaatgacattgataaacttggcagagatttgactgccatttctgcaatttgaaagactttttcttcctgacacagaaaatgaggtagctacaaatgaaaaaaaaaaaaaaaacttaaaaggatatttcttcaaagtgaaataatgttttattttaaaaattagaagaaccctaagaaacatagggtcatcaaaattactaagaagaaaagagaattttctttttttactctcttttttaaaacagtaaacaaatgtgagttgtctctaaaggtataattaactgagatggaaaaagtaacactgaaccaaactaaaagtaggtcagctcatttgaggttcttggctgcacaagctctgacagctggctgaatatttctatatatagagaagatacacgggttctagtgatttattggtctttcttttccttatgca

SEQ ID NO: 76619 - DNA, 1187 bp, Homo sapiens
tacatttagtaaatgaaagtgatatttgcatattgtttttacctttcatgacaagttacagacccatttgttcatatagggcagtttcaaaagggaggagggctgcttaacctgaatttgactttaaatgaaagaacaataaaagtttttattcttaaatcattactagttgagaaatttacctgataccacaaggtagcttattcttttctgattatagtagaaatactttcagatttttaagcaatatatagtacagaaatatgttgattggtaacaaatatatctaacacttgtcatttcacacattctatatttttctctttactttctatttcgtgcatgacattgtgctaagcaccaatgtaccatattagaaactgacctctcagaaattacacatttttgtaattacctaatataacattgccctggtgctgtggcattaggtattttacgcatatgattagctaagacatttgtcatgggaacctcatataatttcaaaagaaatgatttactaattccttcagtatgaatgttggagtggcaggatcataatcctcattttatagatagttctacccaagaacagagagattaaaatattgtctaacgatgatgattgaagaggatctaagtccccatttctgatcctcacacgctttctatttgtcaacttgtatatgttctttctctggtatacatttgatatcttggaaatgagagaaaatcgtctcccgtgggagcaaaatgacattgataaacttggcagagatttgactgccatttctgcaatttgaaagactttttcttcctgacacagaaaatgargtagctacaaatgaaaaaaaaaaaaaaaacttaaaaggatatttcttcaaagtgaaataatgttttattttaaaaattagaagaaccctaagaaacatagggtcatcaaaattactaagaagaaaagagaattttctttttttactctcttttttaaaacagtaaacaaatgtgagttgtctctaaaggtataattaactgagatggaaaaagtaacactgaaccaaactaaaagtaggtcagctcatttgaggttcttggctgcacaagctctgacagctggctgaatatttctatatatagagaagatacacgggttctagtgatttattggtctttcttttccttatgca

SEQ ID NO: 76620 - DNA, 641 bp, Homo sapiens
tgtgatggagacctgcgctctgagctcttggtaatgtctgcccagggcacagccttcagcggcaaagtggccaggttctccagggtttcaaagtgcaggagatatgtctggatggggggcctggctcctcctcctcggcagagggcagctgccttattccgacgaggtttcgagccttccctgctcccatcctctctgaaccccacctaagccccagctgtgcccatatggctggagggagcccctgacagctgtattctatgtcctggggaaaggcaggatctctcgccatgggggaaaatccctgtaaatcctgtgacaaacagctctaatctggtgtttaatgcagagcctgatgccggctgcagcgagggagggcacgctggcactggggaacacsaccgtgccaaggctggaggtgcatttggcccctgcaaggccatcgccctgctgaccctaagcaggcagccagcagggcacggccggaggctgcacggcttctccactgcacggcttgccggcctcggggtgcgtggggaatggtgagataagcacgtgaaaccacagctcggccttgatggtttgttagctggccttagtgttttcaattgtccgaaattgggacactctgtcccacaggc

SEQ ID NO: 76621 - DNA, 390 bp, Homo sapiens
taggaagtagttttcatatatatacattgtatagctatctcatttgtacattgtattactgaacaccctcccttccccccagctattgtatgagctaggaagtgcattttcctagatcccatcttatagataaggaaatggaggctcagagagattaagcaatttccacaaagtgaaatactaggactcaaatacagaagcatcttcaaaagccctgctctctcccaccccccacccccactcccatagctgaccaccttcactccatcctccagacacccccacrccacctctagaagaggcagtcagggcacctaaaatatggcccccatccaatcagccatcagcaaaaggcactgggaaactgtcagctgttattaacttttgaag

SEQ ID NO: 76622 - DNA, 654 bp, Homo sapiens
ctggggtttgagctgcctggtctcacgacgtggttatggcagcccgggaaaatcagttcacccagctctgcctgcatgcagagagccacgtgtgctttagagtaagggctgacaacgacgtggttcacgggctgtaccaggscccagcgaggtgtgtgtgtgacacgcagcttctcacaccaaagcggtagcattcccatttcacagatggggaaactgaggcctggggaggtcaagcaagtattccagggtcatgtagctggaatctgtggacacagcaggtgttctcaaacctggcttcacagtgcagtggcatgggaagccttaacaggcactgactcctgggctccagcccacactaagggaatcaaattctgggcagcagttttcagggcgccccaggcgattctcaggtatagccaggtgcatagctactgccttgtacctcattcgtctggctggccttaaaaaacaaataaagtacgttagcagtgccttccgtcccatgcggcagctcccgtctccatttcccctggcaaagtgggttcactgtgtccctcacactcatggtggggcagcttgtgtttctgagaccattagcacgggctctggagcccaaatggctgggtttgaatccagtctttgctactcatt

SEQ ID NO: 76623 - DNA, 660 bp, Homo sapiens
cctggagaacttcaccctaccctcacacttcctcmctgcgccgatgactcactgccatgtaacaaatgacaccacagccaatggctgcggcagcagcggttttaggagagctcctgaattcgtgagtcatcagcttgggcaggccccagagggtgacgcttccttcttcgggccctcaagggatgggcagtaaaaggttaagctgacccacagaaggtctgacctttgcccttggctcctggggtgtcacctctaggcccttggagagtcctccctggtgtatctttgtttagctggggctttggccaccctggacagtctatgctaatgatgagattcatggtggggccttggaccacgtggcatcagctcgacctgcagaggggctggaggttaaggtcagtcacatggtgtcagccgtgcccacgtgaccaagccccaacaaagactctggacaccgaggctgggggagcgtccctggttggtaatgctctgtgtgtgccatcacacgctgttgtcatgaggagttaatgctggccacgactccatggagagggacagctggaagccctgtgcaagaaaccctcctggacctgcaccatgtgtccctctccttgactgagttatttttattttattttttgagacagggtctcaatc

SEQ ID NO: 76624 - DNA, 660 bp, Homo sapiens
cctggagaacttcaccctaccctcacacttcctccctgcgccgatgactcactgccatgtaacaaatgacaccacagccaatggctgcggcascagcggttttaggagagctcctgaattcgtgagtcatcagcttgggcaggccccagagggtgacgcttccttcttcgggccctcaagggatgggcagtaaaaggttaagctgacccacagaaggtctgacctttgcccttggctcctggggtgtcacctctaggcccttggagagtcctccctggtgtatctttgtttagctggggctttggccaccctggacagtctatgctaatgatgagattcatggtggggccttggaccacgtggcatcagctcgacctgcagaggggctggaggttaaggtcagtcacatggtgtcagccgtgcccacgtgaccaagccccaacaaagactctggacaccgaggctgggggagcgtccctggttggtaatgctctgtgtgtgccatcacacgctgttgtcatgaggagttaatgctggccacgactccatggagagggacagctggaagccctgtgcaagaaaccctcctggacctgcaccatgtgtccctctccttgactgagttatttttattttattttttgagacagggtctcaatc

SEQ ID NO: 76625 - DNA, 660 bp, Homo sapiens
cctggagaacttcaccctaccctcacacttcctccctgcgccgatgactcactgccatgtaacaaatgacaccacagccaatggctgcggcagcagcggttttaggagagctcctgaattcgtgagtcatcagcttgggcaggccccagagggtgacrcttccttcttcgggccctcaagggatgggcagtaaaaggttaagctgacccacagaaggtctgacctttgcccttggctcctggggtgtcacctctaggcccttggagagtcctccctggtgtatctttgtttagctggggctttggccaccctggacagtctatgctaatgatgagattcatggtggggccttggaccacgtggcatcagctcgacctgcagaggggctggaggttaaggtcagtcacatggtgtcagccgtgcccacgtgaccaagccccaacaaagactctggacaccgaggctgggggagcgtccctggttggtaatgctctgtgtgtgccatcacacgctgttgtcatgaggagttaatgctggccacgactccatggagagggacagctggaagccctgtgcaagaaaccctcctggacctgcaccatgtgtccctctccttgactgagttatttttattttattttttgagacagggtctcaatc

SEQ ID NO: 76626 - DNA, 660 bp, Homo sapiens
cctggagaacttcaccctaccctcacacttcctccctgcgccgatgactcactgccatgtaacaaatgacaccacagccaatggctgcggcagcagcggttttaggagagctcctgaattcgtgagtcatcagcttgggcaggccccagagggtgacgcttccttcttcgggccctcaagggatgggcagtaaaaggttaagctgacccacagaaggtctgacctttgcccttggctcctggggtgtcacctctaggcccttggagagtcctccctggtgtatctttgtttagctggggctttggccaccctggacagtctatgctaatgatgagattcatggtggggccttggaccacgtggcrtcagctcgacctgcagaggggctggaggttaaggtcagtcacatggtgtcagccgtgcccacgtgaccaagccccaacaaagactctggacaccgaggctgggggagcgtccctggttggtaatgctctgtgtgtgccatcacacgctgttgtcatgaggagttaatgctggccacgactccatggagagggacagctggaagccctgtgcaagaaaccctcctggacctgcaccatgtgtccctctccttgactgagttatttttattttattttttgagacagggtctcaatc

SEQ ID NO: 76627 - DNA, 1024 bp, Homo sapiens
catgtaatcccagcacttttggaggccaaggcgggtggatgatgaggtcaggagttcgagaccagcctggccaacacggtgaaaccccgtctctactaaaaatacagaaattagctgagcatggtggcaggggcctgtaatcccagctacttgggaggctgaggcaggagtatcactggaacctgggaggcagaggttgcagtgaactgagatcatgccattgcactccaacctgggcgacaagagcaagactctgtctcaaaaacaaaaacaaacaaacaaaaagtcttattataaggtacaaactgaaaggcacagattaaactttgagggtttaatgtatataactattattattttaagtcttgaagacaaacctagcctatgcgtaatttttttttccagaatgggatctaaaccaatagctctatgttataatagtcaacaaaatattcatgaatgatagaaattcagtttcatgtatcaatttatacttagatgggagagaagttacatcacaaagttaactaagtaacagtagacctgttttttgtagtctctatcttacaatgccaagtttctatttttctattagctggaatgtttatgttttcgattaagccaattaattgtttttgtctgttttacaagtaggacttgtcttagtccattgtgtgttgagatagcagaatactaagatggggtaatttatgaagaaaactatttcttacatttctggggactgagaagtctaaggttgaggagctacatctggtgaagtcatcgtgctggtgaggtcatcataacatggcagaaagcaccatatggctcatatttctcctccctttcttataaggccactaatctcatcacrggggccctactcttatgacatcatctatcactacatcccaaaggccctacctccaaatagcaacaacacataaatttgggaattaaatttctgacacatggaatttggggacacattcaaaccacagccaggcttgagtacttggatgca

SEQ ID NO: 76628 - DNA, 698 bp, Homo sapiens
ctccatggcccctctttgcttcatctgcaagctctggcgggaagtagtggttccacccaagagcagagctggtgaaattgtggcttgatggcagcccgcttcccgtggctccctgtccactgtggatgctgctgcagcctggcacgtgcttcgggacgcagagtccagggagcaggctgccactgtcaccgtggctctggtcatcattgccagtgtgtgccacctgccacggccgcagactctgtccacacattagtagctctgggaacatgggaggtcaaatgtcaattaagagcaacaygcatacttcacactcgttcgcaacagatgtttgcaaagcccttttcaagttgatcctcataaccaaccttagaaatgatctgggcagttcacaggggaagagaatgagttcctgagagaacaatttgcctaaagtcgctcagatagtcagtgactgactcacgcctacctgcctcccttcatgactccagtgcacacctcacttaaagtctttaaaggtggagagactaaaccagaggctgagcaagctgggaatcaggagctcctgttcttgttcctgtgttcaccagatccctccgtggggcaggtgctggtgggcaccattatcatccccatcctgggcaggttgtccaggtgggcaccattatcatccccattttgcagatgaggaaacagag

SEQ ID NO: 76629 - DNA, 827 bp, Homo sapiens
atttcaaacaatgctttcagagagaagatgaagaaacaaatgagggcctgttgaagcctaatggggtaaggggaatttgagattgtggaagaatggcagccagatcatgaggtcaagagatcgagatcatcctggctgacatggtgaaaccccgtctctactaaaaatatttttaaaattagccgagtgtggtggcacgtgcctgtaatcccagctactggggaggctgaggcaggagaattgcttcaacccaggaggyggaggtttcagtgagccgagatcgtgccactgtacttcagcctggcgacagagactccatctcaaaaaaaaagaaaaggaaaaagaagaaaagaatggcagcccagtggagtgggcaccctgagacacagcacgctcacaaggggaatgcaattctgagccttctttcccctctcagagcttctcttgttatttctccccacttcctcttctttcatcatacaggcaagtaaaactcccatctgaattgacaagtatttctgaaaatacttattccacatacatgagcctacctgttttagtgaaacagtactttaattgtcgaagttcaccactgtactgacaccttaagctgcttccaaatccccagtgcctccttcagacttccccactcaccagcaccacctgctcttcagatccctgtccttatcagcaccctccatcctggcacacaattatgcatgctcttttactggtctttaactgtttcacctgggttagtcttgtttttgaggctaattgcatgttcctaaagacggccaccatccgatgtcaccctatgtgctccc

SEQ ID NO: 76630 - DNA, 737 bp, Homo sapiens
agctggatggctctagagacacattcctggcccctgtgaacgctctttggaggggtggattcggggcagtctgggtaccaacaacacggcctcctgtgttgtaggacccgggggttgcagactctcytgggtgtgggagccagggtctgtgctgtttccctttcatctcctccacttcccagatttcttagttccaccacagccttagcctcagcactccagacccctcagtcctctcagctgttctagtaaatatggcaagaagcattcctgatgcctcctctcttttctttgacaaacaacatggaaggcattttgagactaaagtctaagtaatgacctaatgcggggctccccaagatggtttgctgaggtgtttaaattttaatgaaattaaaattccgtgagtttttgctgaggacttactgggtgctaggcacactctaagcaatttacttgtaagaatgtagataatccttacaacaccactatgaggtaagtactattatctccatgttattgatgaaactgagagagaggttaagcaatttgcgcagtgttaatcagctggtaagtggtagagctgagatttaaccaggtagtctggttccgaaatttgcattctttacctcagcattattgtgctacttaccacttttgatttcatctgtgtattatttcaggcacattagcatctcaagaacttttctacagtgttctgaaaacctgctcctcaa

SEQ ID NO: 76631 - DNA, 740 bp, Homo sapiens
tgcattatgaggggcttaaaacagaacatgccaaaaccaggattcaaactgaggctccacatggagaaaagatttccttgacaacggcagcagggattggtgcagatggtaatcagtctgacactaaaataatggatacacaaaatgtaccttaaggaaattgtgtaaagcttcttgtacagttgaagatggtatttttccaaacagagtagcagccatttttttctcaatccagctcagttttgagacctgcaaatacacaacaacatcactcttagaaagttgttcaccttttgaatggattatctctccccagttagacgtgtgtgtgttatgtgtatatacgtgtgtgtgtgtatagatataacatatacaaatgaaaacatatatccataaataatatatattagagataccaccctcatggtattcatgttaatattttaccttcctttttcacaattctaaagaaccatggggtccagaagcactggtttcaaaaccaacctgaaatactctggataagaagatttgtgtcaaatcagaggaaaaaggggtggggtgrgaaataatgctgatcccgtttgttcatctgattctggattctgaggtaactacggtgtatctcttcgtacagcacacaggggctacaagactccgcctttgctctcctcctgcctactccatgctgccaactggcctcctgacccagaggtagcatctcagatatgtaaatagaa

SEQ ID NO: 76632 - DNA, 978 bp, Homo sapiens
tgcattacagtgagattcaacaggaaactgctgtttataaacaagttatgctttcatataaaactaaactcacaaatacatagacattttcaatgagagatttactgtctccttttaaccttcaaaaatgtgtgtgtgtgtgtgtgtgtgtgtgtgtgtgtgttttaaagcaccattctttctgtgttatttctttttgtgggcctaggcaataataatcctcattaataacaaaatactttctaacagctaatgggatgttcaaatattcattcaatcctatgccctagaaaatgtttccactctagaaaaaaagcaaaaagcaagtttgaagactcttaaatgtttaatgtcttataaatgacacacaagtttaatgacctcaattatgttatcttaaatatttcagtgttaccttaagtcaaaaaggcaagagggcataactcttctgaattaaatttaaaagttgaactagtacaaaaaatattattggagaagctgatttaaatatcttatttcaaaggaagataaaaaggtatcactgatgtataatggaacatttacttactctcatattcaacttcaggttcccctaatcccggaagcctggtggctacattaacgtcattcagtgcttgggatgtttccatagtgtcagatgccccaattacatcaccaatcgttgcttccaataagtctgggctattcagcaaatcaatattcagaggaatgctgcaatggaaatagaaaatttacttagaccaaraaatttaacttgaaaaattaaaacactactcaccctctgtatctgcaatttccaccacatctgtgaattcaagcaaccatgaatcaaaaataaaacaaaaataaaaattaaaaaaacatttaaaaatacagtttaacaactatttacatagcatttatattgtattaggttttctatgtaatctacagatgatttaaagtatatgggaagat

SEQ ID NO: 76633 - DNA, 602 bp, Homo sapiens
ttctggccaactccaactgctggtggctgtatcagtcccatctctgtctgtgccttctctgtgtgtctgtgtcacattattaaatctcccttggcctcttttataaagacacccattattggtttggggccaaccttaacccaggatgatctcatcttgagctccttgactcaattatgtctgcacagacccttttcccaaataaggtcccattcacasgtgctggggttaggacatggatgtagcttctgtgggggccacagttcaacccactctgctgtccctcctgggaagcgactgtgggacctgaacccgccctaagtatcagagggtgacggggaagaggaaggtgggtcattgggttgatttgtaaacaagggaggaaggtgagccgggatctgccacctgcccttacagaatgacccatgagatgcagaactgctgttagatcctagtcagctattcagaggctcagcaatcaggtgataatcatgacatcgaataaaggcacctccagaaaattgatcaggttatggatttctttctctcttccaaaatgaaaatcaccttattggttccattataaaatcagaccatgatat

SEQ ID NO: 76634 - DNA, 1188 bp, Homo sapiens
ccatctctacaaaaaataacaaaaattagccgagtgtggaggcatgtacctgtggtcccagctacttgggaggctgagttaagattatccttgagcccaggaggtcaaggacacagtgaactgagattgcaccactgctttgcagcctgggtgacaaagggagacactgtcttaaaaaaaaaaaaagtgatgccaataagatattgtccagttttccttaagtgctcaagtgtctatatacttgactctgtagggtataatacattatgatacaaggttgcttctttggaaaggtaataaagttgactccaatagttctaagctaagggggttttgttttgttatttttcctaatgaaacaagtattttagatggcatttggaaatttccttttttaatacgttcaacaagtcatttgcatgcagttttaaactactcctttcagtaatgttttatgatttaaagacttgataacttttaaaaatggtgtgtttaaaaactaaaagacagcaaaacctcctaacgcaatggctttagatccttttaaatattccagaaccagtccataaagaccactttctcttttttcttttstttgtttctttaataaggcagtggatggattgacagatgtggaagaaactaagggggaaaaattcaaggcttaccatcatttttactgtggaatttgtttctgaaaattacattgtgaagcaggtttaggaagcagtgtactatagcaggaaaaaagatagatttgacggatccatgggatttaggtttctataagagctgtgtcattgcccacttgcatgattgtgggctggctatttaacatccctgagcttcaatttcctcatccaaaatgaaggaatagtgacatctgctttatagagctagtggcagagaagtacttggtacatagaagtccttactagttgtgaattcctttatttctccccaaaaatatactcttctttttccttttaaaaaaatactttaaattttaaattttcttagcgacagggtcttgctctatcgcccatgctggagtgcagtggcgctatcatagctcactgcagcctcaaactcctgggcttaagcagtcctcccttcccagcctcccgagtagctgggtctacaggcgtgcaccacatgatcagctaattttttaattttttttttttg

SEQ ID NO: 76635 - DNA, 665 bp, Homo sapiens
catgacctacagttgacagtgcctaaatctaccccccagccaacacctctcttctgagccctagtcccaaattctccactccccaaatcaggcaggacatctccctgattttccacagccatcttcatggctccagagagaaagtctggttcatccagctgtggttgtatagcccatgatcccaccctggtcccatctgcacaggccagtgaagggttgggggaagaggtacagagcacagccgaggtaggggggccacagggagaccaacacatcagtggagaccacaggaagaggagaagcaaaaggatgtagaggaacagtcagagacaggaggagagccagagagaaggtgtcaaagcaaccaagagaggacagagttgcaagacgggagtgagtgaaaacaggggattygccttggcaattaccaaatttcatccattcgaagaccccctttcacacttgaacacgatgtctcgatgtctcacaccacagatggcacttcattgttaaacagagttaggaaccgcaggaatgacctcccttcctttaggggcagaaggaagaggaggagctaagttgtgggaggagctgagaagggtgaaatggggtgaaaaacaccgttggggtgtttttcttccttctctcttagtggtacataaagt

SEQ ID NO: 76636 - DNA, 667 bp, Homo sapiens
acaaagagataatgtcacttgtgggatgttttaatcactaagcacaaagtagatatgcccgactgtaaccaggactatcttaggcaagttctgggaatgtatgtttttactgatagattccctgtttttgaaggtccattcccttgaattgagccagatgagtagtaggtacctacctagatatcaattgctcaattgatatttccccatcctagctcctagctcacattgacactattgactttcattttattggcttccatgtcagtgtttgaccacttttcctttcttaaaagctcctcttccctagtcctggattcctgacagctataatattagatgccttctattcttaccttgaagctttctcttcttcagagaaagataccaaaatatcaaggaggataataatacttttctcaattttgattttcagttggttttttttctttttttawattaaagaacctgaatatgaaaatgtaaaatatacattgtctttatctaggggcccataagttaggagtttttagtgtccttactgttttcttcacattttcctcactttatctcatcttctcagatacttcagggcatttgtaaagggactgaactatttcttcacaaggaaggagtatatatgaggaggagatgggcagattgccaa

SEQ ID NO: 76637 - DNA, 625 bp, Homo sapiens
ccccttcctattccttgaaagctggctattccattcagatgggacactcatcccctaaggaaagctgcataaaaggaatttaattacccttttgggaaacataatacatataactagtaatacataaagctaataagaaagtgaaataataaaaaggaaatacaatagaagaagtccacctccctctgggccctcatttcctttctcataggtaaccactattaccagtttctagactacccttccaaagataatttctgcatatacragcttatgcatgtgggcatatgtgtattttttaaacctaagtgtcagcatgctgtatactaacttcatacattgctctttacaaaaaaaaaaaaaaaaaagaatttctgagcagttccatttttggaatcccatagaccatgctctgtgataagaggagcagtgtcttgcattgtatgtcttcttcttcctctctttccaacacagacatcgatgccagaccatgggacttccaagcagaagaatgtaccttgagggccaacattgaggcttttaacagccgtcgctatgacagaccccaggactctgagttttcacctgtggataactgcttgcagagcgtactggggcagaggtt

SEQ ID NO: 76638 - DNA, 1327 bp, Homo sapiens
agtcacgggtcaagcttcaggggagaaagtagaaacgggtgggaaatggaactggagtgatacacgaggtccagataatgaggatacctgtgggtgtcccaaggtgtataaattttatcctgcagatcatagtagccattggagctcagatgtggccactcactgtggccctgccttagggaaattttacattttttcctctaggggagcttagagagtccagatgaggctcaagtgtctgagggaggaaaccatctctgcataaatcacattctaccaggcaggctcccatatcagggtttttcatgctctgtttcttctacctagaatgctcttcccccagagacctaatttggcaactctctccccactcccccctctattattaatttccccgaccctgctgtcctctttctttttttctttccatagcacttaacatctacagtagaatatgctcacttcttatgtctattactcattgtgtctgctggaatgtgactccaggggagcaaagacctttatatattttgttccccagckgtttcccctacacctacaactgtgcctggcacaggtagaggctcaatgactatctgtggaacaaatgaatgaaggaagaaaccgtctttgtaattccagtgcccagcacagagctgtaagacgtatgcatgtgtgcaagaaatgctaccatcattagggcaccaacaaatgagtgccctcgggcttccctgcaaaccccaaggcctagttgggccccccagagtggcgcgggttccccttactccctgccgcccagcggggcacttggcacggcctggggcgaacgtgccactcggagaataaagcgcttcctccgcagggcggccctgccaggctgccggggtcttgcgtcccggaaacgcctccccccagccagccaggggaagcctgggcggagctttctaggaagcagccctagcctgcctggccttctcccgcctggaggagagagagcttgaggtcacaaggccctactggctgctgggcacgagcccagggagcgggtcacctcattgctgagtgacaggtctctcctggaccccaaagtccctctaaacagggccccaagcactgaaaatatcccagtgtcccagtacctattcataattttataattacattatatttatttatataaaaagaaagagacacaaacagatatgtaagagtaggattggggcaagaatacaaggacacttagctctatctgaaatgtttatttattgcaaaataaagtgattagaagcaaatgggagaaagaaggcttgttttaggtggtgaaaat

SEQ ID NO: 76639 - DNA, 2147 bp, Homo sapiens
aaactcagagccactggttgttataaacttcagttcccgaataactctagaagctgtaaaatcaggagtaaacctaaaacagaatgatggtagtaaggctaagttttaaaaatatctcacaagcagtctgcatataatactggtcctataagcctttgaaatataacacagaatttgcgtttgatacttttactcaacttccgtattttaagatgaaaaaagtattgtcccatggtcagtaataggaacaactgtattctgtgaataattagagaaattacactaaaaaataacaataatcaaattctcataattattaattcagaaaatggtcctgagcttcatgtccttctctccttctttcttctttatctaaatccatgctcttttcccaggctacaatcccaataatgtcttttttaaaaaaacaaaccaactggctggggcctagtgatttttccatcatctcctgcagtatggattactgttgcaattattctatttttattttttgctaattgtatgtaccttgaggaaaggtgtcttattcctcattgcatctttaggtgtcaaacattatgccttatatgcaataatgtagctacttattaagtaaatattcattaaagatcactaaattaaatattcaattaagggacagaagttgcattttattgcataaactttataacagaacaagttatcaattaattgttaaaatatgctgcagctattactgagataggtattaaaactgtcttctgaccaaaatattayatatccgtatactgcaaaacgtgaaaaaactgtacatgtatgaaacaaatctctgttgctgagggactgtgaatttacatcaacatcttttgctttaacgtaaccctgaaaataattttgaaattgatttctaagattatctgatccacttcggagataaagttttataacttttgaaaactgagatatgaagaaatgccttaaccaaagattaagtgaaaaaaaatttacaactttgaaaactaagatatgaagaaataccttagccaaagattaagtgaaaaaaaaacaaatgaatgcatttgtggataaagacctttggtaaatatgaaaacatatctttgcacagagtttgaggaaagttagtgattcattacaccttaaaataaaatacttacaatatgattatatctctagaagcattggcacttagagtaaactcttgacaattaacaactttaaagccatatccttcacatgagtatccactgatttcaatggtttctatgtgaatttgaagttgtcctgtattctctaccttaaatgttcttttcaatgtgaaatttggttctcttagttttaaacctaaaggataaaaaatcaggaataagactaaatcttgccatcatgtgctcccagtccaaatgataaatacattattcatgaattactatatgtcacaggttataaaccatccctgcatgtcagagagatcagctgttcctcagatttcatcatgaggtaatctactttgataaatcattttagatggcaaaagttgactatacttcacatttcatactgagagtaaatcagctaaggtatgcaatgagtgcaaacactttaaatcttttaagatccaaatcaaacaactctaaacacaacatggaatttccttaagctcttaagcattcataactaatatacacaggtgcacatacagaaataatgttgtttttgaaattatttactgttgaaagcaaatgctgaaattagtgtccttgaaactgttaggaagacttactatctgtacaatcttttaacaatgcttccgtgattttaaagcgtaaggagcttcctggacctggaagcttgcctgccaccctcaagttctcagttgttccttgtccttggaccatcacagcatccatcacagtcaggttatttctatgcaagaatgagaattacagatttttctctcattaaatctgcacaatcttttgatttgcaatttctactgttattttacagagcaccacatagaaattaaatttaatggtgagaatttatactttaagaattcaaaaatacacagagaagagcaagtttttatttttaagagacacacattaagacaccattcatgtttt

SEQ ID NO: 76640 - DNA, 765 bp, Homo sapiens
tccctgcctgctcttttccgcccgtttataaaggtgaaatctgcctcaacagaacatcaaagggcagtctcttgaaggtgcgataagcacctgagaagagcatggagagagagaatgatcctcgtgccttgtgtgtgggatcacagggtacggatctgattatatgataatgatcaaagacactgctagagcagctccctttccattggtgggttagtcctgggctgtcagcaagtgttcgttcacagggtctgaaatgaaggccctaaggatggttctgtggacctcaggctctcttggcattttaactctttttaacttcctccgtttttcttcttcaagaactccttctcaattgcttttggatctctagctggggctgggaatgatttgttcatgtaatatktttacttatcaataagtttgctgttattagcgacatttaaaatacaaatttcttcattcactgaaaggtgagtgtgtgtatttttaataataaaacaaagtagagtttgaactgtaagacaaactgggaaaagttccatttggttatactatactatattaccatgctaatactttttccaaagagaggaaatcagtacagaagtatatgtgacaatccagtggcatcactttatgcaataaaaggatgtttaactagagatgtgagcttgagtcagctgcccatctactctggggctcatttttcccacctgtaaaaaaaatcctggctgggcatggtgactcatgcctgtagtccta

SEQ ID NO: 76641 - DNA, 314 bp, Homo sapiens
gatctcctgaccttgtgatccgcctgtctcagcctcccaaagtgctgggattacaggcgtgagccaccgtgcccggccctcggcggagtattccttttaaaagctacaaaaataaaacagttccaagaaaatattaggaaaattttaaaagagaaattattgtagacaaaagaaggaaataatttaaagcaaatttagggcccggcctggtggctcacrcctgtagtcctagcactttggggggccgaggtgggcagattgcctgagctcaggagttcgagaccagcctgggcaacatggtgaaaccccgtctc

SEQ ID NO: 76642 - DNA, 1068 bp, Homo sapiens
actatactgttattgtgcggytttcccatttgctaagatgcagatctgtaaattatagaccatctttaaaagcctgcagctggccaggcatggtggctcacacctgtaatcccagcactttgggaagccgaggtgagtggatcacctgaggtcagaagtttgagaccaacctgggcaacatggtgaaaccccatctctactaaaaatacaaaaattagctaggtgtggtgacacatgccagtagcctcagctactcgggactccggaggctcaggaaggagaatcgcccgggaggtggaggttgcagtgagccgagatcacgccactgcactccagcctggatgacagagcaagacggagcccaattaattgctatatactaatgagggccttgcctttcttctgctccatgctcatctttcattcttgttgtctactccactctccaaatagtattggccttgtaatttgtatgaaataaaatctcttgtattgagaatcagacctatctttttttttttttttttttttttgagacagagtctcgctctgtcacccaggctggaatgcagtggcccaatcttggctcactgcaagctctgccttccaggttcacgccattctcctgcctcagcctccggagtagctgggactgcaggcacccgccaccacgcctggctaattttttgtatttgtagtagagacacagtttcaccgtgttagccaggatggtctcgatctcctgacctcgcgatccgcctgcctcagcctcccaaagtgctgggattacaggcgacaatcagacctattttaaagattagattgaaggcaaggttggccaaaatgagatatttattagataatacttatgtttccaaataactgctagtaattaagaatatgctagaaacattacattcactcagtaatattgagagcatactacatggctgtccgtcttctgggaactggggatatggtagtacatataataggccttttacgaatttacataagtaattatgttagatggtaataagtgctatggagaaacataatgcagggtat

SEQ ID NO: 76643 - DNA, 1305 bp, Homo sapiens
tgcatcaccacacctagctaatgtttgtatttttagtaaagacagggtttcaatatggctaggctggtttcgaactcctgacctcargtgatccactcgccttggcctcccaaagtgctgggattacaggaatgagccactgcacctagactgggctattttattttaattggcaagttatgggggattgtctgtcatctttataagcagtctgtagtatgttgactctggtgttatggatctatttaacatagagtcaaaagcctcatattggtaaacagcagtcccactgacactgcacatatgtgaaaacggcatttgattgcagggaggatggaggcatggatgctgggacaacctcaggctttagtgtcagactgatcttattagaatctctccctgccacttactagcctttgggctcagtcattgacataggtattatgggaccctatccacggtctcctgtgaatacttgctatctgttccttgctgttggttctcgtgattgttaaggtttgtggctactcacatttcatgcttctcttagcaaagctacgtgttcatggcccggaaacctggctttgcttaaaaagaccgtttgatctcttcgtttgtttttggcaagtgaccagttgaagtagttttttttttttcagaagcatgggggaggaaggaaggaataattgcccactatctgtcatagcggtttatcatcaaataaattatattgcattcctcttttaaccaattaacccaactggtgataaagtagtacggtaagtcctcacttaacactgttgatatgttcttagaaactgtgtctttaagcaaaatgacacgctgtatgcccgtggaacttgaagaaaggaacttgactttctatttttaagaggtcttcctttagtgtccaggctggagcgcagtggcatgatcacggctcactgcagcctcagcctcccaggctcaaatgatcctcccacttcagcctcctgagtagctgggaccacaggcatatgccaccatacccagataatttttgtattttttgtacagatgtggtttcactgtgttgcccaggctggtctcgaactcctgggctcaagctgtcttcctcccttagcctcccgtagtgctagtattagagacctgagccactgcctgtccctgactcttgtttctatcaattagcctgtggcaaaattagttttgttacatagtatgttgttttgcttaaagttgcagttttcaagaatctattgctgaagttaagtgagggcttaaaaactgtattatattctgtgg

SEQ ID NO: 76644 - DNA, 1305 bp, Homo sapiens
tgcatcaccacacctagctaatgtttgtatttttagtaaagacagggtttcaatatggctaggctggtttcgaactcctgacctcaggtgatccactcgccttggcctcccaaagtgctgggattacaggaatgagccactgcacctagactgggctattttattttaattggcaagttatgggggattgtctgtcatctttataagcagtctgtagtatgttgactctggtgttatggatctatttaacatagagtcaaaagcctcatattggtaaacagcagtcccactgacactgcacatatgtgaaaacggcatttgattgcagggaggatggaggcatggatgctgggacaacctcaggctttagtgtcagactgatcttattagaatctctccctgccacttactagcctttgggctcagtcattgacataggtattatgggaccctatccacggtctcctrtgaatacttgctatctgttccttgctgttggttctcgtgattgttaaggtttgtggctactcacatttcatgcttctcttagcaaagctacgtgttcatggcccggaaacctggctttgcttaaaaagaccgtttgatctcttcgtttgtttttggcaagtgaccagttgaagtagttttttttttttcagaagcatgggggaggaaggaaggaataattgcccactatctgtcatagcggtttatcatcaaataaattatattgcattcctcttttaaccaattaacccaactggtgataaagtagtacggtaagtcctcacttaacactgttgatatgttcttagaaactgtgtctttaagcaaaatgacacgctgtatgcccgtggaacttgaagaaaggaacttgactttctatttttaagaggtcttcctttagtgtccaggctggagcgcagtggcatgatcacggctcactgcagcctcagcctcccaggctcaaatgatcctcccacttcagcctcctgagtagctgggaccacaggcatatgccaccatacccagataatttttgtattttttgtacagatgtggtttcactgtgttgcccaggctggtctcgaactcctgggctcaagctgtcttcctcccttagcctcccgtagtgctagtattagagacctgagccactgcctgtccctgactcttgtttctatcaattagcctgtggcaaaattagttttgttacatagtatgttgttttgcttaaagttgcagttttcaagaatctattgctgaagttaagtgagggcttaaaaactgtattatattctgtgg

SEQ ID NO: 76645 - DNA, 1305 bp, Homo sapiens
tgcatcaccacacctagctaatgtttgtatttttagtaaagacagggtttcaatatggctaggctggtttcgaactcctgacctcaggtgatccactcgccttggcctcccaaagtgctgggattacaggaatgagccactgcacctagactgggctattttattttaattggcaagttatgggggattgtctgtcatctttataagcagtctgtagtatgttgactctggtgttatggatctatttaacatagagtcaaaagcctcatattggtaaacagcagtcccactgacactgcacatatgtgaaaacggcatttgattgcagggaggatggaggcatggatgctgggacaacctcaggctttagtgtcagactgatcttattagaatctctccctgccacttactagcctttgggctcagtcattgacataggtattatgggaccctatccacggtctcctgtgaatacttgctatctgttccttgctgttggttctcgtgattgttaaggtttgtggctactcacatttcatgcttctcttagcaaagctacgtgttcatggcccggaaacctggctttgcttaaaaagaccgtttgatctcttcgtttgtttttggcaagtgaccagttgaagtagttttttttttttcagaagcatgggggaggaaggaaggaataattgcccactatctgtcatagcggtttatcatcaaataaattatattgcattcctcttttaaccaattaacccaactggtgataaagtagtacggtaagtcctcacttaacactgttgatatgttcttagaaactgtgtctttaagcaaaatgacacgctgtatgcccgtggaacttgaagaaaggaacttgactttctatttttaagaggtcttcctttagtgtccaggctggagcgcagtggcatgatcacggctcactgcagcctcagcctcccaggctcaaatgatcctcccacttcagcctcctgagtagctgggaccacaggcatatgccaccatacccagataatttttgtattttttgtacagatgtggtttcactgtgttgcccaggctggtctcgaactcctgggctcaagctgtcttcctcccttrgcctcccgtagtgctagtattagagacctgagccactgcctgtccctgactcttgtttctatcaattagcctgtggcaaaattagttttgttacatagtatgttgttttgcttaaagttgcagttttcaagaatctattgctgaagttaagtgagggcttaaaaactgtattatattctgtgg

SEQ ID NO: 76646 - DNA, 1305 bp, Homo sapiens
tgcatcaccacacctagctaatgtttgtatttttagtaaagacagggtttcaatatggctaggctggtttcgaactcctgacctcaggtgatccactcgccttggcctcccaaagtgctgggattacaggaatgagccactgcacctagactgggctattttattttaattggcaagttatgggggattgtctgtcatctttataagcagtctgtagtatgttgactctggtgttatggatctatttaacatagagtcaaaagcctcatattggtaaacagcagtcccactgacactgcacatatgtgaaaacggcatttgattgcagggaggatggaggcatggatgctgggacaacctcaggctttagtgtcagactgatcttattagaatctctccctgccacttactagcctttgggctcagtcattgacataggtattatgggaccctatccacggtctcctgtgaatacttgctatctgttccttgctgttggttctcgtgattgttaaggtttgtggctactcacatttcatgcttctcttagcaaagctacgtgttcatggcccggaaacctggctttgcttaaaaagaccgtttgatctcttcgtttgtttttggcaagtgaccagttgaagtagttttttttttttcagaagcatgggggaggaaggaaggaataattgcccactatctgtcatagcggtttatcatcaaataaattatattgcattcctcttttaaccaattaacccaactggtgataaagtagtacggtaagtcctcacttaacactgttgatatgttcttagaaactgtgtctttaagcaaaatgacacgctgtatgcccgtggaacttgaagaaaggaacttgactttctatttttaagaggtcttcctttagtgtccaggctggagcgcagtggcatgatcacggctcactgcagcctcagcctcccaggctcaaatgatcctcccacttcagcctcctgagtagctgggaccacaggcatatgccaccatacccagataatttttgtattttttgtacagatgtggtttcactgtgttgcccaggctggtctcgaactcctgggctcaagctgtcttcctcccttagcctcccrtagtgctagtattagagacctgagccactgcctgtccctgactcttgtttctatcaattagcctgtggcaaaattagttttgttacatagtatgttgttttgcttaaagttgcagttttcaagaatctattgctgaagttaagtgagggcttaaaaactgtattatattctgtgg

SEQ ID NO: 76647 - DNA, 926 bp, Homo sapiens
tgaaggtgagcccgcttctgtggcttcatctgccattgtatgatggaggcttctgaatctctagctagacctctttcctacactccagacccctggtgtctggatgtcccatgggtcctttactgacttaacagcttccctgaccttcattcccttcccccttctgtagcccagctgcagtgaatggrgagcctcagtccattcatggcccgaggccacgaccagggaatcctccctgactctccccctgcttcactccagccctctcaatatccagcccatccccagggcctttccattctacctcctaaatagctcttgaatctaccctcttctctccatcacgacccttgtggaagccaccactatctcctgcctggacaactggtctccccacctctactcttgcccctctcatcaatcccatctctctactataacccagttttaaaaacgaatgtttattttttaatttattgacttaatttttagaaaaaatttaggtttacaaacaattcgaaaagtacaaagttcccagagagactccccttacccaggcacacacatggtttccctgatatttacatctaatattattgtgatacatttgttacagttgaaccaatacattgcgattaactaaagttcatagtttccattaggggtccctctttgcattgtacattctatgggttttgatacctgtataatgacatgtgtctaccggtactgtgtcctacagagtagtttcactaacccccaaatcctctgtgctccatctaaccttccctcccttccttctcctgaacctcccacaaccactagtctttttacactcatcatagttttgcctttccagaatgtcatataattggaattatacagtatgtagcctttttagacaggcttttttcactaagcaatat

SEQ ID NO: 76648 - DNA, 926 bp, Homo sapiens
tgaaggtgagcccgcttctgtggcttcatctgccattgtatgatggaggcttctgaatctctagctagacctctttcctacactccagacccctggtgtctggatgtcccatgggtcctttactgacttaacagcttccctgaccttcattcccttcccccttctgtagcccagctgcagtgaatggagagcctcagtccattcatggcccgaggccacgaccagggaatcctccctgactctccccctgcttcactccagccctctcaatatccagcccatccccagggcctttccattctacctcctaaatagctcttgaatctaccctcttctctccatcacgacccttgtggaagccaccactatctcctgcctggacaactggtctccccacctctactcttgcccctctcatcaatcccatctctctactataacccagttttaaaaacgaatgtttattttttaatttattgacttaatttttagaaaaaatttaggtttacaaacaattcgaaaagtacaaagttcccagagagactccccttacccaggcacacacatggtttcccwgatatttacatctaatattattgtgatacatttgttacagttgaaccaatacattgcgattaactaaagttcatagtttccattaggggtccctctttgcattgtacattctatgggttttgatacctgtataatgacatgtgtctaccggtactgtgtcctacagagtagtttcactaacccccaaatcctctgtgctccatctaaccttccctcccttccttctcctgaacctcccacaaccactagtctttttacactcatcatagttttgcctttccagaatgtcatataattggaattatacagtatgtagcctttttagacaggcttttttcactaagcaatat

SEQ ID NO: 76649 - DNA, 1308 bp, Homo sapiens
gcatgtgcacatgtgcctgtgtgtgcacatgtgtgttgtgtgtgcatgtgtgttgtgtgcatgggggttgggggggttctgtgagtgtttccagagaaaggcaccaaagtttctggaaggttttcaaaaaggtttatgccctaaaaaataagaaaaaccacttctcccttcccggctgaacctggacctaactgtgtggtggttccaaccgaagagggcatggagcctcacccctggcagcttctgggatccttctagaagcctttcactgctttctcagcctgtcagaaaggagagaaggcttgtcttgagaggggccaaaagagtgactttagtcagcccaggaaacctggctcaaaggttcacaaagcaaggaggccttgagatggggctgactgtccccttccctctgctctgagactgaagtcctacaggacctggggacaatcagtctaatgaccagaccacctaatgatcaatttatctatctaaaggtccatttcccaaatactcrtgttgatcagtattacagcactcacatgcaataggacaatttcagcctcctattgaaaatttgtggcatccctttttctcatttgcttacctttgagtatttcaaggatttttttaagccaacttatttaaaaattctaattttaaaaatattttataatgaaggcaagctcaactggaaaaaagaacagcaaaaagagatgagtatattcaaaaaagataaatgagctgaattgtacatgcagtatgtaaatttggtaaatatttattagaaatgggaactgtgagcagacattgcctataagcagatgggttagaaaagcctggaaatgttcccaactagacaacatagcagtttcctcccctttgctaatttttccatcctaaggaaagtgatgcaaattagaggatcaggaatggctgacaaaggtgtccttaggcaaatgggatgcaaaccctgggaaaggccttgatgaggggaagccccaggaatggctgggtccaggggaattccccaaaggactttaacactggtaaactgtcttaagcaggaggacattttcatgctggagaagggcgagttggcagaggtggcattgtgactgccatgggcacctcagccttgcactttggttcacaggattcacactcccacatactcaagtcatgcccaggccttgggcttggggaggcccacttcctccagtccacggcttcccaggtttattcttatatctcatctcctgatgcttcagctcaatggaaactccatgaagatggggactgagtctgcct

SEQ ID NO: 76650 - DNA, 1412 bp, Homo sapiens
caaaaaagagaccgtgagaacagcgtccggtgcccggcggtcccctgtgagagcagaagcctgtgtcggagcagctggagcccagtgagacctcaggggctcaggagcccatggtgcatctgagggctgaagcagacttgatgtggtggctggggacagaaaccagccagcaaaacgcaggattgaggagtgacacatccccgccacgggctgggctgctttgctgaagcaaggggctctctttaggtttggacacttaaaaaactaaaacccacttgccaggcctcggagatgttttatgtccgtgtgctgaatggacagattctatactcctcccgaggcgctcactaaggtggaccctggcccacacagtttggagaggcctcgggacctctagaaggcagccgctgtggatgctgaagaatcagggagggaattggactggggtctccctggggtggggataaagtgacagaaatcttcctctgatcacaagaggcacattccaggagagagacgcctgaaggtattgtcagcagcccacagagcatctgygaggaggccagtgcatcaccaggagccgggcctcggaggccacagaggatcctgctcgtggcccacattcactccccttctgcacatgagagcccaatgccaagctctgcttggctcatttccaacaggggaaatgctttcacatgcctcgtgattccccacgggaatccccagaagtgggtctccacatccccatttttctggcaagaaaactgaggctggaaggggtttgtatgagtggttgtcccatgacacacgaggacagacaaggtgggccctgaggtgtcctgacttgaagcccaacaccctttgcctccttccagcctggcacatcgggggcaggcaggcaggcaggcggtcctaacgactgggaccccagagagcaggtctggctgctgcctgggtgcctgggagggcatggaagaaccagtctctgtgtgtgccagagataaagtcctctgctggtggtttccagatagggtgacaacggactttgtcaagggcaccagctatgctgagtaatgaaggcaaagccagtttcttctgctgacagctctcagcccaaaggaaaccacacaatgaccagggccggtgatgtggcagatcacagggccttcatggcgagtgctccaccccggctcattcatccatgtaagagtcctgcaccaacacctgtgctgacccaggcatccaagcaggcagcgcgctgagtgacagcccctgtgctaaggccgtgcgggcacctctgttaggcactgtggtgcgggggagcccaggagagggagggttctccctgcttagggaagtcaggaaaggcttctcaccaggagaggggctgaggcttcacctgatctgga

SEQ ID NO: 76651 - DNA, 729 bp, Homo sapiens
cagggcccctgtgctgccaagggaccactggaatatcttagaatggaaatttttggctgagtcctccaacaacccacaaccacatactgtcacctccagccccttatccaagcatttcgaccatcttcttcctgacttcagctgaaacattcctacctccaggaagccctccctggtgtctctccaggcctggctaggtgccacagccctaggtatcctgggctccatgacagttccctgggtctgccctgtcggaacactcagcatgcagtcctgccactgcctggtcatggatctatctcctctgaagcacaggcaccctgtgccaggctgggcaggtggcacttaatraatattacttaatattaactataatattatttaactgtgtgctattaacttactaggcacttgatggctgtgtgaccttgggcaagttgcttcacctctctgtgcctcagttcccttttgtataataaggatactaagagtatagatctcataaggctgctgtgaagcttcaataacttatgtaaagcattaaagcagagtctggcatatagtaagcacaatatagatacctgctatcattaaataacatgtgaactgtattcattaggctttcacagggtctagacttgcagcaaggatggaaaggggattctcccataatgctcagtgctctgttgatagcgtacactagcacagcacttagcatgtgccgggcac

SEQ ID NO: 76652 - DNA, 1837 bp, Homo sapiens
tagtactggaaaactataaggaatctaagcagtgctagagatatgtgactccttttctcgctcgtgggacatctgaagaacatctgctctgtctacttgttttttcctttaaaattctgtctttccattaccctatagagctccaaggctgtctcatggccttttactttatgttaactattcagtattttctgtgttttgtaattaacaaaacataggttttgagagaaaacctggttgacctagtgcatcatttggttccaggttacatggtaagttgccaagatttgagtcaagcgagtacttaaattagatgaggtctggaagatgatgaatcaatatcagtagaggttatggatgttgttctgttttcctctttgttgagtctcattacatgttgacgaagatggccactggcaactccgggctttcatatccatccagctagtaatccagaagaaataactcttttccccaacatccaaatcatttcctccaaaggactctgataggccaaggttagaccaattgctgtgtccagaatggggcactttggctaacctgggttatcagcctaccctgtggcaggtaaggtaacaacctcactagaattacatagagtgagagaggggcagttcctaaaaggaggcaatgtagggcagatgaaaaagtagcaatgactgttacacacgtatttacaaaccacctaccgaatgaaaaatgttgcctagaggtatgaatacttggctgaagaatctgattatggaatatttcacagttcagtttatatcaaagcaggatgctttttcctggattggctaattgaaaaagttggttaagaggtgaattgtaataacgatacatattccaagtgaagttattttctgagtgtcaaatctttctaggtatttgtaattcttcaaatgtttatagttggcttccaacacctaaactgatagtaaacttttaagcaacttacctttatctttctcaaacattcaacttggcttttagggtaacgttaactccctttcagctctatgttattagttttgtaatatttaattaatgacaagttaaatatttaattgatgacaaatttaatttgttattttgaagaataagtagaataaaaaggtttgtgaagaagcacagttaacttggcaagcatacaacttgacactggcgtcagatgcatctaagtcttgatccagtcctaggtctactaccacgtactggatgctcttcactgatctatatcaagtatttagattgttttggaatgtatttttgtttcacctttattcttgactttgttttatatgcttacttttgctttctctttttcttcataaatgttatcttgttgtattgttcatctttttaagccatcttgaatccttttggtaatagttgtcatataagtcttccataagttgttggaatttggacaactttttactttctaacctcagttttctcttcacttaatgggagtgataacacatactttggaaggttgttttgagtatttgagataatatttgtaaaatgtttagcttggaatctgccacatcatagactcaaaataaatagcagctattgttattattattattattatttgagacaaagtctcactccatcatccaggctgaagtgcagcagtgtgatctyggctcactgcaacctccatgtcctgggttcaaacgattcttgtgccttagtcttctgagtagctgggactacaggtgcacaccaccacgcctggctaatttttgtattttttttggcagggatggggttttgccatgttgcccaggcaggtctcgaactc

SEQ ID NO: 76653 - DNA, 1453 bp, Homo sapiens
gatcctggccccacagcctccccatgacttcactggcatccagggtttctcgaaagcgctatgagccaagtggtacccttcccctctgatgtggctgggttggagagggagtcctggatgcagctggaggtccccttctgctcacggctccctggaggctgtgtctgtgcatgcacaccatcactcctactccaggaaggactttcacggatgtcctcagctaccaaaagtcactccagggagtgataaattccgtccaacccaaagtgtgccacactctgctatggggcactcctttgtctctgcaccaactctgttggtttctattatcttctctccctctctccttttttttttttttgagacagagtcttgctctgttgcccaggatgaagtgcagtgacatgatctcaggtcactgcaactttcacctcctgggattcaagtgattctcgtgcctcagcctcccaagtagctgggattacaggtgtgcaccactatgcccaactagtttttgtatttttagtagagacggggtttcttcatgtttgccaggctggtcttgaactcctggcctcaagtgttctgcccgcctctacctcccaaggtactgggattacaggtgcgagccactgcacctggctggtttctattatcttcttagaaagcctgttggtcctttgtgcagactccttcattcccccagcctcgagctctgccttctattccaaatgtgtgaatttataagcattacacagcttatttttcatattggggaatgggtgtgaattagtatgaagtcaagctgcaagagtaccaataccaggtccatctcttactagttttgtgaccttaggtgacttagcctctctaattttcgttttgtcttatcagttaaatgggaataagcatagcacttaccttagaggactgatgtgggaatgaggcaacataatagctatattgcttttatcactgtacctgacagagtgaatgtgtaacaaacgttaacctttcttgtcagcaaatttaaaacctcacagcatattctgcactcattacgccagtctgttggagctgagtccatgcctttttctctctgcgttgggaaagccatgctagctacatgcatttttggtcatgaaccagtcttagatttaagtcaatgtaaatttggcctttgccgtgttcttaatgtcttctttacatacctaggaaaagtgaaggagaggtgagaaagacagagtggggaggaacccgtgtctgtgggtttgtrctagatgccaacctggctcttcacatcctctgtctcatccagtcaagcagccacactgagtcccccagcatgagaacagcttccacagagcaggagattctgggtctgaaatgaggagagagctccagtcccaccagtgccctagagcatacctcagaatgctcctttctcctggtg

SEQ ID NO: 76654 - DNA, 2599 bp, Homo sapiens
aaattgaagagaaagatgggtggaagcatgtagggatctctgaaatggacgtgcattcatttaggtttctgaatagaagagattcaggggacaaactatctttgagtgtcacacgggtaaactccctctctaccaccctgtgaaaaacccaccattcaatagtcctgggcctgaggaccgtgactcttgcttaagaaagcaacaaaagcatcaacacctccgtgaatattagagtatctcataggctggaaaaaaaaggtcataggaactagtgcttcagagactggaacagggggaataacactgtgctctttctccatttatcgatattctatttcgtgtgtgtgtgtttatgttggccttattttttccatactacagatagacaaggaattagcctacctccttgcaaggcttaggaaacccacattgtttgggaagtgccttctgatactgattgaacagaaatctgtcatcccgtgccttctcctgtggttcttagatttaagcaaagaacatcacagctctcgatccaggagagcaaataaaatatttgaggacacctcttgagtctttctgtggtttctcctcctcttcttcctccttcaccatcacaatgtcctcactcctctggcagagggcacaggtggtgtgatgtaagatgggctggctgtctatctcttgctcatgttcagtgcccttggaatagctgggaagctgatatttataagcactgtccaggattacattgcatttttcatcaccatcttcctatagattcttyctgcacatttagctatttacagaactcacattctttgcagcccttctcagaaaacctatgtactacgtatccaagtacattgttgcaagtctctcatggccatccttgaggccatttgtgcttagtcatgaccttgtcagagaaaatatttgcaatggtgaatttccctgggctccttctcttgtgcccctatgctgttgtgcatatgcataaatacatgtggggaaaggcttggacaaaatgcaaaccctcagactgtgcaccgagccctccaagagggaggcagaggatactggctaaaagctcctggggatacccttggttatgtttcatttctgcagccatctcctcccgagtggatgcccttgtatcatcacattcccctggagccatattggcataaggggaagaggaggaagaattgagacagggaaatttctgagcagcctttctatgtttttcctctccatattctgtgagaagctttccagttccttggacccttcttgaagttgaggactgccctgatataatgcaagattctccctgacacactttggtattaatgggaagatgctaatacatgaaatgaaaattaatttgcttcaacagtgcattctgagaaactgctaagagggagggaagatttggtatctaaagggagtgcataaatgaaagagacaaatttctgcctctatgtacctagaatttggttgacgagaagagagcaaatgggccaagacaaggagaagaagctatagcacaaagcctaagaaaataaatgttccatgagaaggcaaaaatgctatggacctcgcagaagataagatgttgccttcggttgggaagatgaggagagtcccgtaaaacagctggaagggatttaggatgttagtaagacataggcagcaatggaagtgtttgagatgtgtgcaaaggcatgagcaggaacatagagggaagaaatccaacgtgttggaggtggctagttgagaaaagaagttggttttgatagaatctgtcttagctaggtttataccagaaagcagagactgagacaagggtttgcatgcaagatgatgacaagtgaccctagggaacatgagaagggactggggaaattgaaacagggaagtgagagaagtcaattcaggatgtattcttgaacttagacctgccatgggtgattatgtctcaatactgctgggatcctctgaggaaccatgaagaatgaacgcatctcagaattgtccacctgtgggatggataagagaatttgctcctcacccactcctattccccattggtcaagggttcccatgaagcagctctctctcacatccaggtttatgcatgtgtgaattccaactagtttccagcaagtgtccttccctatgttatcttgggagccctgaagctggaagagagaaatgttcaatgttgctgagataatacactgccaggttacactgtctcaaagtgggtgcacggcaatgactggagtaaaaaggcctgcatacagcatgtaaggtgaggttcaggagtatcccaaaagagaaatgcgggcactgaagcaataagagataatgccagaagcatagttttgggacaaattatgcctggctgagaaattggaacttagcagtgggtacccattgcaagacccaatatgcctgcttgtcatgtgcaaagaaggacaagttctcttgagagaagacagcctgttatgctcatgttcatgctcaggatattatggtatatttattgcagtatacatgtacttggttagtggatttgcagattatattacaaact

SEQ ID NO: 76655 - DNA, 636 bp, Homo sapiens
tggaaagtgatttttaggtttcatcttgggatagtgacattcgagtgagggtcttggtacagaaatggatgtttggaggaggaggtggcttttggatagtaagaatgaggtaagctatggatgggctgaactgctagtgaactcagtcgcataatgatctgttaagatgactctgacagcttgattctctatcctggaaccagccacccacagcctaggctggatttattccacagaatctaagtagaagttagtgttattagttatgcctctctccttggtgagaaagatgggctgtcctgatgtggtggaggtggctatgaaccagccagggtaagagactgactgaaagacagaagtggagccttctttattgtggaaaaagagaaagggcttctgtgctttcttctccacatacaggtccatgatatttttttcctgggggtggaaaagaggcttgttagagaggaggrtaggaggaggaagctaaagtaactcagctctgagtgtgtaacaggagagggactgctgcccccaaaggaagggacagaggctagggacaaaggcagatgaagcagggcattagagtgttaaaaacgggaactcactgggttcccatagcctggctccacccca

SEQ ID NO: 76656 - DNA, 722 bp, Homo sapiens
gggatcctccatgattttgtaaaccatggcataatacactatttctcacatgtgctgggtaaggcagggagcccagatctgtgttttctgggttccacatgctttctatgagattattataaattggtgttttcattttggttatactctgtcatcatagcctcttctgtatcaccagaatgaacaccttacccttgagtccagccacatgatgtcaggactcatatttgagcttttgtttgagctcayatttgtgccaagtgaaagtccaaggtatcagtgactgaacaaacaaagtttttcacagtagagaaaagaggtgggaataccaaatcatcacacagcctgtagcaggatggagatgctgtaacacttacaaccataatcatgtcacaagctaatgtgtcatcagcttttaattaataatataaattggcagatgtaacaacctgccactatttattagcatagcatggatatatgagtgaatatccaatgactaattcttctattggatattccagaattaattaactttaacacttattttagtgttgatttttataaaactgcaatgccaacattatattcaattgaggaagaaaactttagaggagagtggcagaggaaggaggaaagtaggactttgcattaatcatcccacacagaaacatcaatttgatcaactattcatgcacaaaaaaaatcacaagagcaaagga

SEQ ID NO: 76657 - DNA, 722 bp, Homo sapiens
gggatcctccatgattttgtaaaccatggcataatacactatttctcacatgtgctgggtaaggcagggagcccagatctgtgttttctgggttccacatgctttctatgagattattataaattggtgttttcattttggttatactctgtcatcatagcctcttctgtatcaccagaatgaacaccttacccttgagtccagccacatgatgtcaggactcatatttgagcttttgtttgagctcacatttgtgccaagtgaaagtccaaggtatcagtgactgaacaaacaaagtttttcacagtagagaaaagaggtgggaataccaaatcatcacacagcctgtagcaggatggagatgctgtaacacttacaaccataatcatgtcacaagctaatgtgtcatcagcttttaattaataatataaattggcagatgtaacaacctgccactatttattagcatagcatggatataygagtgaatatccaatgactaattcttctattggatattccagaattaattaactttaacacttattttagtgttgatttttataaaactgcaatgccaacattatattcaattgaggaagaaaactttagaggagagtggcagaggaaggaggaaagtaggactttgcattaatcatcccacacagaaacatcaatttgatcaactattcatgcacaaaaaaaatcacaagagcaaagga

SEQ ID NO: 76658 - DNA, 818 bp, Homo sapiens
gcccttcggatgggggctgcgttcggaaaagggagggcacacccagttttgaactctggaaggggtggagaaaagagggaaaaagaacgcttccgaggccaattttaggccccagacctctctaatccattttagaggcctggttttggggccaggtagctgagagaggggttggggtgaggcgcagggcgtgcattcttggcgcctcgtgatcttctcagggtgtcggaaaagatatcgaaatacttcttgggaaagtctccttaaaatttcaactctgtctctccaggctggaatttggctgcttcaacaagcaacctttcctgaaaaccaaaacattgtaatcccaagtgattggtttgacagcgcatgttttggctggctgagcttgcatgccaactgcgtcccacctggtgcccttgatctgcaacactcagattttccttttaccctagctgcacttcacgtactaaatcatcatcaaatagtattttctgtgaaagtcacatgcacgttgcctttcacgtggttgcctctcgtttgttcccaagcgtcctccaaatcagctttacagattgttctttgcttaagagcaaatagcccaccaaaatttactaggccctttgtgccmccaagaggtagataaatgatttattgaattaataacaattttctttagcaaatgttcatccacgatggactatggctaacctcaaagcaccacttattctaactccccctccaataaagaaaaacgcaacaactcaatgtttagatgtaccagaattattttggatgattttcagacctaagttttt

SEQ ID NO: 76659 - DNA, 1458 bp, Homo sapiens
catggtcatggagaggatcttggaaactgcgactttaaacacaaggataggccaggcatggtggttcatgcctttaatcccagcactttgggaggccgaggcaggcagatcacttgaggtcaggagttcgagaccagcctggccacatggtgaaacccctctctactgaagatacaaaaattaacctggcgtggtggtgggcacttgtaatcccagctactcgggaggctaagcggggagaatggctggaacccgggaggcagaggctgcagtgagcggagatcacgctactgcagtccagcctgggcaacagaacgggactcgttctcaaaacaaacaaacaacaataaaaaaaacctacaaggacatataacaaaatcaattttaccataggcctgtaatcccagcattttgggaggcaaaggtgggaggatcacttgagcccagaagttcaagaccagcctgggcaacatggcaaaacctggtctctaccaaaaatacaataattagctgggcatggtggcatgcgcctgtagtcccaactactcgggaggctgaggtgaaaggatcacttgagcctgagaggttgaggctgcatgagctgtgatgatgccatcatgcagactgtacactccagcctgggtgacagagtgagacactgtctcaaaaaaaattaccaatctaactctgacaaaagtgtgattgtgtatgatgctaaaacagggtgagagagaaaggatctttttttttttttttttttggaaaaagtatctcactgtgtctctcccaggctgaaaggatcctccctgactcagccatctgagcagctggaactgtagatgcatgccaccatgcctagctagttttttgtaaataaatatatatatatataatatatattatacattataaatatatacatatatgtaatacatatatatgtaaatatatacatataaatgtaaatatatgtgtgtgtgtatatatatatatatatatatatattttttttttttttttgtagaaaggggttttgccatgttacccaggctgatctcaaactcctgtaggcgagtgatcctcctgcctcagcctcccaaagtgctgggattataggcctgagccaccttgcccagtcaggatactcatttcaagaaaaaattgacctgggaagataaagtmtgggttgcacccctatttccatcaagctcaatttagtgtggagaatatttatggaaaattatgagtattctgtctgtgatgttaagaccccagtgaataatctacgtagagtctgtgaagcctcaaatcaatcaggagcagaatcagcagttgcctgcaggtgagttgctaccttttgagaacatagtgaaaaagtaggtgacaaggctgctaaatctaggagttacagtttgatagtctgagaaatctgtacagttcttctatgaggtgacattg

SEQ ID NO: 76660 - DNA, 1487 bp, Homo sapiens
aaatagagtagggaaactaaagttggtatctgtggattgaaaagatatgccatttctttcttgcacaaaaacatctcattatgggccaggcatggtggtggctgatgcctgtaatcccagcctttgggaggtcaaagcaggtggatcacaaggtcaggagatcgagaccatctgggccaacatggtgaaaccccatctctactaaaaatacaaaaattagctgggcgtgatggtacatgcctgtaatcccagctactcgggacgctgaggcaggagaatcgcttgaaccagggagtcagaggatgcagtgagccgagatcatgccactgcactccagcctggtgacagagtgagactccatctcaaaataaataaataaataaaaataaaatgagctgggcgaggtggctcatgcctgtaatcctagcactttgggaggctgaggcgggcagattacttgaggtcaggagtttgagaccagcctggccaacatggcgaaatcccatctctacaaaaatacaaaaaattagccagacgtggtagtgcacgcctggaataccagtgctttgggagactactgtgggagaatcacttgaggccaggagttcaagaccagcctgggcaacataaatgagagtttggctctacaaaactaaaaaaattaacccaggcatgatgacacatatctgtgtcttagctactcaagaggcttaggcaggaggatcccgtgagcccaggattcaggctacaatgagctgtgatcaagccactgcactccagcctgggcagcagagcaagactgtctttaaaaaaaagaaaaattatatatggagtcatggaaaaatgtgaaaaataaacgaaaatttaaaaaaaaagaaaaatcagaaaaaaaamcaaaaaacctattttatcaggtgctctgactagaaaaaaatgaagaacctagcaaagtcagtgaatctatttcagtagttctcaaactgagggcacttccccaacaagacatttagcaattaagtgttggctatcaaaacaacactgtcagctaatgtcagaatcagagcacattacaggtaaatcagaaggtgaagtatatcagaagtatgataatggaaacacttttggttgttgcaactggttggggagggggtgccatagacatctagtggcagaggccaggagtgccatgaaacatcttgcaatgcacaggatagccccctatatcaaagaatgagaagcccacaatgtcaatatacagagattgagaaaccctgatctacttataaatattttaaattatcctagcccaataaaggggagaagagagagcgagagaaaacgagtacatgagcaagtatactgtacctcaacaaggtcagtgcttcttttatttttatttttatatatttatttttgagacaggggctcgttctgtcacccaggctggagtacagtggcacaatcacaattcgctgaagcctcaacct

SEQ ID NO: 76661 - DNA, 714 bp, Homo sapiens
gtcttccagcatctttggaagaatccctgggaaccagtgtctttttgtggggctctccatgcatgagtaagagagaggaagacttttttttgaggcggggaagcggggctctccatgagtaagagagacagggggagacattttgaaggctgggctgccagaggtctatagaggattatcttaaaaggaacatgaactcctgctggaaaaagtagaggggtctgaaatttctcacagacagggagggaggtgaataccctacttgggcccacacactttggcagagaggcaccacccacgccgttgacctttggtgcttgttctgtccactgaccgttggactaagggggccttgagtgtgagcttgtctcacctggcatggggtcaggtgtttccagaagcttgagagccaaatttcccaaagcagacgagccctttcctactccagggaggagtgcaatgtgctgagctttgttgagcaccttctatgggccagactctggtgtcctctgccaaggayagaacagtcagagccatccttgcaagatgtttgccagatcgcatttctcctctgctcaaaactctaccccctcccccagcaaaagtaaagtccttgcaatagccgtggcccagtgtgattggccttctctctgccctcatcctctgtctccctctctctgctcacattcagtcccacctcagatgaatctgaca

SEQ ID NO: 76662 - DNA, 714 bp, Homo sapiens
gtcttccagcatctttggaagaatccctgggaaccagtgtctttttgtggggctctccatgcatgagtaagagagaggaagacttttttttgaggcggggaagcggggctctccatgagtaagagagacagggggagacattttgaaggctgggctgccagaggtctatagaggattatcttaaaaggaacatgaactcctgctggaaaaagtagaggggtctgaaatttctcacagacagggagggaggtgaataccctacttgggcccacacactttggcagagaggcaccacccacgccgttgacctttggtgcttgttctgtccactgaccgttggactaagggggccttgagtgtgagcttgtctcacctggcatggggtcaggtgtttccagaagcttgagagccaaatttcccaaagcagacgagccctttcctactccagggaggagtgcaatgtgctgagctttgttgagcaccttctatgggccagactctggtgtcctctgccaaggacagaacagtcagagccatccttgcaagatgtttgccagatcgcatttctcctctgctcaaaactctaccccctcccccagcaaaagtaaagtccttgcaatagccgtggcccagtgtgattggccttctctctgycctcatcctctgtctccctctctctgctcacattcagtcccacctcagatgaatctgaca

SEQ ID NO: 76663 - DNA, 2343 bp, Homo sapiens
tttaataaaataagatggttgtttagaaatactgacattctcttctctatagatgagttattaaaacattattttatttttaatatcccacttagccaaactgcactagaaaaccagaagaatctagttctagaaaacactttgcttttgtaatactcttcggtatttaacagtacttaacaagctagtaaggaaccatagctttacagccaagtgggggatggggaattgtttttgctaagccaggatgaaggtgttagttatatatgctcttgagcatagcaagttctgtgaactcagatgtatctggaggcttttagccrcaagttacagaatattcaactacaagtgactgaaatcatgagggcatttaattcttacacaaaagatgacgtctgtgggcggctgctccaacccggattggctaacagtctaggggctgcttctctgcctctcggttttcctttccatagctccaaatacagtccttcatcaaatctattttcaaataaaaaaaaaggaatgatgtccagcgggccctggaattcaccccaagccctcgcaggaggaggagggtgaatggatagcttggccaggcaccgtggctcacgcctgtaatcccagcactttgggaggctgaggcgggtggatcccttgagcccaggaggcaaaagttgcagtgagcaacccctgcactccagccagggcaacagagcaagaccttgtctcaaaacattaaaaaaaagagacaaaatggatagcttttcttgtctccctttttgtatcagggaggaaaaatttccctggcaaagctttgccaagcctgctccccagaccctcatactttccaggccagagctggctcacctgcctagccctatcactggcaaaggagaagtgggatatcatgatgaatttagagccataatgattcattttctgaagctgagcacactcgctgtctatggagcaaaatgagattttgttggcaaggaaaaggggggtgtggtgggtttgtgagacggcgatggttaaacaatcaatagtgtttgtgatgtctggaggcattaacaggtgaaaggtgggaccctggtcccaatgcctgagttcatcattactattcaatgagtgcataataaggaaatacatcttccatttgctatattgtgaaattggataaagccctcagtcaaaccagatatcctacgtggctttgtaggagttaagtcacagaataggctccttccttggaaataaaacttgaccaagtctcttccctagaaatacagttcttcattaaatctattttcaagtttaaagtaatgatgtcccaaggtccttggaattcaccccaaaatgacgcaaatacaataagccaaatggctgaaatcacttacacacaacatttgaccaaagcaaatcagcttgctctcatgctgtgatcagaagagcagcaaactggaggctttgtttgaagcaaaaagaacactgaattctaaagacaaggatcctcagggggagaagagagagattagtaaacagggttagttaatccactcagacaagagcctcaaaagttcaaggggtggtctgttgcctgcacttccatgggatttcaaaggattgcagtgagaggccgggaaccaaacacgtcactctccgcagccgctgtcccatttatatcattgatatcagcagccaggactgctctattctacgaaagggatggaactttctcgaagaagtgtagttgccccaaatagagactgctcagatttggcgggcctcttgagagcaagaactgaggaatcttatcacaaaaatgggaagataaaaggcagagcctaatgagagaacactgaaaccctcgtattttttattccctggagcaaagtaaagaacaggcatagaggagtcagagggcctggttctcctaggactgacccccactgggaagcgctgtagaccgcccaggttgataaaatgttgtcaccctgtgaaagcaacacaatccagtaactaaagcgttcatgaacggggggcctgcagggttctgtgttagctcttggaatctaggttcaaaaaacaaaaaacaacagggcacgttgaagagggctgtgtcaaaatttctcctttcccttcacacccacgccttccacacccactctgctgatggcgttcactccaatttcattgagaaaatggaagctacacatctagccctgccttccctcctatttactggaagcattcctgcttctaccaactgtcagtccctccacctatgctccagttctcatcccctgtagcttcttaaggactgggtctctttcgtcacccctc

SEQ ID NO: 76664 - DNA, 645 bp, Homo sapiens
aaaatatgtcataaataatattctttcaaagtcaaaattccaaaattctcaactcttcaaaattctttgaataaaattattaaaattcaacacatctttacttttattttacttctgcttataaccattttctgaatggaggttattaaggaagtctgtggtgaaaataaggagaaagaagaaataccaaaaaagtaaattctagtttaactaatgtttgaaagtctaatccctcttctaaaagagagctaaggccgggcttggtggttcatgcctataatcccagcactttgggaggctgaggcgggaggactgcttgagcccaggagttcaaggctacagtgagctataagagcacaatcatactccagcctggatgacagagtgaaaycctgtctcaaaaataaataaataaataaataaataaataaataaataaagctccatcttccatacatgtaagagacttcaagtttcaatgttcttgtctgacttcacggagttgtacagaataacataattgcaactttgctacgcaaagtgtgatcatatcacttgagtgtgtgatagaaatgcaggaatcttagctggtcatggtggttcacacatgtagtcctagctacttgggaggctgaggcaggagga

SEQ ID NO: 76665 - DNA, 1256 bp, Homo sapiens
ctckcctcttgatagccatcagaagtggctcatcctcactcggcctgaaggaggaagctgagggtgcagctgcaccttgattttcatctctggccaggaagctagtgatggggctgacaccatgaatacagaagtgatccccatcatcaccccagagaagctgggctgatctgagggtgtctgaggacagaagaggagctggggtattctttggagggcgcttgtgttttgtattgaatggcaagggctcggcagtggtaggcactgaccgaaagcaaccacacgtggcctgcttattgacctgggaatgagagacaggagccagaactgtttgggtaaacaggatttgcactgttctgctttatgctcttgtaattatctgatgacccagttgctgtacgtggcagacgggacttagaaagtaagagggaaattcttctgacttgaaattatggagcaatttaggaccactttcataaattattttctaactctacaagggccagaaatgacccgactctaatttatcaatgctggacccacttgaatgcaaactaagactctgtatatatatacccatgcccagacacatacagtgagtcagccctcaactccctggtgcaggtgagcctgggccaggcagtccccaaatttaactgcaatttactttcagctttcattatccagttttcaccaggatcttcctttgcaagtgggtaggcaaaggctgctgaggatggaaacttccctggtgcaatcagcatacagctggttgggcagaggagcggatctgggagtcagacctctatgacttccactatggggaggaagccccaatggcccaggcagtgagaggcacagtggggcttaccccaggggtagctgactgcagaacccaggctggtcaccagtctgctctggtgtctttctggtgcccaggatttgggtcataatttaggaattctgattttggtttggtttacttagatgcatacttaactattaaatatcactccttgtgagcccaggtcctttccacagatgatgcaacatttcaaaacttgtgaggttgtctttccttttgcaattttgttgagagattttacccattaaaccttgggtgactaacactgagcacttacaatgtagcaggcaccattaagagtcactcacatgcgttaatatgtgtaggcgcatagaaccgtgcctggcccagagcgaggctgttttatatttgctctccttatccttatgga

SEQ ID NO: 76666 - DNA, 816 bp, Homo sapiens
tcccacctcagcctcctgaatagcttggttgtacccttccattgatgaaaagaaacccttgtttcagagactggttggctgcattttcttcctagccaacctttgccgtatccatctggcagggatgggcgtacctttagtgctgaggagtggagggcctcggatggcgggtcttccagagccagctcctgcctcctttccacccggacatctgcrtaactgtacaggaaattaagagaccacagtggagatggggcattccaggaagggatgacaccacctgaacagacagcaaggtacatcgaggttctctacgtaacccctgccccccacaacagtcaacacagaggagcctagcctgtgacttgttggaaggaatgagcgtcgttctctgccttaaattcgacctgagtgacttataatattacattcaaaatctttttatttccaggatgtctttattcccctctcatttactattctttttacttccctgaaatctccaattgtaattgtctttaaaaaacacattttcgtctatgggataagcttctgcctttaaataattagaaggctttcttaaaacctgctcagtctggaccgtgcatatggaagagtgacacaaaacttttttagtagttacatttctcagaaagtttcctctcaaaccaacccggactagccaaatccagactgtagatgagcccacaggcccacttttcagcagtgtgggtaaatcaactcaacacagggacgcccagctgaccctacagtgcctctgccccgagtgtggagaccctggggcaagaggccttg

SEQ ID NO: 76667 - DNA, 684 bp, Homo sapiens
tcccaaaatatctctcttccttatcttgagcctttcataattctgtattacaaatgataatactaacacagaaaagataaccaacttgctgtaatcacacccggtgtaaatggccaaagtcagatgttcagcactcttctctatactacaccattccacacagggctcaaggaggttcaaaagagagtaggtggcttcaagcattccctgaaagacacatgatatttwaaaaaaaaaaaaaagcattgaagctttctgacatctgctaaaagacctctttagtggtttgataccaagaacacattactgcatgaatcctccagcaagtaccgctcttgaaggagagggctctgaatagcaatttgatctgacctagtcctaaacattagcttggattcaatatctaggaagcagtaggatgtggttgtttttaatttctctaagacatttctcactggacacccaggatctaagtattcatcagcatggtgtgagtgcgggtgtgtttttcctaggttttagctttatatagaacactcacttggacctggtgaagataccaatatctaacacgcattcccatacaactctaatgataagcctatgaggtagatatctttattgactctttcactgatgaaactgaagtccagaaagattaagtgggttgcttagggccacaca

SEQ ID NO: 76668 - DNA, 684 bp, Homo sapiens
tcccaaaatatctctcttccttatcttgagcctttcataattctgtattacaaatgataatactaacacagaaaagataaccaacttgctgtaatcacacccggtgtaaatggccaaagtcagatgttcagcactcttctctatactacaccattccacacagggctcaaggaggttcaaaagagagtaggtggcttcaagcattccctgaaagacacatgatattttaaaaaaaaaaaaaagcattgaagctttctgacatctgctaaaagacctctttagtggtttgataccaagaacacattwctgcatgaatcctccagcaagtaccgctcttgaaggagagggctctgaatagcaatttgatctgacctagtcctaaacattagcttggattcaatatctaggaagcagtaggatgtggttgtttttaatttctctaagacatttctcactggacacccaggatctaagtattcatcagcatggtgtgagtgcgggtgtgtttttcctaggttttagctttatatagaacactcacttggacctggtgaagataccaatatctaacacgcattcccatacaactctaatgataagcctatgaggtagatatctttattgactctttcactgatgaaactgaagtccagaaagattaagtgggttgcttagggccacaca

SEQ ID NO: 76669 - DNA, 522 bp, Homo sapiens
gcaacctccatctcctaggttcaagcgattctcctgcctcagcctcccgagtagctgggattacaggagtgtgctatcacactcggcagatttttgtattattagtagggacacggtttcaccatgtyggtcaggctgttctcaaactcctgacctcaggtgatccacctgtcttggtctcccaaagtgctgggattacagatgtgagccactgtacccagcctaccagtggtattacccagggatatgaatagctaagctatactttaggcacaaaccagcactattatcaagatgcaatatgtgaactcatctttcttctagcatcagttcagaattaattttaatctgtgtattgtatactgctgccaaaaactcattaaccacaattaaattatgaaagtacatgtgtaaatttatggatagcaatacacaatccaaaatatgagtttgctataaaaataaagtatatgggtagaatcatattaattataagtaaccagaactgttaataagaaatta

SEQ ID NO: 76670 - DNA, 522 bp, Homo sapiens
gcaacctccatctcctaggttcaagcgattctcctgcctcagcctcccgagtagctgggattacaggagtgtgctatcacactcggcagatttttgtattattagtagggacacggtttcaccatgttggtcaggctgttctcaaactcctgacctcaggtgatccacctgtcttggtctcccaaagtgctgggattacasatgtgagccactgtacccagcctaccagtggtattacccagggatatgaatagctaagctatactttaggcacaaaccagcactattatcaagatgcaatatgtgaactcatctttcttctagcatcagttcagaattaattttaatctgtgtattgtatactgctgccaaaaactcattaaccacaattaaattatgaaagtacatgtgtaaatttatggatagcaatacacaatccaaaatatgagtttgctataaaaataaagtatatgggtagaatcatattaattataagtaaccagaactgttaataagaaatta

SEQ ID NO: 76671 - DNA, 522 bp, Homo sapiens
gcaacctccatctcctaggttcaagcgattctcctgcctcagcctcccgagtagctgggattacaggagtgtgctatcacactcggcagatttttgtattattagtagggacacggtttcaccatgttggtcaggctgttctcaaactcctgacctcaggtgatccacctgtcttggtctcccaaagtgctgggattacagatgtgagccacygtacccagcctaccagtggtattacccagggatatgaatagctaagctatactttaggcacaaaccagcactattatcaagatgcaatatgtgaactcatctttcttctagcatcagttcagaattaattttaatctgtgtattgtatactgctgccaaaaactcattaaccacaattaaattatgaaagtacatgtgtaaatttatggatagcaatacacaatccaaaatatgagtttgctataaaaataaagtatatgggtagaatcatattaattataagtaaccagaactgttaataagaaatta

SEQ ID NO: 76672 - DNA, 522 bp, Homo sapiens
gcaacctccatctcctaggttcaagcgattctcctgcctcagcctcccgagtagctgggattacaggagtgtgctatcacactcggcagatttttgtattattagtagggacacggtttcaccatgttggtcaggctgttctcaaactcctgacctcaggtgatccacctgtcttggtctcccaaagtgctgggattacagatgtgagccactgtacccrgcctaccagtggtattacccagggatatgaatagctaagctatactttaggcacaaaccagcactattatcaagatgcaatatgtgaactcatctttcttctagcatcagttcagaattaattttaatctgtgtattgtatactgctgccaaaaactcattaaccacaattaaattatgaaagtacatgtgtaaatttatggatagcaatacacaatccaaaatatgagtttgctataaaaataaagtatatgggtagaatcatattaattataagtaaccagaactgttaataagaaatta

SEQ ID NO: 76673 - DNA, 522 bp, Homo sapiens
gcaacctccatctcctaggttcaagcgattctcctgcctcagcctcccgagtagctgggattacaggagtgtgctatcacactcggcagatttttgtattattagtagggacacggtttcaccatgttggtcaggctgttctcaaactcctgacctcaggtgatccacctgtcttggtctcccaaagtgctgggattacagatgtgagccactgtacccagccyaccagtggtattacccagggatatgaatagctaagctatactttaggcacaaaccagcactattatcaagatgcaatatgtgaactcatctttcttctagcatcagttcagaattaattttaatctgtgtattgtatactgctgccaaaaactcattaaccacaattaaattatgaaagtacatgtgtaaatttatggatagcaatacacaatccaaaatatgagtttgctataaaaataaagtatatgggtagaatcatattaattataagtaaccagaactgttaataagaaatta

SEQ ID NO: 76674 - DNA, 2198 bp, Homo sapiens
ctgctctgggccagatactgtgcccagtacagagaggaggtgcacgaggaaatgataaggcacatctctgctttggagaatctcattgcccaagaagacatatagacaagtaaaccagttacagaaataatggttaaggtacactggtgggacgaagaagggacgaatcagttttgcctaagattggaggatgctgggcaaaaaaggcttcagagaagaggaggtatttggagagtgcattgaaggttgaatagaaggtttagagaatcagaatttgcctagtgtacagaaagaaaaattgaaaggcagtggacggccatcagtagaagggtgtgaggcacaagttattgaggtacatgaagagactgacagtcatgatcmttatgaagcattagttgaagggtcacagaggtacgcataagtataccaatggtaatgctgctggaagagtagccaggggactggagaaaagaaggcaccatgttatgtgctgggacctcattcattcttcatgtcataaggagccaattcttctctggacttttccacattccatgcaaagtctgtctggcttcctgtccatttactttctggtcattcaaggcctaccactgtccggtgtccagttgctcctcacatgcagatggaaaacctgggccaggtcaaagtctgaagacctagagaactgggcagagctctgggcagtgtgggatctgcccacacctctcagagagaggaactgaggtggttgttctgagaggcagtgagcagggagaccccgaagccaaaggctggcaggatccagcagggcagaggccagcaggggaattcagggaagagcctcagggctgacaatggggacacctgactacagtcaaggggattcaaagcacagcctggaacctggaggaatcccctggaacatggacacagaaatgcggacagctgaagccatgaccttgaccacaggtagggagcttgcagttagggacaggagccaactttacttagacataactcaaattcatttcatttctgaaggaaatgaaatttccttcattttcacctggttggaatttattgctctctccttaatggtgcatagcaccttgtttatttatgctttgagtaattgtaatatgccttgttttatagtatttttatacatttctacttcaactcttgattataaatttgttaaggcagggaatatctatctatctgtctatcttatctatctatcatctacacacactaatggtattttagctatagcatacataaatacataggtacattttgttgaattgaaattaagtgaattaatcccatcctctttcagaatagaaattatgttttctgggagctagaaactattgtgagagatgttagtattgttgaaatttaaaaggggctgtccagttcagttgtggcctggtgtgtactgaatgacatccaaattctaagtaagtggaattgctatcagatctgaaataaattagccatgctcgtgagaagatgtagagtgaggaattccttccacaaatgctctgtttatctgattattggttagccagtgatttcctgtcatccacaaaaaaagaggaaatagtaagagaaaagtaaatactaggtgaagtgctttgagccaaagggagtccatataagaagtgatggatggctctgttgggatcccggcagtagtgcatgatgatgttgttgtataaatacgtcagctcctttaaccctcgggggaccctgaagcatgtgtttttcatgggcccctagcgtgctcatgcgggattaagtttcagttgcctactgtggtaattggcttgagaagcctatctttattaattttctcctcttccttgtcttatttctcttctcccctacctgtgttctcttcattcccttcctccctacaaaataaactatgtgagtttgaattcttgtttcaggattcaagtttgctcctggggaaccaaattaagactaaagaatatgtattctctttcttctcatttggcgttgagacattttaaagcctcaacaattttccctatataagcagttccaattatttgtgcctgacttataaaaagtaggtaatgagaaaattaaggcttgcagacaaatcttacacaattgcagcagaatatctcagaaatgtgcccaattctgagacagaaagaaaa

SEQ ID NO: 76675 - DNA, 2198 bp, Homo sapiens
ctgctctgggccagatactgtgcccagtacagagaggaggtgcacgaggaaatgataaggcacatctctgctttggagaatctcattgcccaagaagacatatagacaagtaaaccagttacagaaataatggttaaggtacactggtgggacgaagaagggacgaatcagttttgcctaagattggaggatgctgggcaaaaaaggcttcagagaagaggaggtatttggagagtgcattgaaggttgaatagaaggtttagagaatcagaatttgcctagtgtacagaaagaaaaattgaaaggcagtggacggccatcagtagaagggtgtgaggcacaagttattgaggtacatgaagagactgacagtcatgatccttatgaagcattagttgaagggtcacagaggtacgcataagtataccartggtaatgctgctggaagagtagccaggggactggagaaaagaaggcaccatgttatgtgctgggacctcattcattcttcatgtcataaggagccaattcttctctggacttttccacattccatgcaaagtctgtctggcttcctgtccatttactttctggtcattcaaggcctaccactgtccggtgtccagttgctcctcacatgcagatggaaaacctgggccaggtcaaagtctgaagacctagagaactgggcagagctctgggcagtgtgggatctgcccacacctctcagagagaggaactgaggtggttgttctgagaggcagtgagcagggagaccccgaagccaaaggctggcaggatccagcagggcagaggccagcaggggaattcagggaagagcctcagggctgacaatggggacacctgactacagtcaaggggattcaaagcacagcctggaacctggaggaatcccctggaacatggacacagaaatgcggacagctgaagccatgaccttgaccacaggtagggagcttgcagttagggacaggagccaactttacttagacataactcaaattcatttcatttctgaaggaaatgaaatttccttcattttcacctggttggaatttattgctctctccttaatggtgcatagcaccttgtttatttatgctttgagtaattgtaatatgccttgttttatagtatttttatacatttctacttcaactcttgattataaatttgttaaggcagggaatatctatctatctgtctatcttatctatctatcatctacacacactaatggtattttagctatagcatacataaatacataggtacattttgttgaattgaaattaagtgaattaatcccatcctctttcagaatagaaattatgttttctgggagctagaaactattgtgagagatgttagtattgttgaaatttaaaaggggctgtccagttcagttgtggcctggtgtgtactgaatgacatccaaattctaagtaagtggaattgctatcagatctgaaataaattagccatgctcgtgagaagatgtagagtgaggaattccttccacaaatgctctgtttatctgattattggttagccagtgatttcctgtcatccacaaaaaaagaggaaatagtaagagaaaagtaaatactaggtgaagtgctttgagccaaagggagtccatataagaagtgatggatggctctgttgggatcccggcagtagtgcatgatgatgttgttgtataaatacgtcagctcctttaaccctcgggggaccctgaagcatgtgtttttcatgggcccctagcgtgctcatgcgggattaagtttcagttgcctactgtggtaattggcttgagaagcctatctttattaattttctcctcttccttgtcttatttctcttctcccctacctgtgttctcttcattcccttcctccctacaaaataaactatgtgagtttgaattcttgtttcaggattcaagtttgctcctggggaaccaaattaagactaaagaatatgtattctctttcttctcatttggcgttgagacattttaaagcctcaacaattttccctatataagcagttccaattatttgtgcctgacttataaaaagtaggtaatgagaaaattaaggcttgcagacaaatcttacacaattgcagcagaatatctcagaaatgtgcccaattctgagacagaaagaaaa

SEQ ID NO: 76676 - DNA, 2198 bp, Homo sapiens
ctgctctgggccagatactgtgcccagtacagagaggaggtgcacgaggaaatgataaggcacatctctgctttggagaatctcattgcccaagaagacatatagacaagtaaaccagttacagaaataatggttaaggtacactggtgggacgaagaagggacgaatcagttttgcctaagattggaggatgctgggcaaaaaaggcttcagagaagaggaggtatttggagagtgcattgaaggttgaatagaaggtttagagaatcagaatttgcctagtgtacagaaagaaaaattgaaaggcagtggacggccatcagtagaagggtgtgaggcacaagttattgaggtacatgaagagactgacagtcatgatccttatgaagcattagttgaagggtcacagaggtacgcataagtataccaatggtaatgctgctggaagagtagccaggggactggagaaaagaaggcaccatgttatgtgctgggacctcattcattcttcatgtcataaggagccaattcttctctggacttttccacattccatgcaaagtctgtctggcttcctgtccatttactttctggtcattcaaggcctaccactgtccggtgtccagttgctcctcacatgcagatggaaaacctgggccaggtcaaagtctgaagacctagagaactgggcagagctctgggcagtgtgggatctgcccacacctctcagagagaggaactgaggtgrttgttctgagaggcagtgagcagggagaccccgaagccaaaggctggcaggatccagcagggcagaggccagcaggggaattcagggaagagcctcagggctgacaatggggacacctgactacagtcaaggggattcaaagcacagcctggaacctggaggaatcccctggaacatggacacagaaatgcggacagctgaagccatgaccttgaccacaggtagggagcttgcagttagggacaggagccaactttacttagacataactcaaattcatttcatttctgaaggaaatgaaatttccttcattttcacctggttggaatttattgctctctccttaatggtgcatagcaccttgtttatttatgctttgagtaattgtaatatgccttgttttatagtatttttatacatttctacttcaactcttgattataaatttgttaaggcagggaatatctatctatctgtctatcttatctatctatcatctacacacactaatggtattttagctatagcatacataaatacataggtacattttgttgaattgaaattaagtgaattaatcccatcctctttcagaatagaaattatgttttctgggagctagaaactattgtgagagatgttagtattgttgaaatttaaaaggggctgtccagttcagttgtggcctggtgtgtactgaatgacatccaaattctaagtaagtggaattgctatcagatctgaaataaattagccatgctcgtgagaagatgtagagtgaggaattccttccacaaatgctctgtttatctgattattggttagccagtgatttcctgtcatccacaaaaaaagaggaaatagtaagagaaaagtaaatactaggtgaagtgctttgagccaaagggagtccatataagaagtgatggatggctctgttgggatcccggcagtagtgcatgatgatgttgttgtataaatacgtcagctcctttaaccctcgggggaccctgaagcatgtgtttttcatgggcccctagcgtgctcatgcgggattaagtttcagttgcctactgtggtaattggcttgagaagcctatctttattaattttctcctcttccttgtcttatttctcttctcccctacctgtgttctcttcattcccttcctccctacaaaataaactatgtgagtttgaattcttgtttcaggattcaagtttgctcctggggaaccaaattaagactaaagaatatgtattctctttcttctcatttggcgttgagacattttaaagcctcaacaattttccctatataagcagttccaattatttgtgcctgacttataaaaagtaggtaatgagaaaattaaggcttgcagacaaatcttacacaattgcagcagaatatctcagaaatgtgcccaattctgagacagaaagaaaa

SEQ ID NO: 76677 - DNA, 855 bp, Homo sapiens
tagcaggcagtttgtcaaattaatttaacttattattgaccagctgtgttttggttttcctctgttcagtccacttacatttctaaaaattaagaaaaagtctagagaagattaaaatgacacatcttctaacctkttactcctacttctgaaatctatgtggttcactagtacttccatttgctactaaatcaacttaagtcttaccactaagacgatgctacacactattccttttccttactcttaactactcaaggtgagcctttttctacacatgcttatagcagtttattgtcagtacttgtcagctacaaaatggtaaaaaaattttaaaaaacaaaaaataaaacaaaacttctgtaagagtgactttgactattttgttaaccaaatctccggtttttttgtttgtttttttttttttttgagacagagtctcgctctgtcacccaggctggagtgcagtggtgcgatctcagctcactgcaagctccgcctcccgggttcacgccattctcctgcctcagcctcctgagtagctgggactacaggcgcccaccaccaggctcagctaattttttgtatttttagtagagacggggtttcacagtgttagccaggatggtctccatctcctgatctcgtgatccgcccaccttggcctcccaaagtgctgggattacaggcgtgagccaccgcgcccagcccaaatctccagtttctaaactggtaagctcaagttgctatgcctcaaggaatttgagagaatatttaatgtaagattcaggacccaatagtaagaattctactcaggacatctgatcttcattgaaaaggattctaatccaactt

SEQ ID NO: 76678 - DNA, 855 bp, Homo sapiens
tagcaggcagtttgtcaaattaatttaacttattattgaccagctgtgttttggttttcctctgttcagtccacttacatttctaaaaattaagaaaaagtctagagaagattaaaatgacacatcttctaaccttttactcctacttctgaaatctatgtggttcactagtacttccatttgctactaaatcaacttaagtcttaccactaagacgatgctacacactattccttttccttactcttaactactcaaggtgagcctttttctacacatgcttatagcagtttattgtcagtacttgtcagctacaaaatggtaaaaaaattttaaaaaacaaaaaataaaacaaaacttctrtaagagtgactttgactattttgttaaccaaatctccggtttttttgtttgtttttttttttttttgagacagagtctcgctctgtcacccaggctggagtgcagtggtgcgatctcagctcactgcaagctccgcctcccgggttcacgccattctcctgcctcagcctcctgagtagctgggactacaggcgcccaccaccaggctcagctaattttttgtatttttagtagagacggggtttcacagtgttagccaggatggtctccatctcctgatctcgtgatccgcccaccttggcctcccaaagtgctgggattacaggcgtgagccaccgcgcccagcccaaatctccagtttctaaactggtaagctcaagttgctatgcctcaaggaatttgagagaatatttaatgtaagattcaggacccaatagtaagaattctactcaggacatctgatcttcattgaaaaggattctaatccaactt

SEQ ID NO: 76679 - DNA, 855 bp, Homo sapiens
tagcaggcagtttgtcaaattaatttaacttattattgaccagctgtgttttggttttcctctgttcagtccacttacatttctaaaaattaagaaaaagtctagagaagattaaaatgacacatcttctaaccttttactcctacttctgaaatctatgtggttcactagtacttccatttgctactaaatcaacttaagtcttaccactaagacgatgctacacactattccttttccttactcttaactactcaaggtgagcctttttctacacatgcttatagcagtttattgtcagtacttgtcagctacaaaatggtaaaaaaattttaaaaaacaaaaaataaaacaaaacttctgtaagagtgactttgactattttgttaaccaaatstccggtttttttgtttgtttttttttttttttgagacagagtctcgctctgtcacccaggctggagtgcagtggtgcgatctcagctcactgcaagctccgcctcccgggttcacgccattctcctgcctcagcctcctgagtagctgggactacaggcgcccaccaccaggctcagctaattttttgtatttttagtagagacggggtttcacagtgttagccaggatggtctccatctcctgatctcgtgatccgcccaccttggcctcccaaagtgctgggattacaggcgtgagccaccgcgcccagcccaaatctccagtttctaaactggtaagctcaagttgctatgcctcaaggaatttgagagaatatttaatgtaagattcaggacccaatagtaagaattctactcaggacatctgatcttcattgaaaaggattctaatccaactt

SEQ ID NO: 76680 - DNA, 855 bp, Homo sapiens
tagcaggcagtttgtcaaattaatttaacttattattgaccagctgtgttttggttttcctctgttcagtccacttacatttctaaaaattaagaaaaagtctagagaagattaaaatgacacatcttctaaccttttactcctacttctgaaatctatgtggttcactagtacttccatttgctactaaatcaacttaagtcttaccactaagacgatgctacacactattccttttccttactcttaactactcaaggtgagcctttttctacacatgcttatagcagtttattgtcagtacttgtcagctacaaaatggtaaaaaaattttaaaaaacaaaaaataaaacaaaacttctgtaagagtgactttgactattttgttaaccaaatctccggkttttttgtttgtttttttttttttttgagacagagtctcgctctgtcacccaggctggagtgcagtggtgcgatctcagctcactgcaagctccgcctcccgggttcacgccattctcctgcctcagcctcctgagtagctgggactacaggcgcccaccaccaggctcagctaattttttgtatttttagtagagacggggtttcacagtgttagccaggatggtctccatctcctgatctcgtgatccgcccaccttggcctcccaaagtgctgggattacaggcgtgagccaccgcgcccagcccaaatctccagtttctaaactggtaagctcaagttgctatgcctcaaggaatttgagagaatatttaatgtaagattcaggacccaatagtaagaattctactcaggacatctgatcttcattgaaaaggattctaatccaactt

SEQ ID NO: 76681 - DNA, 855 bp, Homo sapiens
tagcaggcagtttgtcaaattaatttaacttattattgaccagctgtgttttggttttcctctgttcagtccacttacatttctaaaaattaagaaaaagtctagagaagattaaaatgacacatcttctaaccttttactcctacttctgaaatctatgtggttcactagtacttccatttgctactaaatcaacttaagtcttaccactaagacgatgctacacactattccttttccttactcttaactactcaaggtgagcctttttctacacatgcttatagcagtttattgtcagtacttgtcagctacaaaatggtaaaaaaattttaaaaaacaaaaaataaaacaaaacttctgtaagagtgactttgactattttgttaaccaaatctccggtttttttgtttgtttttttttttttttgagacagagtctcgctctgtcacccaggctggagtgcagtggtgcgatctcagctcactgcaagctccgcctcccgggttcacgccattctcctgcctcagcctcctgagtagctgggactacaggcgcccaccaccaggctcagctaattttttgtatttttagtagagayggggtttcacagtgttagccaggatggtctccatctcctgatctcgtgatccgcccaccttggcctcccaaagtgctgggattacaggcgtgagccaccgcgcccagcccaaatctccagtttctaaactggtaagctcaagttgctatgcctcaaggaatttgagagaatatttaatgtaagattcaggacccaatagtaagaattctactcaggacatctgatcttcattgaaaaggattctaatccaactt

SEQ ID NO: 76682 - DNA, 611 bp, Homo sapiens
tcgtatgtattttgggtgtagctacttctctctctggtctgtccatgatgatgcagaatgtcaactgttaaatgtgtttcttactcctccatgggcaagaaataatttgggttacaaaatgacttcacatgaaacactgctcgtgctaaagctccagtgattttcaatatgggctaaattaggcaactgacaaagctgactttactttgtataagtctttaggcacccaaatctgcagatagggcccaatttgtctttttgaacttccagttgctgcttagttcatacaaacctctaattcttttcccacaaaatacaatcattggtaccaaaatattttcttaaaaatgtattctaatagagtcataagagatgcttgatagttccatatttattgtctccattatctttttggaagataattaatgcttcacccaggggcactcaaaatggctattggaattatccaaaaattcaattgcccagagtggatatccttatataaacattcattctggataatttaagatacttgttattacaagtgtaaggcctacagatgtgtttacaaaaatgagaataacattttgcatttggaatgtaraagaaaa

SEQ ID NO: 76683 - DNA, 2341 bp, Homo sapiens
tgcttccactgcaagtgttcctccattttgtctttttcagattacataaaacagagcttcaactaccctctgccccctgccctcagccacctctaccccatccagcccaaccaaataaacatacaatttgagggaaagcagtgtgcttgctatgcaaactcagcttcaacacaaatgccctaactcctaactgagyagctatgtataaacatcctagagcccgcccctgtgcccactcctaccttcctacccctcacctaccacgtatggaagaatgggacttcctaaagggacagaaatatagtatgggatcatatatggtcagaagttcatatcctctgaccaacatgttcagcggattaagaaatcatagaattggccatggacggtggctcacgcctgtaatcccagcactttgggagaccaaggcaagcggatcacctgaggtcaggagttcgagaagagcctggccaacatggtgaaaccccatccctacaaaaaatacaaaaattagcagggcatggtggttggtgcctctaatgccagctacttgggaggctgagacaggagaattccttgaacccaggaggcggaggctgcagtgagccgagatcatgctactgcactccagcctgtgtgacaaagcaagactccatctcaaaaaaattaaaataaaataaaataaaataagaaaagaaaaaaaggaaagaaatccttgaattatgtctctcaatgtttgagggaaaacacagtaactagtgaaggcaagatgtttccaagacaaagagtgaaaaatacggaaagcaagtttctcacctgaggggttcgggaggagctgggactgctggaggccgaggagaccatgctcacattgggattcatgctccgctccctctcatcctggtagatgcgatctcgctccacttctggcagattgaggaaattctgcatggccctcaggtttactagaagagactgagaggctgtccgagggtcttcttccttacgcagaatctcagacaacaatccctgattaaatgggggaaaaaaacagaccaagtcacatttgcaggtatatgtgtgtggtttctgtcttccacccctctcctcctttgtttggtttaaccagctcgctgtgatgtcaagaacctcacactaattccttagggttctccgatatgaagtcaatgtgcttgccttccgggggatatgcattattttaggactgttctattctgacactttatcatcactgtaataatcatcagtgtacagacatgccagctagcaaggtaggcacttgggaagaattgtgaaactgcaattaccaccaggtgcctcctacaagtatttcaggaactgttagaactctctctgcttgaaactgggaacacttggcagtcctgcttagctttacaaatctgccaagtttggtaaatttagtttcgacatttaaacagcatggtagatttacatcaatttaaaaaaaaaactggctgaatttctgtatgaccggccactgttttcaatagagatatttcttatgcaaaaaaaaaaaaaaaaagacgcaaagcaaatggctaaattgtgttaaccctctgataatttcccaatctatacacacaatagttatccttacatatgtacaaagggcacccaaatctttcatgagacgtcttcatgggggaaaccctaatgtcaccattaaagcaatgaaaatgaagtcacctctggcgaggggctgagcacactgtaataacagtgtgcacggaatgccatgataggcccagatactttctgaatgtgtgactcacccaaatagaaagatttaaataggaagtcagggttttcatgtgctctgacgacagagaattcacaaagaaaaggaaaatgctgccaagtctagagaaaagtagtatggactccagaaaagggctggagatctaaggtgggacattgtcgtactgggggtaggtgcaggtctatttccattctgcacacttgttggattatcacacagagacatcactttatattcccagctaatatattgcttctcagagcagtataagaacagggtttaggattatcctcctgggaagacctgagatgttaatcccatatcttagaacagatggggcaactgaaatcatgaaaagtcacttctttaactgtagtaaagtagaacagatgccaaagacatttccactcaggtgaaaattaatgcaaaggaaacactatcagatttctaatatgtggcttaaatatgaaaaggcaatggatgtaagaggaatatgctatctctagttgtccaaaaatcttcagggaaaggtaggcaatg

SEQ ID NO: 76684 - DNA, 743 bp, Homo sapiens
tcaactggttgatcaattggttgagagggcctcaagcaacttgggaaccctcattcatcaccaccacacattggatttaaggtcttaacctttttaatcaccaagggctcttttcttttttttttttgctcttttttttttgctctgtcacccaggctggagtgcartggcacgatcttggctcactgccagctccacctcccgggttcacgccattctcctgcctcagcctcccaagtagctgggactacaggtgcccaccaccacgcccggctaattttttgtagttttagtagagatggggtttcactgtgttagccaggatgctctcgatctcctgacctcgtgatccgcccgccttggcctccgaaagtgctgggattacaggtgtgagccaccgcgcccagccacctccagtatttttaagtgtgctgcctatcatataaatatctgtctgctcttactgtaagctaacatataatttcagttaagttttctgaaataatgaaaactacttgaggactgacgttgctgatttggggataagggattctgaaatgggaactgctgaataaagctataatacagtgttgggtttttccacccctcacctaactgtatcttttgaaaaaggcacaacaatgacatctctgtacttgtgcaaatcgtccaacattctagcagtgggacaggacggcaaatctccgccttcaccttgatcacgaagtgtaaccatgtggtcc

SEQ ID NO: 76685 - DNA, 896 bp, Homo sapiens
tgcatgatagctacaatgaagcacatagcttagtctagcttctaccaaccacaatgtccactttaccaaccagtcaacccttggagctagaagtcattaaaacaccttatattagccttaatgcttgagaatgaagtaaagtgagagtgagttaattgtacctgccaatggggcaccttcggcctctgttcagtctcatgtcatgggtggcagggatggtaaagaaggccacaacagagcatgcctttatttatttattacgttttattttttatttgtttgtagagatggggtttcactacattgccctcaagtgattccccaacctttgcttcccaaagtgctagggttacaggtatgagccaccgtgccccgccacagcatgccttttaaaacagtgattgggccaggtgcggtggctcacacctgtaatccctgcactttgggaggccaaggcgggtggatcacctgaggtcaggagttcaagaccaacctggccaacatgatgaaaccccgtctctactaaaactacaaaaaattagctggatgtggaggcgggtgcctttaatcccagctacttgggaggctggggcagcctcccaagttcaagaattgcttgaacctgggaggcagaggttgcagtgagctgagatckctccactgcactccagcctgggtgacagagcaagactctgtctcaaaagcaaacaaacaaacaaaaacaaaaaccacagtgattgtatttactggtaaacatggtcccaaaggaacataaccccattagactagtgtttacttcattttgaagagtaaggagaggatgaggagaagagtcatggctttccttccctctgcatgttgctagtgacttaatgtgcaatttatcccaatgacag

SEQ ID NO: 76686 - DNA, 896 bp, Homo sapiens
tgcatgatagctacaatgaagcacatagcttagtctagcttctaccaaccacaatgtccactttaccaaccagtcaacccttggagctagaagtcattaaaacaccttatattagccttaatgcttgagaatgaagtaaagtgagagtgagttaattgtacctgccaatggggcaccttcggcctctgttcagtctcatgtcatgggtggcagggatggtaaagaaggccacaacagagcatgcctttatttatttattacgttttattttttatttgtttgtagagatggggtttcactacattgccctcaagtgattccccaacctttgcttcccaaagtgctagggttacaggtatgagccaccgtgccccgccacagcatgccttttaaaacagtgattgggccaggtgcggtggctcacacctgtaatccctgcactttgggaggccaaggcgggtggatcacctgaggtcaggagttcaagaccaacctggccaacatgatgaaaccccgtctctactaaaactacaaaaaattagctggatgtggaggcgggtgcctttaatcccagctacttgggaggctggggcagcctcccaagttcaagaattgcttgaacctgggaggcagaggttgcagtgagctgagatctctccactgcactccagcctgggtgacagagcaagactctgtctcaaaagcaaacaaacaaacaaaaacaaaaaccacagtgattgtatttactggtaaacatggtcccaaaggaacataaccccattagactagtgtttacttcattttgaagagtaaggagaggatgaggagaagagtcatggctttccttccctytgcatgttgctagtgacttaatgtgcaatttatcccaatgacag

SEQ ID NO: 76687 - DNA, 1347 bp, Homo sapiens
cagaaacctgaattccagaacaaataacatgggtggagtcagcacagagagctcggggactgctggtttatggcatactgtatgtgtgtgtgtgtgtgtgtgtgtgtgcacacgtgcacgagtctatacagtataatttccaacaagatattaacaaggctaatagagctgtcaatgaatgtggatcrtgtaatgatttgatgtttgtctttgctacaagggagagagaaaaggtccagtgccattacactgggagggcccatcctagtgattgcattcatatgataaaaaagacactgatgtcactgacaattttgatggacaatggcttggtagaaagtccttgtctgtctttctatctcatttccagtgagtcacaactgaaatattaaaccaaagtagccaaattttaacacaaacctctgccagcttgtgttatttttaaaacaaagaaggtaggaagattagcaggtgttgctagttacattggaaatcctttgaagctggacatatctcttggtgtcttacctggaaattacattcttggtgacctgagctcagtcagggtggctgcccatcctcaggacaggcagtagtaggaaaatgatgaatcttccagaaatcctcgagacttgttcattaatctgagaatgaaagagaaaatgtcagaaaacttgaaaaacattaattttgaacattaggtggactgacgggagcctggaattgcctcattacttgctgccccgtgcttaaggttgtaaaccaaatgaggtgaaggggcagatgtggccacagaggcaggtgtgggaccagcagtcaggagacctgtgttcctaccttggcaatgttgccccagccaggagattttgcatgaaaacaatcttacttctctggcttcatgttcttcctctggacaaatgtagctaataacagcttatgtccttggctcagagaaattgcagaaggcctaagaagtgatagttgttactagagtgatttatatagcagaaggggtttggaaagtacaaatccacatgctaatgaaatcatgggcgttggagagaatcatttggaaatgtaggaaccataacacctacccagcttgtccactaatctgggctactgatcatctaccccatgcatgtcctggctttctcacatcctgttccacttacagccccatttagagaaagaaacttgagtcagtgtttgtagactggtcaccttgagttacacacctgcaaactagaggcagtaatcacttgctagatatatttaaaaaataaaaataataggatccctcccaatcaaataaataaacaaaaagaatctctctctctcagaaaa

SEQ ID NO: 76688 - DNA, 638 bp, Homo sapiens
ggacctgagtcagaatccaaaatatttcttttcaatttccataatgtttttctcctttctaaaattgttcacttaattaaagatccgcctgttcctatccctttctcagttaccttccaaagtacaaaaattacatcagacaaaaatttatgtgcttgttctccaaactgcaacgtgcttgcatcacatcccttcccaattttagatttctccagtatatctgtatctgtaaaagctttattcatggttaaggagaaattagatggtatttggctagagatgcaagaatatacaaattccatcctctccacagaggcccctagacagcaaacacccaaggagtaatagtaggaatgaaacaaaatatcaccttcttgttagccagatgggaatatcttagatgaatcctatttcccctacactactgtggaccatagggaaatcccactggccattatcctatatttatgttccaggagtaatagtgacaaccttggattccatccctggaaattttccctcttgtcaatctgycaacacataccaaatcatatcttcagaggccacgaaaactgaaattcaacataaaatgggaatgagatgcggttaccacagagctaccattatgctctgtcctt

SEQ ID NO: 76689 - DNA, 528 bp, Homo sapiens
ccgccggacacttctgcccccgcggccctctagttggttcaccagtttgcgtttgattcctgcgcatttcttatgtgttaggcataataataaagggtggggcaagcctccccaactgagagagatctctttgccggagaacctggggcctcaaccagctcatgggactgttaccttcagcccgttgctatccctagcttctgtaaaactgctggcttgtactaagaccttttcattcctggctacacatgaattcccagaggagagaatgggcgcggaggagctttagaaacacccgtgtctgataccttcgaagattctgatttaactgatctgtggtggggcctgggcaatggcacttgtataaattatgcaggtgaagcaggtttaagaaccactgcactcaatgatttggatgataggtactatttagcatctagaactgttagtctgatgtatgttttacacgctcratcatcccctcaatagacccaggagctaagcgtcattatgccctttttacctcag

SEQ ID NO: 76690 - DNA, 1034 bp, Homo sapiens
caggagagagaggattaacatgttgtagcaaagactaccccaagcctgggcacagtggctcacacttgtaatcccagcactttgggaggccaaggtggtaggattgcttgagcccaggagtttgagaccagcctgggcaacacagtgagaccatgtctctacaaaaaatacaaaaattagccaggtgtggtagcacacacctgtggtcccagctacaggggaggctgaagcaggaagatctcttaagcccaggagatggaggttgcagtgagccatgatcacaccactgcactccagtctgggcaacaaagtgggatcctatctctgaaaaaataaaaataaaaatatcacaagggtcttttctgacctttcctcctccctccccaaatttcagagcatgattcttccagagcctgacttgccaatctggtcccaaaccctgactctcaacccttccccttcttcctgacaacaggttgtttccaattctggaaagcctgtggaggaaacaggaacagagatagcaagaaccctccctgcaaaccaaggcggactgggcactggaaaaagtgacagtgatggtggaacctggtagggaggaggggggcctgaagacagaaaggcttattgtgcacagaggggaagaagagccattggccctgtcctgtgacactgactgactgactgtgcccagccatgggatgccraggagagatgcttgccccctcaggacaactgagacccagaggccttgctaagtcccagaagacaaggacagagaaaagacaaataaaacatgcagaagcacaaggaaaggaatagcagtccatttcctccacccctcggctctagactacagggtcgttgaagagagatggctctggtggaagaggcaggaggatttcaaccagcttcatgcctcagctaacaattccagaagaagagtactacagggccatggcaggacccaatgggaacacttaaaaatcttgcataccaccccaaaatgctatgaaggttttgaactttccata

SEQ ID NO: 76691 - DNA, 753 bp, Homo sapiens
ccttacgtagggaatatttattggcctcatagtcacatgtgacatcatgctctgtgttgggaattttgtatggaataagatgttggaccactcctcaaaatcctcatattgcctatgaaatctggtttttttgagacaaagtctcactctgttgcccaggctggagtgcagtggcgtgatcttggctcactgcgacctccgtgrtatggtttggctgtgccccacccagacctctacttgaattgtatctcccagaattcccacgtgctgtgggagggacctaatgggaggtaactgagtcacgggggcccgtctttcccgtgctattctcgtgatagtgaataagtctcatgagatctgatgggtttgtcaggggtttccacttttgcttcctcctcattctctcttgccaccaccatgtaagaagtaccttctgccctctatcatgattgtgagaccttcctcagccatgtggaactgcaagtccaattaaacctctttcttttgtaaattgcccagtctcaggtatgcctttatcagcagtgtaaaaatggactaatacactccacctcctgggttcaggcaattctcccacctcagcctcctgagtagttgggattacaggcgccggccaccacacccagctaatttttgtatttttagtagagacatggttttgccatgttggccaggctggtctgaaacttctgacctcagacgatccactcaccttggcctcccaaagtgctggga

SEQ ID NO: 76692 - DNA, 753 bp, Homo sapiens
ccttacgtagggaatatttattggcctcatagtcacatgtgacatcatgctctgtgttgggaattttgtatggaataagatgttggaccactcctcaaaatcctcatattgcctatgaaatctggtttttttgagacaaagtctcactctgttgcccaggctggagtgcagtggcgtgatcttggctcactgcgacctccgtggtatggtttggctgtgccccacccagacctctacttgaattgtatctcccagaattcccacgtgctgtgggagggacctaatgggaggtaaytgagtcacgggggcccgtctttcccgtgctattctcgtgatagtgaataagtctcatgagatctgatgggtttgtcaggggtttccacttttgcttcctcctcattctctcttgccaccaccatgtaagaagtaccttctgccctctatcatgattgtgagaccttcctcagccatgtggaactgcaagtccaattaaacctctttcttttgtaaattgcccagtctcaggtatgcctttatcagcagtgtaaaaatggactaatacactccacctcctgggttcaggcaattctcccacctcagcctcctgagtagttgggattacaggcgccggccaccacacccagctaatttttgtatttttagtagagacatggttttgccatgttggccaggctggtctgaaacttctgacctcagacgatccactcaccttggcctcccaaagtgctggga

SEQ ID NO: 76693 - DNA, 1069 bp, Homo sapiens
ttcacttgtacttcattattctgctgattaaattatagtggggcagggatggaggactttcaagcagtcaaagactttcctgggtacacagagctcatctcacaacatacttaagaaagctcctgatgcacctgtcactcctgttgccagcccctgcatcacaagtggtgcaagcagcgatgaagtgtttgtcgttgttgttgttgttgttgtttacctttatagttttctgctaagaagaaaacattttagcagcacagwccaaactccagtaggtaaaagctctaagaagcctggatgatgaaggcccagagaagtaaataatgaagtgggttaaagcttgaatctctactcccctccccgccactcgctgaataatctcttttgggtgaattcgttaacctttctgagctccagattcctcttccatatgcagaagaactcctagggttctttatgaaaactaaatgagatgctatttgtgtagcaggatgtaaaaatgactatggtctcagttcaggtattgccaaggacaaaagacatgtttcaaagtgagctgtgacactgaggccatcatgcagggctgacaaaagaagtggcacgaaactggtttccctcttaactgaccatcttcagcccacaaagaaagctgggtgagaagaacagttggtggtgtagaggaggaattttggagaaagcaataggagcactccaagtcccaattgcccactacccaccctccaagattggcctccaagatgctgtgtccctggaggttgactgtcactgagggctgatgtctgaatcatgtctgtgaatcccaaaatacaagagagatggagtgatcagctggagtggagagaacgtggtagctttggatttcctgggataatgaaacgagcattttccataagccagagatgtactgtggccaacctctgggatgtgtaggtccttctgacaaggaccaccaggaggaatggaaatttaccttcagagaaaagctgacagcacttgttgtggcctcaactatcctcccaaaatttatatgatgaagccctaaccccca

SEQ ID NO: 76694 - DNA, 1069 bp, Homo sapiens
ttcacttgtacttcattattctgctgattaaattatagtggggcagggatggaggactttcaagcagtcaaagactttcctgggtacacagagctcatctcacaacatacttaagaaagctcctgatgcacctgtcactcctgttgccagcccctgcatcacaagtggtgcaagcagcgatgaagtgtttgtcgttgttgttgttgttgttgtttacctttatagttttctgctaagaagaaaacattttagcagcacagaccaaactccagtaggtaaaagctctaagaagcctggatgatgaaggcccagagaagtaaataatgaagtgggttaaagcttgaatctctactcccctccccgccactcgctgaataatctcttttgggtgaattcgttaacctttctgagctccagattcctcttccatatgyagaagaactcctagggttctttatgaaaactaaatgagatgctatttgtgtagcaggatgtaaaaatgactatggtctcagttcaggtattgccaaggacaaaagacatgtttcaaagtgagctgtgacactgaggccatcatgcagggctgacaaaagaagtggcacgaaactggtttccctcttaactgaccatcttcagcccacaaagaaagctgggtgagaagaacagttggtggtgtagaggaggaattttggagaaagcaataggagcactccaagtcccaattgcccactacccaccctccaagattggcctccaagatgctgtgtccctggaggttgactgtcactgagggctgatgtctgaatcatgtctgtgaatcccaaaatacaagagagatggagtgatcagctggagtggagagaacgtggtagctttggatttcctgggataatgaaacgagcattttccataagccagagatgtactgtggccaacctctgggatgtgtaggtccttctgacaaggaccaccaggaggaatggaaatttaccttcagagaaaagctgacagcacttgttgtggcctcaactatcctcccaaaatttatatgatgaagccctaaccccca

SEQ ID NO: 76695 - DNA, 1069 bp, Homo sapiens
ttcacttgtacttcattattctgctgattaaattatagtggggcagggatggaggactttcaagcagtcaaagactttcctgggtacacagagctcatctcacaacatacttaagaaagctcctgatgcacctgtcactcctgttgccagcccctgcatcacaagtggtgcaagcagcgatgaagtgtttgtcgttgttgttgttgttgttgtttacctttatagttttctgctaagaagaaaacattttagcagcacagaccaaactccagtaggtaaaagctctaagaagcctggatgatgaaggcccagagaagtaaataatgaagtgggttaaagcttgaatctctactcccctccccgccactcgctgaataatctcttttgggtgaattcgttaacctttctgagctccagattcctcttccatatgcagaagaactcctagggttctttatgaaaactaaatgagatgctatttgtgtagcaggatgtaaaaatgactatggtctcagttcaggtattgccaaggacaaaagacatgtttcaaagtgagctgtgacactgaggccatcatgcagggctgacaaaagaagtggcacgaaactggtttccctcttaactgaccatcttcagcccacaaagaargctgggtgagaagaacagttggtggtgtagaggaggaattttggagaaagcaataggagcactccaagtcccaattgcccactacccaccctccaagattggcctccaagatgctgtgtccctggaggttgactgtcactgagggctgatgtctgaatcatgtctgtgaatcccaaaatacaagagagatggagtgatcagctggagtggagagaacgtggtagctttggatttcctgggataatgaaacgagcattttccataagccagagatgtactgtggccaacctctgggatgtgtaggtccttctgacaaggaccaccaggaggaatggaaatttaccttcagagaaaagctgacagcacttgttgtggcctcaactatcctcccaaaatttatatgatgaagccctaaccccca

SEQ ID NO: 76696 - DNA, 653 bp, Homo sapiens
tccttgagtttagtgactcataatgggcatagtcctgtggggtatcatgttttgatgccagagtgtctcccatatctgccccatactgatctcatctccttatacctgcttgagggactcagctgaagaactcctgatgctgtcatcctggcaaactatagttcccaccctatatccttactagcagactggtgccagtggggccttttgtgggtctgaatgttggttgatcctaagaagagtccaagagggtatttattacattagcataattctaattagtttttaattttatttttgaagtgataaagtggtatattaactttatagtagttaattcagtcagttttttcaatgcttgggaagaacattagactatgagttagaacatatggctgttagtccagtttttcaataatggattatgttatcttgggcaagtcacttaatctgtttgaaactcagttttcttaaatgttagytaagaactttgactgatatcatttctgatgtttcttccaactctaaatcttatgattctctgattctcttttcgtaagttaatttttaatcctcttttatagaagcattccagatttcttttagcctgaaagataatcagatagctgaaagcttgtgatgctacagtgtac

SEQ ID NO: 76697 - DNA, 697 bp, Homo sapiens
aggatgttttaaaggaaggttcattttatttttcctgattgtagactgtcctgtaatttagagaaaaaacagtggagaagacttttgttttcgtcgttgcatgagtacctgatggcaagagccttgggcatccccattgtgctcgttcgtcacctcattcagcattattattattattatttttatttcgttttttttttttttgttttttgttgttgttgtttgttttttgagatggaggcttgctctgtcacccaggctggagtgcagtggcacaatttcggttcactacaacctctgcctcccaggttcaagcgattctcctgccgcagcctcccaagtagctgggactacaggtacctgccaccacgcctggctaatttttgtatttttagtagagatggggtttcaccatctatagaacttctgacctcaggtgatccacccacttcagcctcccaaagtgctgggattacaggtgtgagccaccgcacccagcctcagcattattcttttccagtaattctcaataggggggaagtgtgttccctcaatcagggggaatttggaaatttctgtgctgtttgagtggtttgtcacaatgacagaaggagtgctacyggcatttagagttggggtgggtggtgtgggatcagttctataatgtcccaggaagtcttttttttttaaaggcttt

SEQ ID NO: 76698 - DNA, 1325 bp, Homo sapiens
gggggtatgcaaaggtgagccagacagatattctacctgtggggaacatctagaccagaagagaagatgagacgatgtgagtcagtttccaggtcaacaggtctcctctgggaagggtagagaatgctctgggagagtccagaggtgggaagaggaggttctgtggcagccatgctgtgtggggcctgtagccgggacagccccaagacaccagcagggagcactgggtggccacgtcctcaccaggggtgctcggggaccaggtcacctcctaatgtcctggttagaagcagagatgggtttggtttggtctggcaccaaggaacaggcatgctcggatgacctgaggttgttttttctgtctaggctggtgtgggagacagtgtaggaggaaggatgaaagccagcggaaagacagtgctgactggagagaaagaagagctcagggtaggagggaggcagcggagggattccgcaggccgagcgtcagatgggctgtggccgggggtgggcgggggctgaaacgcacccctgcctgtcaccacggacgacaaattgagcagctcagcagtcagaggaggctggtgggggaagcaaaggcaaaagcagccagtgtcgtaggaaatcacattgcctggggccccctattcttgcaggctgaagcctcactgttgctacaaactccttcagccccgtcagaggccattgcccttaggtactagggtgtaggactaagccagaccccagtctccagcttgcttggggccccagttctcccactcccgtgtgcatgcgccgcatgcttgctgggtgcctgtgcattcttcaggacgtgagcagccccttctctgccctctgtagcagacacggtggacctgaattggtgcgtcatttccgacatggaagtcatcgagctgaacaaatgcacctcgggccaatcctttgaagtcatcctgaagccaccctcctttgatggggttcccgagttcaacgcctccctgccaaggcggcgagacccatccctggaagagatccagaagaaactagaagcggctgaggagcgaaggaaggtaaatgctgacccttccttctttcctccctctcagcataaaggggagggaggtggagaagacaggtggtggacctgagctgggataagctcatcaccaatctgcaatatttagggagcatctcccgagtgtgcrgtggagaatgagacaccattgagggaaacaaagaactaaacacccttggcctcttgcagctcacagtttggttagggggataggacattgctatgttcctccaagaggtggccctatatg

SEQ ID NO: 76699 - DNA, 847 bp, Homo sapiens
tcttacctctgtgagacttttttttaccccaagctgttagaccagtgcctggcacatagtataagatcatttagtgtttgtgaatgaatgaatgaatgatggcaatgagcaaaagggccatgaaggtatttaggaaaaggctgggaaaaaaaatcaaagaatgtggaaggctctgaaagtggtggggggaatttaggaagtgtccttgtttcctgctaatggtctggggacaggcccagggaggtgagtgttctgagtgtgcagcttttcagccaygatggtgaaaataaaccctggcacactcactgtgaagggcctccttctgcctttatgcttccccagtaccaggaagcggagctcctgaaacacctagcagagaaacgggaacatgagagagaggtgatccaaaaggccattgaggaaaacaacaacttcatcaagatggctaaggaaaaactggcccagaagatggaatccaacaaggagaacagggaggcccacctcgccgccatgttggaacggctgcaagagaaggtgaggggtccctggctagagaggagtttcctgggacatgctgttttccttctgcagcaagtatgcggggacctgctgatcatctcagggaggaagcagcctcaggcaaaaatcaggatctttttcttaggcaggatctttagagagttccgaaggatgatcagggaagtcagaggcaagaaataggaaccagactcagggtttccttgggggatattctgcacagttacacaattaaaatccttcattgccttagggagcatatatgtctgattttctagaagaagcctgtctaatacaaaggagtagagat

SEQ ID NO: 76700 - DNA, 712 bp, Homo sapiens
tgccaatmctttcagctccagttcccggcacatccccttggtgccctaaactgtcttttaagcagtcattgtcactttcactttgcaagtgctgatccctccccatctggaagactcttcactcccttcccctaattccttccttgtctttctttgcctgcctgatctcccctagttatccttcaaaagtcagttcagtcagacatcattcctctgtgaaacttcctctgcctcccctcctcccaccccactgtaaaacaaggcctttcctccactccactcacataaaacatatgcttttattatatgacttatcacattattttaaaactctatttaattatcttattgattgcaagatatttgaaaacaagaatttttccttgtttatatttgcctcctcagatccttgcacaattcctttttttttttaagatagggtcttgctctgctgcccaggctgaagtgcagtggcgcaatcctggctcacagcagcctcaaactcctgggctcaagagatcctcctgcctcagcctccagagtagctggggatacaggcacataacacgatgctcagctggtttttaaaaatttttttgtagagagattatcttgctatgttgcccaggctggtctcaaactcttggcctcaagcaatcttcctgccatgtcctcccaaagtgctaggattggaggtatgagccacagtgcc

SEQ ID NO: 76701 - DNA, 740 bp, Homo sapiens
gtctctacttaaaacataaaaatcagccaggcattgagctggatgcctgtaatccagctggtatcctgggaggctgaggcaggagaatcacttgaacccagaaggcggaggttgcagtgagccaagatcatgccactgcactccagcctgagtgacagagcgaaactctgtctcaaaaaaagaaaaaaaaaaaaaaaaaaaaaaaaaagtacatggaaaatttacctaaagaagagaagtaatgagagaaacttgacagatcttttcaaatatttgaaaccccatcattaggaagaggaagcagattttgagaacaatgatagagtaactcactactaggtactgagtgtttgctgtgtgccaggcattgtgttacgagtttttgaatcttcatttcacagatagataactaagacttcaaaagctttcgtcactttacctagtcacagaggtcactagtagcagatctggtattcgtaaatccaggctgcactggctctaaagctcatgtcttaatagccacaccagcacttcccaaactttcccatcaaggtgaatttaacggtaaaaaatagtgaaagcagatccttagggtaggtgaggtatagatgaagctagctgtctataagcaagggaattcctagaagccttcattttgcttttaatctatgtgcatttttacagtygctatggaaaacaacgtgacagttcctcaaaatattaaaagtagaattaccata

SEQ ID NO: 76702 - DNA, 743 bp, Homo sapiens
attctgacagggcccttggagaaggcccaggtctgctggacccctgacacctgtggtaggaacgctccctggccccgggaccctgtggccagcgggagggcactggggcaggggaccagccagaggtaggtgtcctgggaagcctttctgaccatgagcagagtgggcaggtgtctgcgggcacccgactgcgtgggaaagggccttctccacactggggacgggcccaggagagggcagggttgccagaggtggcctcccaagacctggacctgagtcctggccctcctctcacctcagtcccagcagggagcacctccctccatgttgcaggcagaaacggagggaaggaggaaggagctggaagccccttcactgggttgcaggcagtgtgagccctcgcccagggcccacctccggcagctggctctgacctcacggcctaccccccactcactgacctacccggggcttsgtaggaccaagatgcctcgggcgtctccccgctgcacctggccgcccgttttggacacccagtgctggtggagtggctgctccacgagggccactcggccacgctagagacccgggagggagcccggccgctgcaccacgctgccgtcagtggggacctgacctgcctcaagctcctgacagccgcgcatggcaggtaaggagcccaaagtcccgcctgggggggcagcctggggcgagctggccaaggggaggctgcaccatggagg

SEQ ID NO: 76703 - DNA, 770 bp, Homo sapiens
acaagccccgacagcttgcttgtggaatcgggttctcattcccgggtgttcccatcctggactgcttggcaaaggcctttgggattcgcttctgtggcttttctccagagcgtccacaccaccctcagccttggctggccacagtctctctcagacccacacggcttttaaagaagtttccaccattgaaaactgggagacttgggccgagcacagtggctcatgcctgtaatcccagcatcttgggaggctggggctggaggattgcttgagcccaggaattcaagactggcctgggcaatgtagcgagacctccatctctacaaaaaaatttatttaaaaattagccaggcatggtggtgactgcctgtagtcccagcaactcaggaggctgaggtgggaggatcacttgagtctgggaggcggaggttgcagtaagctgggattgtgccactgcactccagcctgggcgatagagcaagaccatgtctcaaaaaaaagaaraaaaccaggaggcttcatgttaatatgcacacacacacgcacacacgcacacacaaatgggaaggtcctgtacccccggcctagttcccgcctggcattgaccagcagcagccgagaggtggctgcccctggccagaccatgccccctccagttgcccccgacccactggctgcatcatggcctgctcccagccaccgcgctggacaccacctgttccaaccctggatgcagtcaaggacacctggcagagtctggtgaaagcacg

SEQ ID NO: 76704 - DNA, 634 bp, Homo sapiens
gggtgggaaggagacagccctcagagaagggcttgtggggagcctgggggtgctgggagaggagctggtgtgaaacaaccagctggctgggaagctggtggccccaggcygcaccgcaggcaagagcagctctcagccccaggaggccaacagtggtcactggtgtgggagccagttacatttccaaaagaagctgcacttgaggattactgtgaagctgactttagggctggaggggcacagggccagagttctgggttagtggcttctgactctggtcctagcaacgcttttactccaggtcagcctcctgcaccttgcctcctgggcttccccttgaccccctcctagggcatctgggaaggtgtgatgagtggacttgagaggtgaaagttgttcctttgaagcagtccatggctgatgctccctgaatggcatgagagctcattggcatggcctctgggtgctactggaaaccagggctttcaggatggcccgttatccatccgtgtcctggtgggtacatcctacatcagcctgtctgaggacattaaaataatcccaggaatgatatttccattgctcaagacttcttctgtggcactggctcccccactgccccaatagctcggct

SEQ ID NO: 76705 - DNA, 889 bp, Homo sapiens
gcagtctagcagattaagcaggaatacatgtatcagattgttgattgtggcgtcacttatcatatgaagaactgggaaaagcttgaacccatcagtaaggatctggtcgaatgagtggagatgcttcccatgtgtggctgttggagaggatgaattagacttgggtgtgttggcctggagcatgccttgatgggttatgtgaacactatatgtggagtattgtgtagagtatgactctgtcttctacaaattaaaatgcatgagtccatgtgcatgagcattaaggaaagtggaaaggatacactaaactcatactgtggttggggggtgtggcggaacctgtccccccttttttctgataatacctctgtggtgtttggaaaacacctggatttattttatagttgaaaaaattgaggtataaaaaacaatttagccaaaatattttaacatccttttttaactttattggatacagcaacctttaacctgaatatgatcaacccaagggtatttttctcagcatagtatataacttccagtagacttagctccagaatgtagataactgaggaaaaaaaaaagttctagatgagattaactatgattaatggacatttttagtcttgtattcttattagggttctaatatttttaagattaggggaggggcctcttccagatttttaggtcagggtcacactttgtccaatgattgcagcccccaatgctttgaatttcagtttattcaaaatagaatgtaagggcctggagcagtgggtcacatctktaatcccagcactttgggatgctgaggcaggaagattgcttgagtacagtagttcgtgaccaacctgggcaacatagtgagaccccgtctctacaaaaa

SEQ ID NO: 76706 - DNA, 820 bp, Homo sapiens
tgtggtttctctagtgggcactgcgcttgggcacaaagtcatctgacagagcctgtcggggggaagccaggggtgcagcagcccccaggtcaccattgtgtgatgatgcgttagcccagaaatccagcttgaggctgygtctccggaagcccctacaaatgtaatgggtcccccatctgcagcttcccattgctgccaggaagaggctgtggtggtcctgacttccctaaagaagaactatggattgtccagaacaatctggaaaggggttaaatgtacttgggcccttggggctgcagcccagagacttggtccgtgtagttggagagggggccgaggcaggggctgacaccttctcgcctcagaggcctggacacacccaagtcagggtcctgagcccattgcaggccccgtggagccactgtgtccccagagattcctaggagcctccagggccgagggccgggacccagaggcggggcgctcagctctgtgggtgtcaacacagccaaacatgtagacctactgggcaccctttacttcagacacactgtggtggcggctgggggtctgcccttctgtgagagttgggggaactgtctcccaggccactcggggctcctgtgagaagctcagtggcgtgtatcctcagccctcgctccacagatgaagttcctgccatctggacagatctgagcagcctcagggccagcctcctttctctgctggccatacccagccctgacctagcctggtgtgggcctttccctgtgccctgtactccatcctcccagctccaggcacctggcaccctcacact

SEQ ID NO: 76707 - DNA, 820 bp, Homo sapiens
tgtggtttctctagtgggcactgcgcttgggcacaaagtcatctgacagagcctgtcggggggaagccaggggtgcagcagcccccaggtcaccattgtgtgatgatgcgttagcccagaaatccagcttgaggctgtgtctccggaagcccctacaaatgtaatgggtcccccatctgcagcttcccattgctgccaggaagaggctgtggtggtcctgacttccctaaagaagaactatggattgtccagaacaatctggaaaggggttaaatgtacttgggcccttggggctgcagcccagagacttggtccgtgtagttggagagggggccgaggcaggggctgacaccttctcgcctcagaggcctggacacacccaagtcagggtcctgagcccattgcaggccccgtggagccactgtgtccccagagattcctaggagccwccagggccgagggccgggacccagaggcggggcgctcagctctgtgggtgtcaacacagccaaacatgtagacctactgggcaccctttacttcagacacactgtggtggcggctgggggtctgcccttctgtgagagttgggggaactgtctcccaggccactcggggctcctgtgagaagctcagtggcgtgtatcctcagccctcgctccacagatgaagttcctgccatctggacagatctgagcagcctcagggccagcctcctttctctgctggccatacccagccctgacctagcctggtgtgggcctttccctgtgccctgtactccatcctcccagctccaggcacctggcaccctcacact

SEQ ID NO: 76708 - DNA, 820 bp, Homo sapiens
tgtggtttctctagtgggcactgcgcttgggcacaaagtcatctgacagagcctgtcggggggaagccaggggtgcagcagcccccaggtcaccattgtgtgatgatgcgttagcccagaaatccagcttgaggctgtgtctccggaagcccctacaaatgtaatgggtcccccatctgcagcttcccattgctgccaggaagaggctgtggtggtcctgacttccctaaagaagaactatggattgtccagaacaatctggaaaggggttaaatgtacttgggcccttggggctgcagcccagagacttggtccgtgtagttggagagggggccgaggcaggggctgacaccttctcgcctcagaggcctggacacacccaagtcagggtcctgagcccattgcaggccccgtggagccactgtgtccccagagattcctaggagcctmcagggccgagggccgggacccagaggcggggcgctcagctctgtgggtgtcaacacagccaaacatgtagacctactgggcaccctttacttcagacacactgtggtggcggctgggggtctgcccttctgtgagagttgggggaactgtctcccaggccactcggggctcctgtgagaagctcagtggcgtgtatcctcagccctcgctccacagatgaagttcctgccatctggacagatctgagcagcctcagggccagcctcctttctctgctggccatacccagccctgacctagcctggtgtgggcctttccctgtgccctgtactccatcctcccagctccaggcacctggcaccctcacact

SEQ ID NO: 76709 - DNA, 1006 bp, Homo sapiens
atgtatacatgttgaatctaagcccttatagagtctctactgtaactatttaaagatgatagaactaaggcttggagtagtaaactatatgtttaagaaaggacacactttaaatggtaggtcaaatatgatttaaacatcactacaaataactacttaagtaatttgaaagataaataaaaatttctgagaagacagttttgtacamaacagcatgtacaagattagacacatacaaaaatttcaatacaaagtaatacgtattggtggataaatgtgtagcagtggttacaaatgtggcaaactcacaatcttaagtaattacattaccttccacctcccttttctcatgcctcaatttttgttgtttgcataacaatatactatctagataaacgaaccagagatggagaagagagagaggtatatgattatttactattatgctaataaataatgaaagtgtatttttttttgtctagggagagaaacaatataaatagctgaacttttgtggtgaagtgacttttactacttcaccatttaaaacccacgtatgtatttatttttaaaataaaaataaatgaaataaatttataagcaaattcagtaatataattgcaaattttggtgaaataaattttaatataatattaaataaaatactgttttaaaaatagacagaacatcttaggaattaaagcaagtattatgaaagaaatttcaaagggtattacagcttacctcattcaactcattaagatacagataattgcaatgctatttgcacatttccagagcattaaaaagatgctaaactttacatttttaaatgccaccgtgactcagaagccaaaagttgatttagaaaatttaaaaatagcacacttatacacacaaacacgtgcaccatcagatcagtctcaataaatctcaatcatgattatcaatgaacaaaaggtagaactctgacaatattcaaagtgtatattaagataaattatgc

SEQ ID NO: 76710 - DNA, 1006 bp, Homo sapiens
atgtatacatgttgaatctaagcccttatagagtctctactgtaactatttaaagatgatagaactaaggcttggagtagtaaactatatgtttaagaaaggacacactttaaatggtaggtcaaatatgatttaaacatcactacaaataactacttaagtaatttgaaagataaataaaaatttctgagaagacagttttgtacaaaacagcatgtacaagattagacacatacaaaaatttcaatacaaagtaatacgtattggtggataaatgtgtarcagtggttacaaatgtggcaaactcacaatcttaagtaattacattaccttccacctcccttttctcatgcctcaatttttgttgtttgcataacaatatactatctagataaacgaaccagagatggagaagagagagaggtatatgattatttactattatgctaataaataatgaaagtgtatttttttttgtctagggagagaaacaatataaatagctgaacttttgtggtgaagtgacttttactacttcaccatttaaaacccacgtatgtatttatttttaaaataaaaataaatgaaataaatttataagcaaattcagtaatataattgcaaattttggtgaaataaattttaatataatattaaataaaatactgttttaaaaatagacagaacatcttaggaattaaagcaagtattatgaaagaaatttcaaagggtattacagcttacctcattcaactcattaagatacagataattgcaatgctatttgcacatttccagagcattaaaaagatgctaaactttacatttttaaatgccaccgtgactcagaagccaaaagttgatttagaaaatttaaaaatagcacacttatacacacaaacacgtgcaccatcagatcagtctcaataaatctcaatcatgattatcaatgaacaaaaggtagaactctgacaatattcaaagtgtatattaagataaattatgc

SEQ ID NO: 76711 - DNA, 1006 bp, Homo sapiens
atgtatacatgttgaatctaagcccttatagagtctctactgtaactatttaaagatgatagaactaaggcttggagtagtaaactatatgtttaagaaaggacacactttaaatggtaggtcaaatatgatttaaacatcactacaaataactacttaagtaatttgaaagataaataaaaatttctgagaagacagttttgtacaaaacagcatgtacaagattagacacatacaaaaatttcaatacaaagtaatacgtattggtggataaatgtgtagcagtggttacaaatgtggcaaactcacaatctyaagtaattacattaccttccacctcccttttctcatgcctcaatttttgttgtttgcataacaatatactatctagataaacgaaccagagatggagaagagagagaggtatatgattatttactattatgctaataaataatgaaagtgtatttttttttgtctagggagagaaacaatataaatagctgaacttttgtggtgaagtgacttttactacttcaccatttaaaacccacgtatgtatttatttttaaaataaaaataaatgaaataaatttataagcaaattcagtaatataattgcaaattttggtgaaataaattttaatataatattaaataaaatactgttttaaaaatagacagaacatcttaggaattaaagcaagtattatgaaagaaatttcaaagggtattacagcttacctcattcaactcattaagatacagataattgcaatgctatttgcacatttccagagcattaaaaagatgctaaactttacatttttaaatgccaccgtgactcagaagccaaaagttgatttagaaaatttaaaaatagcacacttatacacacaaacacgtgcaccatcagatcagtctcaataaatctcaatcatgattatcaatgaacaaaaggtagaactctgacaatattcaaagtgtatattaagataaattatgc

SEQ ID NO: 76712 - DNA, 1006 bp, Homo sapiens
atgtatacatgttgaatctaagcccttatagagtctctactgtaactatttaaagatgatagaactaaggcttggagtagtaaactatatgtttaagaaaggacacactttaaatggtaggtcaaatatgatttaaacatcactacaaataactacttaagtaatttgaaagataaataaaaatttctgagaagacagttttgtacaaaacagcatgtacaagattagacacatacaaaaatttcaatacaaagtaatacgtattggtggataaatgtgtagcagtggttacaaatgtggcaaactcacaatcttaagtaattacattaccttccacctcccttttctcatgcctcaatttttgttgtttgcrtaacaatatactatctagataaacgaaccagagatggagaagagagagaggtatatgattatttactattatgctaataaataatgaaagtgtatttttttttgtctagggagagaaacaatataaatagctgaacttttgtggtgaagtgacttttactacttcaccatttaaaacccacgtatgtatttatttttaaaataaaaataaatgaaataaatttataagcaaattcagtaatataattgcaaattttggtgaaataaattttaatataatattaaataaaatactgttttaaaaatagacagaacatcttaggaattaaagcaagtattatgaaagaaatttcaaagggtattacagcttacctcattcaactcattaagatacagataattgcaatgctatttgcacatttccagagcattaaaaagatgctaaactttacatttttaaatgccaccgtgactcagaagccaaaagttgatttagaaaatttaaaaatagcacacttatacacacaaacacgtgcaccatcagatcagtctcaataaatctcaatcatgattatcaatgaacaaaaggtagaactctgacaatattcaaagtgtatattaagataaattatgc

SEQ ID NO: 76713 - DNA, 1368 bp, Homo sapiens
tcagtgcccagtatcaacctggcaaagctcaagctttctccttgttggtctctattgtttttcatccactccaggtggggagggtcacctatgaatagcgattcacaatgggtggtctctgggcaaggcaaagagtggatagtcaccttgagacaggcttctcgagctttcttcagggctcactgaatgtgatcagacaaataaggagggttctctgagttaggcctgctggacttctgtcagcaattccttctgagatctcctccacatccacaaacacataaaagatgagacagacagaaggccttccaaatcagatccctagccaagaactccaaggttatcctttccaaaccatcttcctattctccatctgagaaatctctccaaaatcttcctgattgagaagtctcccaaaccaagactcttcctactagttaggaagaggcaaccaasactccctaggagccaaactgagacagataccccatggtggagctacagaaagacaccccaccatggagatacagaaccaggcaggagaagaaaggaggtattcacagtgcctagatactcaccaacccagacaccccacaatggggctacagacagacacatgtgacagggctacagttatgggacatctcccaggactatttctctattgcaattaaatccacacacattgggtcaacagcgccccacaagtaaagagactaccagagtcggcacccagtacaagagaactaggcaactgcttgggctggcctctggatccatcgccggaagggggctactgaaccaagggcagctagccacaaggccaacaccaaataagcccacaaatttgtaaactcccaatgggttcaccttgcccgctgcctagacagagccaatttatcaagacggagtaattgcaataaagtgtaattcatgcagagccagctgtgtgggagaccagagttatcattactcaaatcactctcccctttgtccaatttttgttgttgagttgtaggtgtgcttcttgtagtctgaatataagtcccttgtccagatatataatatgcaaatatgtctcccattctgtgggttggttttcactttcttgaaacgagttctttgaaacacaaaagtttctaattttgatggagtctcatctttttcttttgttgcttgtgcttttgtgtcatttctaagaaggtattgcttgatacaagctcacaaaagtttattcctgtgtgttttcttataagagttttatggttttgactcttacttttagcctatgatctattctgaattaattttttatttggtgtaaggtaatttttgtcccttattctaataatacattgattaattttt

SEQ ID NO: 76714 - DNA, 766 bp, Homo sapiens
gcctgctgcagccctccccacctccaagagttaccagagagactctataagctggaaacagtaaactaaagctcagagatgtatggcagactcacgtccctttagacacaacagtaaacacccccccgccaaaaaaaaacataactcattttctcagccacctttgcagctaggggtgaatatgtgatacraatctggctaatgggaagcaagaggaaggtaataggtgagaatgctgggtaagttccataaaagggagccgactcagccagtatgttcctttcagccctggcccattcccttcctcctgctagaaatgcgaatgagagggttggaggttggcagccatctcatgcccatgagacaagcatgcactaacgatcatggaagacagcagacagaagtagcctgcatctctgatgacattgtgaagctgctctcctagtcccagactgactacatccagacttcacattatgccagaaaaacaaaacctttcattggaataagtcaatattttcttaacatctagtacttagagttgaaagtaagtcctaagtgatacaggatagttattattgaataatcaactgcccagtaagtgatggaggaaggaaggactttttttctcctttcttcatcagtgctattctaggttctgaataggaatatttggtactttgtcagcattcagtatttacctaccaattctaagcacaaagaagacaacagaaattgtctgcataacatctaaattctatttcct

SEQ ID NO: 76715 - DNA, 1252 bp, Homo sapiens
aaaaatggtaactctcatctgtcattgttatagttgcaacagatttaaagacaacttcattgaaaatagaaaagggtggtggtggaggcggctgcgaaggagaattggtttttcttctaaaaagccctgactcaggccacacattgagagtgctgcaatctttttggttctacaacttatatcccagaatccccaacccactatgaagatacactcccttctcatctgaaacattgtgtgctaacaatagcaacactgggaacttcggatatttccttgcaaatggatttttcctttggatatgactatattaaaatattgctcctggttctggttcttaattttaggtgagttcagaaaaaaagatgcatcagattgaaggaggacattgaaatcaattatatactgattagctcggaggaaaggtttccttgttctttttcttttttttccctctttctgtattggctaatccccatgcacactgcaattgggtgcagtcaagctgttccaggcttttgataactgcctcaactgtcagaagtcactgggagtgccagcagtcagccacagaactaccactgagctttatggaactttgcaaatcttactggaatccatcgcatttcatcttgtcagtccaaccagctcactgtttgttgtatgtgatgttttagagataatctctctctgggcacagcacagtgtttgttttgtctgctgagcattgactgccttatcttctgttaccagtattctgattctgtggggaagaaaataccactctcagtctacatgattggggtgggactgatcccaatcctgcttccagaagggggcaggtaacccatggatgggcgattacagtgctttatcccctggtcccaaggcttggtttaggatggacatatgacccaatccasgccagacatagccattgagacttggttctaggacttctatttgaggagtgagaaaaggcctgttatgctccattggggttggtgctacaggtagctttcttatgatcacaggggagtgcctgtccatgaatggagaccacatagaggataggaggagagagagagagagagagagagacagtgagagagacacacacacacacacacacacacacacacacacacacacacagagagtcagagagagagacaggagtttcatggtcaatacattttttgtcattcttccttttgtttaattaagtttaagctgggtttttgtaatttgc

SEQ ID NO: 76716 - DNA, 516 bp, Homo sapiens
  misc_feature (1)...(516): n = A,T,C or G
tcccacttcaccttcccaagtagctgggaccacatggactaccaagcccggctggttttttttctttttatttgtaaagacaggrtctcactatgttacctaggttcatcttgaactcctgggctcaaatccttctgcctcagcctcccaaagtgctgagattacaggtgtgagccaccgtgccttgcgggtctcttattttcaaaagttcatttgcccagccaccaggctctattgctttgaaataagtaatggccatcaaataaatgtaacagaggcattcctcacagaacagaagaatctaaaatagagcaaggaatgggctatgtagctgctgtagatacagaagctaataaagaaggagaatattttcagaaggaaggaaaatcccagggtggaggaaataaacaatnnnnnnnnnnnnnnnnnnnnnnnnnnnnnnnnnnnnnnnnnnnnnnnnnnnnnnnnnnnnnnnnnnnnnnnnnnnnnnnnnnnnnnnnnnnnnnnnnnnntttt

SEQ ID NO: 76717 - DNA, 516 bp, Homo sapiens
  misc_feature (1)...(516): n = A,T,C or G
tcccacttcaccttcccaagtagctgggaccacatggactaccaagcccggctggttttttttctttttatttgtaaagacaggatctcactatgttacctaggttcatcttgaactcctgggctcaaatccttctgcctcagcctcccaaagtgctgagattacaggtgtgagccaccgtgccttgcgggtctcttattttcaaaagttcatttgcccagccaccaggctctattgctttgaaataagtaatggccatcaaataaatgtaacagaggcattcctcacagaacagaagaatctaaaatagagcaaggaatgggctatgtagctgctgtagatacagaagctaataaagaaggagaatattttcagaaggaaggaaaatcccagggtggaggaaataaacaatnnnnnnnnnnnnnnnnnnnnnnnnnnnnnnnnnnnnnnnnnnnnnnnnnnnnnnnnnnnnnnnnnnnnnnnnnnnnnnnnnnnnnnnnnnnnnnnnnnnnkttt

SEQ ID NO: 76718 - DNA, 1167 bp, Homo sapiens
tcctagccaatgagatgtctatgtggccatgtgacacagtcctacccaatgaaatgtctaggtggccatgtgacacagtcctagccaatgaaatgtctaggtggccatgtgacacagtcctagccaatgagacctgatgtcatagtggagtcacagcctaggactggctaccttccaaaacttcactttatgtgagaaaaattaaacccctaagtttagcaaccagtggccaggtttctgtaaccctcagcaggaagccatcataactgataccctggctaggagggtgtcccagcagccaagcattctgatcaggcaggaagtcgtttggactgcagcactctcctcacacagtctttctattcaggcttcttggagctctgcttttttcactggaatttgtggctgtgctgctgttgccagaccttcctcagactctgtaatttctgttcccttcaatctggcataatggataataagttttcattagtggtgcccaaaatgtcaaygacttacacattctcataaaatctccaaatgaatggagaaagaacggtaaaccatgcctcgtctagactgtaatgaaggggaagctgctgaaaataagatgccgtccaattactttgtatttaccaagactcactttttaacctcagtgtgacatacttttgaaaatggctgtcatctcatgatgcttaatccgattttggtatgttgagaataaagcataaatcttttggcctcactaaattctgataaatacttttttgttacattttcttaattattgtaagtagctgctaagaagacagagctggcccttcaactatcagaaaaatctctttattagccagcttcctgaccatatttggctgagtgaggtgaccaatcaggggtccccatttgcctgggaatgagggtttgtaagtatgcaggactctagtgttaaaaccaggaaattccagggtgggttggtcaccctaccatcccaagcctctggagcaaaaaccacggagcaagcagaaagggcccattgctcccctaaactacgattccccctcaggcccttgtttccaatgtctgtagcagttatttaatgagtatttttaacaagcctgggcctctgtttcatcattcatgtgccagccacttgggatagaatggtga

SEQ ID NO: 76719 - DNA, 670 bp, Homo sapiens
ggttcttgtaactgctcccactcttgtcccttcagccttgcctacacctttgtaaagattctctttctttaattatcccctatttccctacttaagtgtgtcatttgcttcctgctaagagactgaccgatatatgaactccctacagtattaaaacatagaccaatgctgaatgcagcagaatgactcagagttcaagaaaaatataatgtatctctctcacacatgccccttataaagcaaagaatcttctaatgtatttttgatggatttccatccaaaatggaaatgttgcatttgaagtggcaagagttawctggaatatttgtttatgtgaaacattttattctaaggcaaggctgagtaaatgatttcacttacacactttaaaggcctcctatgtttatcctcaatagcaggtctcacaattgaaattatttgtattttttatgcccatcttccttcttggactctaagcttcatgaagtcagtccacagaaatggttcatgaagaaatctgtcttactgcctgacatatcctaagacctagaacaatacttgggcatagaatttcataaatgaatattgttgaattatggaaccgaaagaaaaaaggctaagaggaaagaggaatggggatggaatttagaaccagaaaatgagaatgggg

SEQ ID NO: 76720 - DNA, 631 bp, Homo sapiens
ggagggagttcccagactccttgctctttccgggtgaggcaacaccccacccggcttcagttcaccctccatgggtggcacccactgtctaaccagcctcaacgagattaactgggtacctcaattggaggtgyagaaatcacccgccttctgcattggtcttactgggagctgcagcccagagctgtttttatttggctatcttgcctgggaataatcacagtggtttttgtggttgttgttgttgttattattgttgttgttttttctaggcttctaggaaaaatatccaaagccagggaaggcttgactacattacagttttggttagggctaagtaaatatagcagtgactcctgtgggtttctagtatgagtagttggtataagggctattaaataatcatgaacttgaaatgatgctgttctggaatttcagcctcatcaaggtaggtgttgttattgccacattgcagatatattcagtcttataaaggttaattgacttgcctaaggtcacagagcaagagagtggtaaaattaagaattgaattccaggtctctgtggctccaaggtctatgttctctatatcggtcaatagattcggtaggaatgatgactgataaacaga

SEQ ID NO: 76721 - DNA, 929 bp, Homo sapiens
tgcatttcacaatctatcctgttgtctatttagtggattttgtcatctggaaagtatcccactgcattaagaaaatctaatgatttctaatgactggccgggagcagtggctcacacctgtaatcccagcagtttgggaggccgaggcgggtggatcatgaggtcaggagttcaagaccagcctggccaagatggtgaaaccccgtctctactaaaaatacaaaaattagctgggygtggtggggggcacctgtaatcccagctactcaggaggctgaggccagagaatcgcttgaacccagaaggcagaggttgtagtgagcatgccactgcactctaccctgagtgacagagcaagactccatctcaaaaaacaaaaacaaaaacaaacaaagaaaaaaacaatgaactgttccttggataaattaccttttcacggattcttgagaattgcctttgggcctttatttctcagatctgctttacttacatcaatattgaaatgagtcccaaagcttgataggcatgcagtttacaatgaaagaaaatattaaacacggaatctttccagcaaagaggtcggtggagtggtggcacggggaggcagggctgaggaaagattactagtgggcattggaaactttaaacttcaaccacttggtaaggaaaagcatattctgtcagtcaagtttcaacaaaattagctaccttttgacgatgattttaacagatataagcatttctaaataaaatctaattatgtgaatgttaaagcttcttctcatttgctctctcattccatcaataaaccttggtctagtctttactgcatttggccaaaggctattgcaagacttaccgagtattgagcaaatctagtttgatcttcagaataaattcatttacaattttaaaaattgtagttgtat

SEQ ID NO: 76722 - DNA, 851 bp, Homo sapiens
agcagagtgtgtttcaagatgccatttcaatataaaatcatctgaagtgagatccctgttctgccatcaacaacagtgtagccatgaaaaagttcttaacctcattgaaacacagttttcttattggtaaaacaggaacaaaaaacgtctgtgtaaatttattacaagagttcaagataatacaaagcatctggcctagagcagatatgtaatacatttgaactattagttttacataaagggagctattgtggttccttgggattcttatcagactattttaggcttaaacgactgtgggccaaaattattaagttaaacatctgccatccaggagtagatgttctccttccacttgatattacattcctaagaatgtctgataagaccaggcgtggtgcctcatgcctgtaatcccagcactttgggaggccraggtgggcagatcacgaggtcaagagatctagaccatcttggccaaccaacacagtgaaacaccgtctctactaaaaatataaaaattagctgggtgtagtggcacatgcctgtagtcccagctactcgggaggctgaggcaggagaattgcttgaacccaggaggcagaggttgcagtgagccgagatcgtgccactgcactccagccggggcgacagaacgagactctgtctcaaaaaaaaaaaaaaaaaaaaatgtctgataaactctagaatgtggaagggcaaatatctggcagaaagtagtgtgtttattaaacctgcttctctctaagaaatcaaagtttcaagttaaatagtttattttgttcattaaacaaattagtaagtaatttctccactcaaggcatcatgaa

SEQ ID NO: 76723 - DNA, 588 bp, Homo sapiens
ccctttgaaaaaggaaagggctgagactggacattcaggtaactgaaagaagctgggctcctattgtggcctagcaggggccctgcacttcttgtgttcaccttcaaaaggaattctttggaaggggcattctggagcaaatcaccacccagtttctaaaacaccaaggacacagatagccttaatgtttccctcagcgtaactaaacttcagacgggcttcttcctgacttgaggctctgacctctcttttcttagagcttttttttttytgaaacagggtcttgctttgtcacccaggctggagtgcagtggtgctatcatagctcactgtagccttgacctcctgggctcaagtgatcctcctacttcagcctctggagtagctgggaccacaggagcgcaccagcaggcgtgactattgtttttttttttttttaaattgagtctcactatgttggccaggctgtattttctttaggaaacttttaattgtaaatttgttctctgctcctttgagatatacgtaaatcttttaaaacatcccttgccagttttactacccagaaatgtgtttgtcaaggatcta

SEQ ID NO: 76724 - DNA, 604 bp, Homo sapiens
cagttaccctttccaatcatatgactgtagtatttgactacaggggcaaagtagccgtcctgaagctgtgttcggagaattttgcttgcctaacatatacgtggcttgttggagcttctcagggttttttcctaggattctgtgcctctctgtaccatctttatcctggtgacatcaaagtgttatttttagcccagaattctgttctgaattccattctcctatatccaatgctttgttgacacccccacttggaagtttcacagacatacccaaacttaccatgtgcaaaatggaacagtttttttcctgctttctccctaacctgtttctaccacctctgcatcctacccctgctcactccagtccttcccatctcaggatatggcaccaccaccccaacccgattacaaaccatcaacacatcatttgatatgcactgcaaaatatatattgaatccgtccattcttctccttgttcagactaccaccaccttctccagaccactgcccatctcttgcactgcagcaagctcatgacacttctccctacccccattcttatctatttctaatcaastcatatggtagccaatatggatcc

SEQ ID NO: 76725 - DNA, 598 bp, Homo sapiens
aggtttcagcttgggcatgccagatgcagatgcccactattttcatattccgaaggctttcagataatgtggtggcttcatctgaacagttttgccactgaatctagagatgacaaggcacagaagggatctgctatgtggaagcagtaaagggtgcagcagggaccccaagccaaagaggactagtaagattgattacctagtgttattttactgtctttgtttatttccccctcttgtaccctgagctttcaataatctcctagcttattctcagttgtgtcaaatagaattaagtaaagagttatatgtcatagtacttgggctgaaccctcaaaagtaaagcagggtccctgaggccagcctgtaggtggtaggagcatttactgagagtaggagtcagggctttgaggtccagccagcactccctactcggtgattcctctcccagagccagccttggaggatctgcactagattttattaggctagccgtctggttccctaacagcataaatccaaatagcatcgatayaagcgagaatgttatatagcagtaccatggggaattagaggtaacttatgacaattcaaaagc

SEQ ID NO: 76726 - DNA, 1986 bp, Homo sapiens
  misc_feature (1)...(1986): n = A,T,C or G
cctgttggcttgggcagccagcagtgacatgctccagctgttagcgctgcctgggcctgccgtggctgtcagccccagcagatggggcacagagcagcctctgtctccctgggtaggcagagcccctatctgggctgagagaaccagggagaaagcagggcaagagccggtggcatcctggcccagccacacaattactgtcgctcaggcttactcggaaatgtatgtttttaaaagcttagacatatcctggaccccaaagggactttgctccaatgcttgtaagaagttagaggaattttcaaaggcatctgaacccctcagagtctctatggacaagagccagccttagaggggagtgtgtgtgcacatgtgtrtatgtgtgtttgtaagtgtatgtttttctgtagacgtggtgtgtggggtgtgtgtgtgtgtgtgtgtgtgtgtgtgtgtgcatgtttatgagtccaggactgaggttcggaaatcctgggttttttcaccccattactggatgacttggaacctgttcctttgcctccctgatcctgcctttcttcatcagagaaatcaggggtgctagtgctgtcagagggtacactgagctcgtacacttgctactagtactaaaaaccccactgccctgttcattgagaggcagcattgtgattacacgaggcacatgtgtccccagcttcttgtggcaggaccccccgtggccgtgtgcttaactgcatgaacaggtgcagacaagccaggctatggccaggctcctgcatggtgccatccacagagcactggctgcaaatttgacacagcacctactgacgttgccagctgggctctgctgaggggcgtgggtagcttcaggagaacagggagagcgccccttcagagttgatcctcgtacccctatccatgacacaggcctgcttctctccccagaaaccctacatctgcaagatcccaggctgcaccaagagatacacagaccccagctctctccggaagcatgtgaaaacggtccacggcccagatgcccacgtcaccaagaagcagcgcaatgacgtgcannnnnnnnnnnnnnnnnnnnnnnnnnnnnnnnnnnnnnnnnnnnnnnnnnnnnnnnnnnnnnnnnnnnnnnnnnnnnnnnnnnnnnnnnnnnnnnnnnnnttggcaatgctggcgtgtttcagggctgctgggaagcgccctcaggccccacatgcctgtgtgatgctggcagttctgccagctctggcccattcctctggctgtgtttagtctgtcaaaatgaccatctctgggaacatgtgtgcccctggatccttagcggtcatcacaacatagtggggttggggggttccagctccctacccagagtagggtgggattgtatgtgatgacctggtaggggtggggtggggaccagagacagagaagaagctgaaacggtggggagaaagctctcctgccctcaggtactgccccctcccttatcctgtccacaccctgagccctgcttaccaccaaccagtgtcatcaagaacgcccacttccctgccagggcacaggcaggggctccagcccagccccacctgggttggttgtggttctaccacctgctatctgggcacccttggccaagggacctagcctatctggggatgttcccatccacaagatgggcataaagtgcctgtgttgtgaatgttttatttgaattcacaaagaaaatatgtgcatgtgccccaccgatggctggcacacagtcagccctaccctggggagataccaggtaagagcacggctgtgatctcactggccctgtgcaaaagagacatctcggaaggcttcctggaggaagtgtctagacagtcattgatggctacgatggccagtgggcctgtctctggtattgtgtgccctgggtttccaggccagcagacactctatattccaaattggcttgttgctgaggag

SEQ ID NO: 76727 - DNA, 626 bp, Homo sapiens
aatatacgatggcacagcctgaggaggtracctctggactgagagtgcaagatgagcaggtggcctgggtggaggacttggaatgagggcccctgggcagagggacagcatgggcaaaggccccaggtagaaagagctcagggcatcccaggaactacaagaaggacaacgtgactggagatggttggatgggagggaagttggagaggctggcaggggccaggccatgcagggccttgtcatgatgccactgggtggctatcactctgagaaccaatgggggcatcatgaggaatcatgaaaggaagagagggaggggaggatgagggtggaagagagctaaaaactcagccatcctaacaagaaatcaataggtaatgctaaaatggataaatcgataaagtagacattaacatattactccacagcaagggtcagcacaagaagaaacagctaaaagagtcaagaatcaaaaacaaatccagggccaggagtggtggctaatgcctgtaattctagcaccttggaaggccgaggcgggaggatcacttgaggccaggagttcaagatgagcatgggcaacatagtgagaccccatctctactaaaaatttaaaaaatttgcca

SEQ ID NO: 76728 - DNA, 626 bp, Homo sapiens
aatatacgatggcacagcctgaggaggtaacctctggactgagagtgcaagatgagcaggtggcctgggtggaggacttggaatgagggcccctgggcagagggacagcatgggcaaaggccccaggtagaaagagctcagggcatcccaggaactacaagaaggacaacgtgactggagatggttggatgggagggaagttggagaggctggcaggggccaggccatgcagggccttgtcatgatgccactgggtggctatcactctgagaaccaatgggggcatcatgaggaatcatgaaaggaagagagggaggggaggatgagggtggaagagagctaaaaactcagccatcctaacaagaaatcaataggtaatgctaaaatggataaatcgataaagtagacattaacatattactccacagcaagggtcagcayaagaagaaacagctaaaagagtcaagaatcaaaaacaaatccagggccaggagtggtggctaatgcctgtaattctagcaccttggaaggccgaggcgggaggatcacttgaggccaggagttcaagatgagcatgggcaacatagtgagaccccatctctactaaaaatttaaaaaatttgcca

SEQ ID NO: 76729 - DNA, 626 bp, Homo sapiens
aatatacgatggcacagcctgaggaggtaacctctggactgagagtgcaagatgagcaggtggcctgggtggaggacttggaatgagggcccctgggcagagggacagcatgggcaaaggccccaggtagaaagagctcagggcatcccaggaactacaagaaggacaacgtgactggagatggttggatgggagggaagttggagaggctggcaggggccaggccatgcagggccttgtcatgatgccactgggtggctatcactctgagaaccaatgggggcatcatgaggaatcatgaaaggaagagagggaggggaggatgagggtggaagagagctaaaaactcagccatcctaacaagaaatcaataggtaatgctaaaatggataaatcgataaagtagacattaacatattactccacagcaagggtcagcacragaagaaacagctaaaagagtcaagaatcaaaaacaaatccagggccaggagtggtggctaatgcctgtaattctagcaccttggaaggccgaggcgggaggatcacttgaggccaggagttcaagatgagcatgggcaacatagtgagaccccatctctactaaaaatttaaaaaatttgcca

SEQ ID NO: 76730 - DNA, 1733 bp, Homo sapiens
cctcaagaggccaaacccccaccccaagaacatcatggccaggacagcaggcaagtgagtgccaactcgctgggcaggggtggcttccagaaggttcagtggaggctgtggggcagtgggagacagtgctggcccgggaggaggggatgtgaccaagggaatggggctcgtgaagtggcctggcctgtgggactggttgcaggggctgccagtgtgacagaattgtgggccctgctgaggtggcacagctggtggtggagggaggggcagggccccaggcttcatccggaggctggagccctgggggaggttcatcaaggggctgacggggttgaaaaggtggctctcgcacaggcgatgggaggcagtggggcaagttgatgggcttcgtcaaatccaggcgggcacrgggccagcccaggtgcacgcagagagcgtgagggccaggcagagcgggagggatgggctcctgtggctgaggggagcgcagtgccccttccgtggggagtcgcaaagagccaggctgccccccaaaggcctccgctgggctagatgctacagaagctgcctgtaatgggctgaacagcgtcccccaaaaatgtgtccaggtcctaaccccaggtacttgtggatgtggccttgcttggaatccgggtctgtacagatgttactgaagatcttggtatgagaccatcctggaggatccgggtgccggggggtggctctcgcaggtcctggggaatgagctgccctggccccaggcctgacctcccgccagggtggctgcctgagcgtggggacgccttgggggactgggggttggctccagcagaccccggacttgcaggatttgtaagggggacatgtttttcccattataaaaatgttccccaagaggcagcataacatggggtgtccccaaagtcagaccacccacgtgtgtggctgctcagccagtcacaggtggtggaatttggggccggtgtctgccgtctcagtgtcggtggaacggggtcaggccaggcccagcccgcactcccctgcagaggtcagctggtcccggccacggagcctggcgggtttgctgctggctgtgatcatgatcaatgcattgatgggaatgtgaagagttatggaaattccactttgttttttaaagaaacagcatcggtcacccatagtccaccgctgccagcgtttctgcacactccagctccccgtcatggggctttaccatgtcgagggcacctcacactgctccttggcaccatggcaccccacttccctggggctctcattgtcagcggtttcattgtatcccccagagtgtgagctgcagaggacggggcatgttctgtccccacctgcctgtcacttccacctgcgttgggttttttgtgtgtttctgtcctgatgcagcctgcttgaaccacctcacaaacaataaacccgtgtttggtctcagggctgtgggaccccctgaggatgggaggagccatcgaggtttgccgggctcagtgggtgctggagcagctggcccccgccaggcctgactcagtgtgacttgaggccatcgaccctctgtcctgctacccaaacccagtgtccaccccatagctcccaccacacaggatgatcccaagagctgtcgattccacagcatctgctgtgcactgcagcccgggtgccttcctcgggccctgctcagctatgaccacggccaggagctagga

SEQ ID NO: 76731 - DNA, 801 bp, Homo sapiens
tgggcccttgtggcagcagggcatggaggggtygtggtggagaggtaggggcttcccagttgtacagaccagcagcccagaaagtgttctcttggaccatctgggcattgcactcccccagctgtgggcagccccgtggactttggggtggcaaccagggcccagcacctcctgcaccaacctgccgtgtggccctgggcgagtcagcttcttctcttggcctcagaaaccagctgtcggccgggcacggtggctcacacctgtaatcccagcactttgggatgccgaggcgggcagatcacttgaggtcgggagttggagaccagcctggccaacatggtgaaaccatgtctctactgaaaaaatacaaaaaaattttagccggtcatcgtggcaggtgcctgtagtcccagcaacgcgggaggctgaggcaggataattgcttgaacccgggagacagaggttgcagtgagccaagatcgtgccattgtactccagtctgggcaacagagcgagactccgtctcaaaaaaaataaaaagaaagaaaagaaactgcaactgtaacatggagagaaagtgggaaaatggcgcatttgtactcttgcagtcttttttccttccagggcgtagagtcctcccagtccctgcactgggtgggaggcgggtggggggtgggtgttcctactgtcaccccatttagcatcctgtgcccaggggaggacacacatgcaagggtggcgtaggcacctcggcaaagcactgggatgcatgagaatcgcaacttggcaatgcattgagcg

SEQ ID NO: 76732 - DNA, 801 bp, Homo sapiens
tgggcccttgtggcagcagggcatggaggggtcgtggtggagaggtaggggcttcccagttgtacagaccagcagcccagaaagtgttctcttggaccatctgggcattgcactcccccagctgtgggcagccccgtggactttggggtggcaaccagggcccagcacctcctgcaccaacctgccgtgtggccctgggcgagtcagcttcttctcttggcctcagaaaccagctgtcggccgggcacggtggctcacrcctgtaatcccagcactttgggatgccgaggcgggcagatcacttgaggtcgggagttggagaccagcctggccaacatggtgaaaccatgtctctactgaaaaaatacaaaaaaattttagccggtcatcgtggcaggtgcctgtagtcccagcaacgcgggaggctgaggcaggataattgcttgaacccgggagacagaggttgcagtgagccaagatcgtgccattgtactccagtctgggcaacagagcgagactccgtctcaaaaaaaataaaaagaaagaaaagaaactgcaactgtaacatggagagaaagtgggaaaatggcgcatttgtactcttgcagtcttttttccttccagggcgtagagtcctcccagtccctgcactgggtgggaggcgggtggggggtgggtgttcctactgtcaccccatttagcatcctgtgcccaggggaggacacacatgcaagggtggcgtaggcacctcggcaaagcactgggatgcatgagaatcgcaacttggcaatgcattgagcg

SEQ ID NO: 76733 - DNA, 801 bp, Homo sapiens
tgggcccttgtggcagcagggcatggaggggtcgtggtggagaggtaggggcttcccagttgtacagaccagcagcccagaaagtgttctcttggaccatctgggcattgcactcccccagctgtgggcagccccgtggactttggggtggcaaccagggcccagcacctcctgcaccaacctgccgtgtggccctgggcgagtcagcttcttctcttggcctcagaaaccagctgtcggccgggcacggtggctcacacctgtaatcccagcactttgggaygccgaggcgggcagatcacttgaggtcgggagttggagaccagcctggccaacatggtgaaaccatgtctctactgaaaaaatacaaaaaaattttagccggtcatcgtggcaggtgcctgtagtcccagcaacgcgggaggctgaggcaggataattgcttgaacccgggagacagaggttgcagtgagccaagatcgtgccattgtactccagtctgggcaacagagcgagactccgtctcaaaaaaaataaaaagaaagaaaagaaactgcaactgtaacatggagagaaagtgggaaaatggcgcatttgtactcttgcagtcttttttccttccagggcgtagagtcctcccagtccctgcactgggtgggaggcgggtggggggtgggtgttcctactgtcaccccatttagcatcctgtgcccaggggaggacacacatgcaagggtggcgtaggcacctcggcaaagcactgggatgcatgagaatcgcaacttggcaatgcattgagcg

SEQ ID NO: 76734 - DNA, 801 bp, Homo sapiens
tgggcccttgtggcagcagggcatggaggggtcgtggtggagaggtaggggcttcccagttgtacagaccagcagcccagaaagtgttctcttggaccatctgggcattgcactcccccagctgtgggcagccccgtggactttggggtggcaaccagggcccagcacctcctgcaccaacctgccgtgtggccctgggcgagtcagcttcttctcttggcctcagaaaccagctgtcggccgggcacggtggctcacacctgtaatcccagcactttgggatgccgaggmgggcagatcacttgaggtcgggagttggagaccagcctggccaacatggtgaaaccatgtctctactgaaaaaatacaaaaaaattttagccggtcatcgtggcaggtgcctgtagtcccagcaacgcgggaggctgaggcaggataattgcttgaacccgggagacagaggttgcagtgagccaagatcgtgccattgtactccagtctgggcaacagagcgagactccgtctcaaaaaaaataaaaagaaagaaaagaaactgcaactgtaacatggagagaaagtgggaaaatggcgcatttgtactcttgcagtcttttttccttccagggcgtagagtcctcccagtccctgcactgggtgggaggcgggtggggggtgggtgttcctactgtcaccccatttagcatcctgtgcccaggggaggacacacatgcaagggtggcgtaggcacctcggcaaagcactgggatgcatgagaatcgcaacttggcaatgcattgagcg

SEQ ID NO: 76735 - DNA, 603 bp, Homo sapiens
gctctccccgccccctttcccttttcccccaaacccctttccttgtctttttaaaacaagtttccattttttctcttagatgtaaggagaacacgtgcaggtttgttacaagggaatactgtgtggtgctgaggttttggtaagtgaacttsacaggagcctctggcaggttcctgccccaagaaatcagggcttccgagacaccaccagcaggacacctggcagagcctccaggacccctggcagaacccctgacagttacatctctttcccgagagagggcccctctgtgtgctccttgccagaggagcttggcagcaagtgtggggtggccctcttgacagcagcagctctggcttggggtctggcccattcccagacacaagtgcatgcagacaaaggccaggggtcaggtggatgactgatcccgtcacccaggtagtgaacatagcacccaacaggaactttttcagcccttgcccctcccaccctccctccttttggagtcaccggtgtctgttgttcccatatttatgtccatgtgaacccaagatttagctcccatggataagtgagaacgtgtgatatttggctttctgtttc

SEQ ID NO: 76736 - DNA, 603 bp, Homo sapiens
gctctccccgccccctttcccttttcccccaaacccctttccttgtctttttaaaacaagtttccattttttctcttagatgtaaggagaacacgtgcaggtttgttacaagggaatactgtgtggtgctgaggttttggtaagtgaacttcacaggagcctctggcaggttcctgccccaagaaatcagggcttccgagacaccaccagcaggacacctggcagagcctccaggacccctggcagaacccctgacagttacatctctttcccgagagagggcmcctctgtgtgctccttgccagaggagcttggcagcaagtgtggggtggccctcttgacagcagcagctctggcttggggtctggcccattcccagacacaagtgcatgcagacaaaggccaggggtcaggtggatgactgatcccgtcacccaggtagtgaacatagcacccaacaggaactttttcagcccttgcccctcccaccctccctccttttggagtcaccggtgtctgttgttcccatatttatgtccatgtgaacccaagatttagctcccatggataagtgagaacgtgtgatatttggctttctgtttc

SEQ ID NO: 76737 - DNA, 603 bp, Homo sapiens
gctctccccgccccctttcccttttcccccaaacccctttccttgtctttttaaaacaagtttccattttttctcttagatgtaaggagaacacgtgcaggtttgttacaagggaatactgtgtggtgctgaggttttggtaagtgaacttcacaggagcctctggcaggttcctgccccaagaaatcagggcttccgagacaccaccagcaggacacctggcagagcctccaggacccctggcagaacccctgacagttacatctctttcccgagagagggcccctctgtgtgctccttgccagaggagcttggcagcaagtgtggggtggccctcttgacagcagcagctctggcttggggtctggcccattcccagacacaagtgcatgcagacaaaggccagsggtcaggtggatgactgatcccgtcacccaggtagtgaacatagcacccaacaggaactttttcagcccttgcccctcccaccctccctccttttggagtcaccggtgtctgttgttcccatatttatgtccatgtgaacccaagatttagctcccatggataagtgagaacgtgtgatatttggctttctgtttc

SEQ ID NO: 76738 - DNA, 570 bp, Homo sapiens
tccgagtcctaaacataagagctgaaaacacaaaacttttagaagaaaacataggggaaaagcatcgtgacattggatttggcaatgatttcttggatrtgacaccaacgcacaggcaacaaaagaaaaaacagacaaactggacatcatcagaattaaaaacttttgtgtatcaaaagtcactatcgagagtgaaaagacaacccgcggaatggagaaaatgtctgcagatcacatatctgagaaggggtcagtgtgagaagatgtcaagaactcctacaattcagccaccacccaacagaaaccaaacagatttgaaagcgggcaaaggaccagaatagagatttctccaaagatgataaacaaatggacaaccgacacgaaaaggtgccggacattgctaatcattaggaaaatgcaaatcaaagcaaatcaaagccccactgagaggccacctcttcctgtcaggatggctgcgctcaaaacacagcacctcattgcagctcacggagtcccccatgggcgtctccagggtgcaggaatgcatttaactgttgttgccacatcttg

SEQ ID NO: 76739 - DNA, 619 bp, Homo sapiens
agatatagcgtgcatatcataggaggtgataatcccaatgtgttgtaacctgatcaaatcacacctgagcttgtggatcagcaatgggtgcaaagacacaaataaataggggtgaacctagaatagggcaggctggctgatgacggaccacttcatcgggtcttgtgggggaatatgaaggaaatggagagcttgctgccccgttttgagggctccgtggagcagaactgggcctggagtgttctcttgaggattcagagattacaaccaggctcagtgggaaagattccaccrtcggctcttggagtctgtgtgggtgaaccaaggcatctctgggccacatccactcagggagaccacagttgggtgggaagccagggggtgacttctgcatccttccaactctaagattcgattaggaaggtgtatagggggagtgttttagtccattttgtgctgctctaacagaatatctgagactgggtaatttatagacagaaatgtattttcttgcagttctggaggctgggatgtccaagatgaaggctccagcaggtttgctgtctggtgagggcccccatctttgcttccaaaatggtgccttgctgctgtgacctct

SEQ ID NO: 76740 - DNA, 380 bp, Homo sapiens
ccgaggcttgggcagagctgggcactggggaccacatacatctagtgaccccccccccaccaagccccgccttcttccccagccactccctcttccctggcctcctggcctggcctccagaatgagcctccttaggggaccttggggttcggggctggggccccaccaggcagaaacgtgacctttcagactggaattgcccacacttcctctttggccccagggacagtctcaccgcgggaggggcactctggggctccttcctcccaagccccacagcgtcccctcctgcacttggacttcaggactgtgggggcaggatgagatcacagctggagatggacgcagcaccatgcacagtggyggaaaagggtttggca

SEQ ID NO: 76741 - DNA, 1102 bp, Homo sapiens
tggacttaagtctgtataacgcaccttacccttgtctaatgtgcttttgctggttagctccccactactgcacctcaaatcttctttctttaagttgaagatagtatttatgcttgaattgaaagccacctgttggagatttactcatttttccctgagtatctcccatgtaaccataagatatacatgtttttaaacttttctgtttttctcattttaatctgtcagtttttacagagcgttccatctaagaattccaaaaacagaaaattatttttcctcccctattacaagttgtgcatttttttccaaagctaaacaagtctcaccttacaatccaaaaataacattcctaagtattttgacaactactttgatgttatttcccatcaaaagctaccatgcagttatttacagaagccctattcataatgaccaaaggaaaaaaaaggaatcagaaagtcttacaatagatgactgtgtgggaatccactcagacatcaaaagttgttataaagattatttaaatgaaaacatttgagatactgaagatgaagaaatcttaccagaacttactttatccaattaaagcagagctcccagwaaaatacagctgccattaaccccatccaaggagtttcttgcaaattcagctgccatgaagacagcgtactctttcgcattagcattgataaatgaaaatgaaattctaagctcccaactgactgaacagacccactcttggctgaggggaccccagagtaactttcaaaactgagttctcagctttgctaggatgggatgatggggttaagatacacatcgttataccccctcctttgctaaccatgatgaggctttcttccctaaggatttaacagaaaccagccctttcaaagcctccaccactgatatcaacctctccttcttgcctgatagagaccacccacgatggagaggttctggccagcgtacagaggatgcacagagcgagttttcatgtcctctgcttcaccttttaatgtcagagggctgaaaactccaccctgggatcatgctaacactgccattttttgtacatgggacccatgaagaagcaaga

SEQ ID NO: 76742 - DNA, 1102 bp, Homo sapiens
tggacttaagtctgtataacgcaccttacccttgtctaatgtgcttttgctggttagctccccactactgcacctcaaatcttctttctttaagttgaagatagtatttatgcttgaattgaaagccacctgttggagatttactcatttttccctgagtatctcccatgtaaccataagatatacatgtttttaaacttttctgtttttctcattttaatctgtcagtttttacagagcgttccatctaagaattccaaaaacagaaaattatttttcctcccctattacaagttgtgcatttttttccaaagctaaacaagtctcaccttacaatccaaaaataacattcctaagtattttgacaactactttgatgttatttcccatcaaaagctaccatgcagttatttacagaagccctattcataatgaccaaaggaaaaaaaaggaatcagaaagtcttacaatagatgactgtgtgggaatccactcagacatcaaaagttgttataaagattatttaaatgaaaacatttgagatactgaagatgaagaaatcttaccagaacttactttatccaattaaagcagagctcccagaaaaatacagctgccattaaccccatccaaggagtttcttgcaaattcagctgccatgaagacagcgtactctttcgcattagcattgataaatgaaaatkaaattctaagctcccaactgactgaacagacccactcttggctgaggggaccccagagtaactttcaaaactgagttctcagctttgctaggatgggatgatggggttaagatacacatcgttataccccctcctttgctaaccatgatgaggctttcttccctaaggatttaacagaaaccagccctttcaaagcctccaccactgatatcaacctctccttcttgcctgatagagaccacccacgatggagaggttctggccagcgtacagaggatgcacagagcgagttttcatgtcctctgcttcaccttttaatgtcagagggctgaaaactccaccctgggatcatgctaacactgccattttttgtacatgggacccatgaagaagcaaga

SEQ ID NO: 76743 - DNA, 1102 bp, Homo sapiens
tggacttaagtctgtataacgcaccttacccttgtctaatgtgcttttgctggttagctccccactactgcacctcaaatcttctttctttaagttgaagatagtatttatgcttgaattgaaagccacctgttggagatttactcatttttccctgagtatctcccatgtaaccataagatatacatgtttttaaacttttctgtttttctcattttaatctgtcagtttttacagagcgttccatctaagaattccaaaaacagaaaattatttttcctcccctattacaagttgtgcatttttttccaaagctaaacaagtctcaccttacaatccaaaaataacattcctaagtattttgacaactactttgatgttatttcccatcaaaagctaccatgcagttatttacagaagccctattcataatgaccaaaggaaaaaaaaggaatcagaaagtcttacaatagatgactgtgtgggaatccactcagacatcaaaagttgttataaagattatttaaatgaaaacatttgagatactgaagatgaagaaatcttaccagaacttactttatccaattaaagcagagctcccagaaaaatacagctgccattaaccccatccaaggagtttcttgcaaattcagctgccatgaagacagcgtactctttcgcattagcattgataaatgaaaatgaaattctaagctcccaactgactgaacagacccactcttggctgaggrgaccccagagtaactttcaaaactgagttctcagctttgctaggatgggatgatggggttaagatacacatcgttataccccctcctttgctaaccatgatgaggctttcttccctaaggatttaacagaaaccagccctttcaaagcctccaccactgatatcaacctctccttcttgcctgatagagaccacccacgatggagaggttctggccagcgtacagaggatgcacagagcgagttttcatgtcctctgcttcaccttttaatgtcagagggctgaaaactccaccctgggatcatgctaacactgccattttttgtacatgggacccatgaagaagcaaga

SEQ ID NO: 76744 - DNA, 1102 bp, Homo sapiens
tggacttaagtctgtataacgcaccttacccttgtctaatgtgcttttgctggttagctccccactactgcacctcaaatcttctttctttaagttgaagatagtatttatgcttgaattgaaagccacctgttggagatttactcatttttccctgagtatctcccatgtaaccataagatatacatgtttttaaacttttctgtttttctcattttaatctgtcagtttttacagagcgttccatctaagaattccaaaaacagaaaattatttttcctcccctattacaagttgtgcatttttttccaaagctaaacaagtctcaccttacaatccaaaaataacattcctaagtattttgacaactactttgatgttatttcccatcaaaagctaccatgcagttatttacagaagccctattcataatgaccaaaggaaaaaaaaggaatcagaaagtcttacaatagatgactgtgtgggaatccactcagacatcaaaagttgttataaagattatttaaatgaaaacatttgagatactgaagatgaagaaatcttaccagaacttactttatccaattaaagcagagctcccagaaaaatacagctgccattaaccccatccaaggagtttcttgcaaattcagctgccatgaagacagcgtactctttcgcattagcattgataaatgaaaatgaaattctaagctcccaactgactgaacagacccactcttggctgaggggaccccagagtaactttcaaaactgagttctcagctttgctaggatgsgatgatggggttaagatacacatcgttataccccctcctttgctaaccatgatgaggctttcttccctaaggatttaacagaaaccagccctttcaaagcctccaccactgatatcaacctctccttcttgcctgatagagaccacccacgatggagaggttctggccagcgtacagaggatgcacagagcgagttttcatgtcctctgcttcaccttttaatgtcagagggctgaaaactccaccctgggatcatgctaacactgccattttttgtacatgggacccatgaagaagcaaga

SEQ ID NO: 76745 - DNA, 1102 bp, Homo sapiens
tggacttaagtctgtataacgcaccttacccttgtctaatgtgcttttgctggttagctccccactactgcacctcaaatcttctttctttaagttgaagatagtatttatgcttgaattgaaagccacctgttggagatttactcatttttccctgagtatctcccatgtaaccataagatatacatgtttttaaacttttctgtttttctcattttaatctgtcagtttttacagagcgttccatctaagaattccaaaaacagaaaattatttttcctcccctattacaagttgtgcatttttttccaaagctaaacaagtctcaccttacaatccaaaaataacattcctaagtattttgacaactactttgatgttatttcccatcaaaagctaccatgcagttatttacagaagccctattcataatgaccaaaggaaaaaaaaggaatcagaaagtcttacaatagatgactgtgtgggaatccactcagacatcaaaagttgttataaagattatttaaatgaaaacatttgagatactgaagatgaagaaatcttaccagaacttactttatccaattaaagcagagctcccagaaaaatacagctgccattaaccccatccaaggagtttcttgcaaattcagctgccatgaagacagcgtactctttcgcattagcattgataaatgaaaatgaaattctaagctcccaactgactgaacagacccactcttggctgaggggaccccagagtaactttcaaaactgagttctcagctttgctaggatgggatgatggggttaagatacacatcgttataccccctcctttgctaaccatgatgaggctttcttccctaaggatttaacagaaaccagccctttcaaagcctccaccactgatatcaacctctccttcttgcctgatagagaccacccacgatggagaggttctggccagcgtacagaggatgcacagagcgagttttcatktcctctgcttcaccttttaatgtcagagggctgaaaactccaccctgggatcatgctaacactgccattttttgtacatgggacccatgaagaagcaaga

SEQ ID NO: 76746 - DNA, 1989 bp, Homo sapiens
atgatggtcaccagctggttactgctaccaccccacaaccccgagcatactggacgaatgtctaagccttgtggttagtggggacaatgctggtggagtctgaagttgtcatgcagtgactcatgcaagcttaggcagatttggtgatatatgacacagagatgcaaagaaatgttgtagctgacacacaccggctggctctgggagatgcagaaggagcacgtcacccaaaatagagccagacagacatccttaaggaaagagccaaggggctgcatcttaaagaatgaagaaaggatttgtcatgagagatgggacaggaagtcttgagaggcagagggagattgtgagaatgttgggaagggaggagagattctcacacatctgggaagctgacaatccatcagcatgtccagaaggaaaataaggaggaggagcagaaacagatgaggctggatatagaagcagggctgaagctgtgttgattgtggtaaagagttacgattctatccagaaggcaataggtagcattctaaacagagatcttttaaaacaagagtcagcaaatattttctgcaaggggctaagtgttaaatatttcaagttttccaagccatatggtctctctctcaatgactcagctcttccattataccatgaaagtagccagagacattatgtaacacatgtattggctgtgtcccattacaactttacttacaaacgcagactgtgtcagacatggtccatgcatggtagtttgccacactctgttttagaaagctcaggtttatgatgtgatggagaatgccyacaagagctcttgttttaaatggtagagtgaacatacactggaattctatcctgcttgacccaagctcttgatagcgaaaggtagaaaagatagatggtaaacagatagatagatgatagataaagaaaatacatagctgttccagaaaacagaaatggataacttcatgaaccaaaagcagagtaatatactttagaaaggaagcaggccagaaaacccacagttgcaaagcaaatagaatttccaactgcctcttgtagccccttcctggaagtagtcacagcccagggtgtttgacttcttcctctgttttttgtttgtttgttgtttgcttttctctggggttttgttgttgtttgctttttttaaaaaaaaattccctttccctgcttttttgtcacagcagcctttgtcacttcaaacaccgcaagtgttctttaaaaaaaattatatcaacctttcaattaaaatgcaacatgtctgaaacttggtatctggagaggtgagttggacaaaggagcccttgttactgcacgttttcattcttcaaatttcaccttgcacgcagtaacagacagtgcacaaagccacttccttatggacggaaattctgaaatccttttatgcctggcctttccatccttcatcttcccctctcccacactgtgaaggatcgtattggacatttttgttttaatgtcagtgacaggggaacacaggtagctctaatatagctgtgacccagatgcttctgtttctagcacgtatttattttgcagcaaacatttacatccatgatgttttactgtcttttgaaaataattaggcaatatctcatctgaggtaggatgtttctaggggttgtgttctgagggaggaaaactaatctgttctctttccactgcattctaggaacagtaagaggaccttgtgcatgaataatttgtttccacactacagagtgggtaataagcagattagtaaaaacaattctgcttcacttcaataacagcctcctccaactcattttttctcaacaaacttatttttccagcagaagaatcccagacttcttagagaacccagtgactttttgcaccttaaatctgtgaaatcctcatgttttcttctgccgtatccatagttcaaacaaagatgaggcaaagctagatgca

SEQ ID NO: 76747 - DNA, 1989 bp, Homo sapiens
atgatggtcaccagctggttactgctaccaccccacaaccccgagcatactggacgaatgtctaagccttgtggttagtggggacaatgctggtggagtctgaagttgtcatgcagtgactcatgcaagcttaggcagatttggtgatatatgacacagagatgcaaagaaatgttgtagctgacacacaccggctggctctgggagatgcagaaggagcacgtcacccaaaatagagccagacagacatccttaaggaaagagccaaggggctgcatcttaaagaatgaagaaaggatttgtcatgagagatgggacaggaagtcttgagaggcagagggagattgtgagaatgttgggaagggaggagagattctcacacatctgggaagctgacaatccatcagcatgtccagaaggaaaataaggaggaggagcagaaacagatgaggctggatatagaagcagggctgaagctgtgttgattgtggtaaagagttacgattctatccagaaggcaataggtagcattctaaacagagatcttttaaaacaagagtcagcaaatattttctgcaaggggctaagtgttaaatatttcaagttttccaagccatatggtctctctctcaatgactcagctcttccattataccatgaaagtagccagagacattatgtaacacatgtattggctgtgtcccattacaactttacttacaaacgcagactgtgtcagacatggtccatgcatggtagtttgccacactctgttttagaaagctcaggtttatgatgtgatggagaatgcccacaagagctcttgttttaaatggtagagtgaacatacactggaattctatcctgcttgacccaagctcttgatagcgaaaggyagaaaagatagatggtaaacagatagatagatgatagataaagaaaatacatagctgttccagaaaacagaaatggataacttcatgaaccaaaagcagagtaatatactttagaaaggaagcaggccagaaaacccacagttgcaaagcaaatagaatttccaactgcctcttgtagccccttcctggaagtagtcacagcccagggtgtttgacttcttcctctgttttttgtttgtttgttgtttgcttttctctggggttttgttgttgtttgctttttttaaaaaaaaattccctttccctgcttttttgtcacagcagcctttgtcacttcaaacaccgcaagtgttctttaaaaaaaattatatcaacctttcaattaaaatgcaacatgtctgaaacttggtatctggagaggtgagttggacaaaggagcccttgttactgcacgttttcattcttcaaatttcaccttgcacgcagtaacagacagtgcacaaagccacttccttatggacggaaattctgaaatccttttatgcctggcctttccatccttcatcttcccctctcccacactgtgaaggatcgtattggacatttttgttttaatgtcagtgacaggggaacacaggtagctctaatatagctgtgacccagatgcttctgtttctagcacgtatttattttgcagcaaacatttacatccatgatgttttactgtcttttgaaaataattaggcaatatctcatctgaggtaggatgtttctaggggttgtgttctgagggaggaaaactaatctgttctctttccactgcattctaggaacagtaagaggaccttgtgcatgaataatttgtttccacactacagagtgggtaataagcagattagtaaaaacaattctgcttcacttcaataacagcctcctccaactcattttttctcaacaaacttatttttccagcagaagaatcccagacttcttagagaacccagtgactttttgcaccttaaatctgtgaaatcctcatgttttcttctgccgtatccatagttcaaacaaagatgaggcaaagctagatgca

SEQ ID NO: 76748 - DNA, 1989 bp, Homo sapiens
atgatggtcaccagctggttactgctaccaccccacaaccccgagcatactggacgaatgtctaagccttgtggttagtggggacaatgctggtggagtctgaagttgtcatgcagtgactcatgcaagcttaggcagatttggtgatatatgacacagagatgcaaagaaatgttgtagctgacacacaccggctggctctgggagatgcagaaggagcacgtcacccaaaatagagccagacagacatccttaaggaaagagccaaggggctgcatcttaaagaatgaagaaaggatttgtcatgagagatgggacaggaagtcttgagaggcagagggagattgtgagaatgttgggaagggaggagagattctcacacatctgggaagctgacaatccatcagcatgtccagaaggaaaataaggaggaggagcagaaacagatgaggctggatatagaagcagggctgaagctgtgttgattgtggtaaagagttacgattctatccagaaggcaataggtagcattctaaacagagatcttttaaaacaagagtcagcaaatattttctgcaaggggctaagtgttaaatatttcaagttttccaagccatatggtctctctctcaatgactcagctcttccattataccatgaaagtagccagagacattatgtaacacatgtattggctgtgtcccattacaactttacttacaaacgcagactgtgtcagacatggtccatgcatggtagtttgccacactctgttttagaaagctcaggtttatgatgtgatggagaatgcccacaagagctcttgttttaaatggtagagtgaacatacactggaattctatcctgcttgacccaagctcttgatagcgaaaggtagaaaagatagatggtaaacagatagatagatgatagataaagaaaatacatagctgttccagaaaacagaaatggataacttcatgaaccaaaagcagagtaatatactttagaaaggaagcaggccagaaaacccacagttgcaaagcaaatagaatttccaactgcctcttgtagccccttcctggaagtagtcacagcccagggtgtttgacttcttcctctgttttttgtttgtttgttgtttgcttttctstggggttttgttgttgtttgctttttttaaaaaaaaattccctttccctgcttttttgtcacagcagcctttgtcacttcaaacaccgcaagtgttctttaaaaaaaattatatcaacctttcaattaaaatgcaacatgtctgaaacttggtatctggagaggtgagttggacaaaggagcccttgttactgcacgttttcattcttcaaatttcaccttgcacgcagtaacagacagtgcacaaagccacttccttatggacggaaattctgaaatccttttatgcctggcctttccatccttcatcttcccctctcccacactgtgaaggatcgtattggacatttttgttttaatgtcagtgacaggggaacacaggtagctctaatatagctgtgacccagatgcttctgtttctagcacgtatttattttgcagcaaacatttacatccatgatgttttactgtcttttgaaaataattaggcaatatctcatctgaggtaggatgtttctaggggttgtgttctgagggaggaaaactaatctgttctctttccactgcattctaggaacagtaagaggaccttgtgcatgaataatttgtttccacactacagagtgggtaataagcagattagtaaaaacaattctgcttcacttcaataacagcctcctccaactcattttttctcaacaaacttatttttccagcagaagaatcccagacttcttagagaacccagtgactttttgcaccttaaatctgtgaaatcctcatgttttcttctgccgtatccatagttcaaacaaagatgaggcaaagctagatgca

SEQ ID NO: 76749 - DNA, 1989 bp, Homo sapiens
atgatggtcaccagctggttactgctaccaccccacaaccccgagcatactggacgaatgtctaagccttgtggttagtggggacaatgctggtggagtctgaagttgtcatgcagtgactcatgcaagcttaggcagatttggtgatatatgacacagagatgcaaagaaatgttgtagctgacacacaccggctggctctgggagatgcagaaggagcacgtcacccaaaatagagccagacagacatccttaaggaaagagccaaggggctgcatcttaaagaatgaagaaaggatttgtcatgagagatgggacaggaagtcttgagaggcagagggagattgtgagaatgttgggaagggaggagagattctcacacatctgggaagctgacaatccatcagcatgtccagaaggaaaataaggaggaggagcagaaacagatgaggctggatatagaagcagggctgaagctgtgttgattgtggtaaagagttacgattctatccagaaggcaataggtagcattctaaacagagatcttttaaaacaagagtcagcaaatattttctgcaaggggctaagtgttaaatatttcaagttttccaagccatatggtctctctctcaatgactcagctcttccattataccatgaaagtagccagagacattatgtaacacatgtattggctgtgtcccattacaactttacttacaaacgcagactgtgtcagacatggtccatgcatggtagtttgccacactctgttttagaaagctcaggtttatgatgtgatggagaatgcccacaagagctcttgttttaaatggtagagtgaacatacactggaattctatcctgcttgacccaagctcttgatagcgaaaggtagaaaagatagatggtaaacagatagatagatgatagataaagaaaatacatagctgttccagaaaacagaaatggataacttcatgaaccaaaagcagagtaatatactttagaaaggaagcaggccagaaaacccacagttgcaaagcaaatagaatttccaactgcctcttgtagccccttcctggaagtagtcacagcccagggtgtttgacttcttcctctgttttttgtttgtttgttgtttgcttttctctggggttttgttgttgtttgctttttttaaaaaaaaattccctttccctgctttttkgtcacagcagcctttgtcacttcaaacaccgcaagtgttctttaaaaaaaattatatcaacctttcaattaaaatgcaacatgtctgaaacttggtatctggagaggtgagttggacaaaggagcccttgttactgcacgttttcattcttcaaatttcaccttgcacgcagtaacagacagtgcacaaagccacttccttatggacggaaattctgaaatccttttatgcctggcctttccatccttcatcttcccctctcccacactgtgaaggatcgtattggacatttttgttttaatgtcagtgacaggggaacacaggtagctctaatatagctgtgacccagatgcttctgtttctagcacgtatttattttgcagcaaacatttacatccatgatgttttactgtcttttgaaaataattaggcaatatctcatctgaggtaggatgtttctaggggttgtgttctgagggaggaaaactaatctgttctctttccactgcattctaggaacagtaagaggaccttgtgcatgaataatttgtttccacactacagagtgggtaataagcagattagtaaaaacaattctgcttcacttcaataacagcctcctccaactcattttttctcaacaaacttatttttccagcagaagaatcccagacttcttagagaacccagtgactttttgcaccttaaatctgtgaaatcctcatgttttcttctgccgtatccatagttcaaacaaagatgaggcaaagctagatgca

SEQ ID NO: 76750 - DNA, 651 bp, Homo sapiens
tcacgagatcaggagatggagaccatcctggctaacactgtgaaaccccgtctctactaaaaatacaaaaaattagctgagcctggtggtgggcgcctgtagtcccagctactcaggaggctgaggcaggagaatggcgtgaacccgggaggcggagcttgcagtgagctgagatygcaccactgcactccagcctgggtgacagagcgagactctgtctcaaaaaaaaaaaaaaacaaacaaaaaaaccggagatttggttaacaaaatagtcaaagtcactcttacagaagttttgttttattttttgttttttaaaatttttttaccattttgtagctgacaagtactgacaataaactgctataagcatgtgtagaaaaaggctcaccttgagtagttaagagtaaggaaaaggaatagtgtgtagcatcgtcttagtggtaagacttaagttgatttagtagcaaatggaagtactagtgaaccacatagatttcagaagtaggagtaaaaggttagaagatgtgtcattttaatcttctctagactttttcttaatttttagaaatgtaagtggactgaacagaggaaaaccaaaacacagctggtcaataataagttaaattaatttgacaaactgcctgctat

SEQ ID NO: 76751 - DNA, 651 bp, Homo sapiens
tcacgagatcaggagatggagaccatcctggctaacactgtgaaaccccgtctctactaaaaatacaaaaaattagctgagcctggtggtgggcgcctgtagtcccagctactcaggaggctgaggcaggagaatggcgtgaacccgggaggcggagcttgcagtgagctgagatcgcaccactgcactccagcctgggtgacagagcgagactctgtctcaaaaaaaaaaaaaaacaaacaaaaaaaccggagatttggttaacaaaatagtcaaagtcactcttayagaagttttgttttattttttgttttttaaaatttttttaccattttgtagctgacaagtactgacaataaactgctataagcatgtgtagaaaaaggctcaccttgagtagttaagagtaaggaaaaggaatagtgtgtagcatcgtcttagtggtaagacttaagttgatttagtagcaaatggaagtactagtgaaccacatagatttcagaagtaggagtaaaaggttagaagatgtgtcattttaatcttctctagactttttcttaatttttagaaatgtaagtggactgaacagaggaaaaccaaaacacagctggtcaataataagttaaattaatttgacaaactgcctgctat

SEQ ID NO: 76752 - DNA, 651 bp, Homo sapiens
tcacgagatcaggagatggagaccatcctggctaacactgtgaaaccccgtctctactaaaaatacaaaaaattagctgagcctggtggtgggcgcctgtagtcccagctactcaggaggctgaggcaggagaatggcgtgaacccgggaggcggagcttgcagtgagctgagatcgcaccactgcactccagcctgggtgacagagcgagactctgtctcaaaaaaaaaaaaaaacaaacaaaaaaaccggagatttggttaacaaaatagtcaaagtcactcttacagaagttttgttttattttttgttttttwaaatttttttaccattttgtagctgacaagtactgacaataaactgctataagcatgtgtagaaaaaggctcaccttgagtagttaagagtaaggaaaaggaatagtgtgtagcatcgtcttagtggtaagacttaagttgatttagtagcaaatggaagtactagtgaaccacatagatttcagaagtaggagtaaaaggttagaagatgtgtcattttaatcttctctagactttttcttaatttttagaaatgtaagtggactgaacagaggaaaaccaaaacacagctggtcaataataagttaaattaatttgacaaactgcctgctat

SEQ ID NO: 76753 - DNA, 651 bp, Homo sapiens
tcacgagatcaggagatggagaccatcctggctaacactgtgaaaccccgtctctactaaaaatacaaaaaattagctgagcctggtggtgggcgcctgtagtcccagctactcaggaggctgaggcaggagaatggcgtgaacccgggaggcggagcttgcagtgagctgagatcgcaccactgcactccagcctgggtgacagagcgagactctgtctcaaaaaaaaaaaaaaacaaacaaaaaaaccggagatttggttaacaaaatagtcaaagtcactcttacagaagttttgttttattttttgttttttaaaatttttttaccattttgtagctgacaagtactgacaataaactgctataagcatgtgtagaaaaaggctcaccttgagtagttaagaktaaggaaaaggaatagtgtgtagcatcgtcttagtggtaagacttaagttgatttagtagcaaatggaagtactagtgaaccacatagatttcagaagtaggagtaaaaggttagaagatgtgtcattttaatcttctctagactttttcttaatttttagaaatgtaagtggactgaacagaggaaaaccaaaacacagctggtcaataataagttaaattaatttgacaaactgcctgctat

SEQ ID NO: 76754 - DNA, 1508 bp, Homo sapiens
agaatgcactgctttgcctgggatgaggaataatttataatggtaactgttgctggttaaaatttggctcctacccacattcatgcaaactcagcattctagattaaaagagatttaagagacttgccaagcaaatgcatggcatccttagatgtatcctgatttgaataaaacagctataaataataatattttggggattattgaaaaatttgactatagattagttttcaggtgatattggagaattaatgttattattgttaggtatgttagcatggtcatgcagcaatgtgtctttctttttaagagatgcatacaaaaatatttgggtgtgaaatgttcttgtcctataatttgctttaaaattcttcagaaaaaaaaagataagcaaaatagaaaaacaagataatgggtacatgttatctatttcttattctccctatttttttgtgtgttcaatttttaaaagaaatttactccatacatatatcccaccccctccactaaggaccctcaaactataaattgctgtgaatataagaaaaagtgaaacaattctatgattttgagagaaagtcaacactgtaggaaaaagagagcccaggatttgggctaaaaatcattaatctgaccctgatcaaccctgtggccttcagcagtaactsagcctctcaggcctttgatttgttgatgtgtaaaatgagggtcattgtcatttagacaacgaccttcagggtatgttttaatgttaaaattcagagtccttccatatcagataagcatcaactattcaatagtttatgctgaagagtacaggggaccaagagaccacccaaatgggttcatgagcccatcatgccacttctttgttggatcactttgggcacctcactaaatttttctgagctaggtcctctgcaccttgcttgtctatcatcaaagggtcactgtgagactataataatataagaggaaagaaatcgtgattattaaggcatatactgaaccacatacctccattggcaacattaaacttcactccaaactctccccctggtcctccagggcagtggctggctgttagaatgattccaccagctgccttgatcttcctgataatgcaggagaccgcagtgtcaacaagatgccattctgtccaataatcagtcgtccaatctaaaccatccaaaaaaaaaaaaatcaatccagttgcttgggattaaaggcatttcaacaggaaagtgccccaggctctgttaacatacagccaatcacttgataaaagaaacagagtaggctttagattaggggaggcagggtagggggagcactgacattgtctctcctatctaatgtctctaagaccatttggtgcacctgcatctagtagccaattattaacctgtaaataggatatgcctcactgatcttcagtcgtttgaaacatctgcttctgataatcgaggggttagcttgaatcacacaagaagttcttagtttgctac

SEQ ID NO: 76755 - DNA, 1172 bp, Homo sapiens
attgcaattctacaatctatgtgaacgatgccaaacaaactctaaagtatgtcatgtctatagtaaacacaattctgttcccattgctcttgcaaggttataagcacaagagcaccaggtaaaatcacagaacaggcgtttccaggtgccacgcccactatacaaagtgagatggctgtaatatttatggctgaggtcctggtggggagcctgtggagaaatgcttctcccagaataacactgtgggcacacagttgtgcttaatgaccactgatgggtcgtgatgggcccttctgtcatcatcacaatacatgttaagggaggcttccggtttgtgagccttgctagtgtgcagggctactttgcttctgatgagcgcttgtctctgaggcatctgcagagcttggtgatctgcccaggaatgagctcatacattctgcagattccagggaacagacaagagcaacagcattgaaagaaccaagcgaaggtaccggctagagtctctgattctgggccagccctcctgcagtgtggcctgggcagtggatgtccccaccaatggacacagctatctttaatttcaaacttaaccctgagtgcacaggacctgaacttttgtccttggaggaggtaaagccaaactctggctaaagattgagaaattcacaataaagaatcccagatatgattttttccccctcatttgaactttcaaacatggtcataaatcatcctggatttttcttccacagtctgccctcttctgggaaggttttaagatggggcgggattgtgagcggatcttccttactatagagattggatggctgggataactgggatccggggttcatggggcctatagtccaaagtacattttacctaagctcagggctgtgacctggggtgggggtactttcctctttcttgccttgctgattatccattctcctcaggtgcaggaccctgaagaaggcatccatgtccaattatgagcatgcactattatctcattagtaagcacacaagtcacccaggcatctttgaaccagcagttccttcccgagtcaacaggtctggggcgaggcctgggaccgcatgtctaaccaactgtcaggggatgctgatgttgctccagggactacaaactgcataaraagggcccaggg

SEQ ID NO: 76756 - DNA, 888 bp, Homo sapiens
aaacccatgaaacacattctgtgtgtatatgtctttattttttgggcgcctgtaatcccagctacttgggaggctgaggcaggagaatcgcttgaacctggaaggtggaggttgcgccattacactccagcctgagcaacaagagtgaaactccatctaaaaaaaaaaaaaaaagatataggagtcattggctaggcgcggtcgtcacgcctgtaatcccagcactttgggaggccgaggcagatggatcacctgaggtcgggagtttgagaccagtctgaccaacatggagaaaccctgtctctactaaaaatacaaaattagccaggcatggtggtgcatgcctgtaatcccagctactcgggaggctaaggcaggagaattgcttgaatccaggagtcggaggttgcagtgagctgagattgcaccattgtactccagcctgggcaacaagagtgaaactcctcttaaaaaaaaaaaaaaaaagatataggattcattgaaagaggtaaaatggttgactggtgcctaatgaagtgtgtagaaatctagtctaacctctccagatgtgactgtagaggactatagataccaaataggcagagaaacaattctgcctgcacatttaggaaacaaaatccactgtgcagcacaattgtgagttgactggaagcctgagagagaaaggcccctctagagtaaaccttggttgtcaccttacatgtttatattacgtctggtaattctagacagtgtttgggaaatrtaattaaaataaaaattttccccagccccagagtaacttcacaatgatagaatagaaaaaaaaaaaaaaaaaacaaaaaaaaaactgttttactacacaattaaatcagaatgtgacatgca

SEQ ID NO: 76757 - DNA, 1623 bp, Homo sapiens
gaggaagttaactacttcattatttttaagacatgcatggtctaaggacaatcaaccactggaattcctaaatcaaagactcttttagtgacaatagaggattgctagattgcagtaggactctctagatttaattaaaaaaaaatatttaaaagaataacaaacatgttttccctctcagattctccctctctctacagttctcaccaggaccctgacagcctgacaacatcaatgtattgcacatcctgaggcactaggtcaactgcaggaatctatcacagctgttaatgttttatcttcacttgaaatttcagaaatgcaaatgcaatgtaccaacagctgttcacactttcaattttttcttgcaaagcaggtcatgaaatgtggctcgctaaacatttgtaacacagttaccaatttgtgtttcaagrcctataaatactgctgccactagtgtacaatctgatttcactgcccagtagtgaaacagtgcggctagaggtccaccaggaaggagatatgtctgcttattaaggaactggggcaggctgggcactgtggttcacgtttacaatcccaacactttaggaagccaaggtgagcggatcacttgaggccaggagttggaggcctcttggccaacatggcgaaaccccacctttactaaaaatgcaaaaattagccaggtatgcttgcacacaactgttgtcccagctactcgggaggctgaggcacaagaattgcttgagcccaggaggcagaggttgctgtgagccaagatcgtgccactgccctccagcctgggtgacagagcaagactctgtctccaacaacaacaaaaaaggaaatggagcagactgatagctaaaacacacgccacaacagtctgtttaaattagaacatagatcgactaacatttatgcatccacacatcaaattagtgagcaatatgaattctcaatacgtgcacctaattaaaatttgtgaggacctattgttttgtaatctactaggatttcataagacacaaaggaaaaatacctcaagatacaatctctctcctctaaagtaaacacaccaacaggataactcttaaaattattccacattatcaaccactttgaaatcctaatgaaagttatggatcttctccccagaaatacatgcagataaacacatcttgcatataatctcttttttttttttaaacagagtctgattctgtcactcaggctggatagtaatggcgtgatctcggctcactgcaacctctacctcctgggttcaagcgattctcctgcctcggcttcccaagtagctgggattacaggcacatgccaccacacccagctaatttttgtattttttagtaaagacagggtttcaccatgttggccaagctggtcttgaactcctgacctcaagtgatccactcgcctcagcctcccaaagtgccaggatttacaggcgtcagccaccatgcccagcctatcttgcatataacttcaaggggttaatagacctcctgaaccttttgaatgggcctcagattaggaacccctgattaaaacaaatatatttaaaggtaaaccaaagaaatgtgggtttcttagttgtaa

SEQ ID NO: 76758 - DNA, 603 bp, Homo sapiens
agttaaacatggtttgtccataagattggaggctgcacttgaatacggtttgtctgtaagattggaggctgcagttaaataaatacggcttgtcgtaagattggaggctgcagttaaataaatacggtttgtccgtaagattggaggctgcagttaaataaatacggtttgtccgtaagattggaggctgcagttaaataaatacggtttgtccgtaagattggaggctgcagttgaatacggtttgtccgtaagattggaggctgcagttgaatacggtttgtccgtaagattggaggctgcagttaaataaatacagtttgtccgtaagattggaggctgcagttaaataaatacggtttgtccgtaagattggaaggtggaacggtccttaaattaaagtgcatttggtaggaaytgatggctgagttgttttaaaggacacacagccaggtgggtataagatctcaatttagagaactgaaaacccaggcacacagcagacacgaatggcatgtagggtttgtcgctgacaggatagttgtgggccgccaccatgtggggatatcagctcagctgggatgggcctgtcaccctcacgca

SEQ ID NO: 76759 - DNA, 603 bp, Homo sapiens
agttaaacatggtttgtccataagattggaggctgcacttgaatacggtttgtctgtaagattggaggctgcagttaaataaatacggcttgtcgtaagattggaggctgcagttaaataaatacggtttgtccgtaagattggaggctgcagttaaataaatacggtttgtccgtaagattggaggctgcagttaaataaatacggtttgtccgtaagattggaggctgcagttgaatacggtttgtccgtaagattggaggctgcagttgaatacggtttgtccgtaagattggaggctgcagttaaataaatacagtttgtccgtaagattggaggctgcagttaaataaatacggtttgtccgtaagattggaaggtggaacggtccttaaattaaagtgcatttggtaggaattgatggctgagttgttttaaaggacacacagccaggtgggtrtaagatctcaatttagagaactgaaaacccaggcacacagcagacacgaatggcatgtagggtttgtcgctgacaggatagttgtgggccgccaccatgtggggatatcagctcagctgggatgggcctgtcaccctcacgca

SEQ ID NO: 76760 - DNA, 484 bp, Homo sapiens
cccttcctggccaggctctgccctcctccrttggggcagtgcctactctcctgctgtgctggcccggggtcaggagccctcctgtcattggcaggccctgggtggctcctgtgctgggactgacagaacaggggctcaagagagtgtcacctgctccccagagccacccctggcctcgtgtgaagggaagggagggccctggcattggactttgacacagttgccagactgcacaggaaggttgtgttttggattaaatttgtggagatcagctccgggtggtttagcaaaagccacagtcacctgcgtagtcatccagggtgctgggatttggggtggggcgggcggtgctctgagatgacttagtacagggcagggtccctcaggtcagaggctggctgtggggctggagtggcctccagggcaccggccactggtctgcaggacatggcaatctggacagcaatgggagacagggctgtgg

SEQ ID NO: 76761 - DNA, 484 bp, Homo sapiens
cccttcctggccaggctctgccctcctccattggggcagtgcctactctcctgctgtgctggcccggggtcaggagccctcctgtcrttggcaggccctgggtggctcctgtgctgggactgacagaacaggggctcaagagagtgtcacctgctccccagagccacccctggcctcgtgtgaagggaagggagggccctggcattggactttgacacagttgccagactgcacaggaaggttgtgttttggattaaatttgtggagatcagctccgggtggtttagcaaaagccacagtcacctgcgtagtcatccagggtgctgggatttggggtggggcgggcggtgctctgagatgacttagtacagggcagggtccctcaggtcagaggctggctgtggggctggagtggcctccagggcaccggccactggtctgcaggacatggcaatctggacagcaatgggagacagggctgtgg

SEQ ID NO: 76762 - DNA, 1406 bp, Homo sapiens
cctggctctggggccaggccaggccttggcccgctgatagacctcgaagatggccatcatcttttctccttacctcagtgtccttggctcggggcccagggaactggcagcctggtctccggcatcggatgggaccggggggcggggagggggtgaatggggcagtgatttgaagaggggtcgcggaggctgggcctgaggcgcggctgtcctcaccgctcccgcagacagcgtggacgatgaatttgaattgtccaccgtgtgtcaccggcctgagggtctggagcagctgcaggagcaaaccaaattcacgcgcaaggagttgcaggtcctgtaccggggcttcaagaacgtgagtgcaaggcgaggccaaactcagcgagggtgggacaggaggacccaagccggtccacagcttcccagaaagcatggcttggatgcttgaggtgygggcggaagggaggcaaggccctgagactgaacttctagctggaggttctggggcggggccagaacggaagtggcgcctgtagactgtcagtttcgttccatgttttttatttgtgcactgggaaagaagtcttccctcccatcacatgagccacgtggtgagtcctctggaggcttgaagattatccccctccctgggagtcttgggccatggagggtgggggcggtgaacggaaggggattttgtctctgccctcagcctggtgccctctccttccaggaatgtcccagcggaattgtcaatgaggagaacttcaagcagatttactcccagttctttcctcaaggaggtgaggggacaaggcccaaggggaagcagttgtccttctctaggctgagggagggagggattctggaggagctgggaatgccaaggtgatggggggtatggggagctccttagagggaggaagtcctctcctgtgtggaagccaacttctccacactcaccctgcagactccagcacctatgccacttttctcttcaatgcctttgacaccaaccatgatggctcggtcagttttgaggtgagctgggcgaggtgggccagggaagcctgtttcctggagttcagggccaggatctccaggccaaacccagagaaggagttgggtgaagagtacccgaggacacagctccctcctgcctccttcccaggactttgtggctggtttgtccgtgattcttcggggaactgtagatgacaggcttaattgggccttcaacctgtatgaccttaacaaggacggctgcatcaccaaggaggtgcagggcaactgaagggctgggggtctgtggcggtgatgggggtggcgtgcagagggtgatgggagggaaatatgacccacatatgcccacaagcaagggatcaagggaggctggaggctctgaggaa

SEQ ID NO: 76763 - DNA, 986 bp, Homo sapiens
tgcataattgactcttcctctacccgcttctttcacatgtaaaatatggattcagtgactgctgatcaaagcttcaaaagaatgcaattgcttttctcttttatttaccctacccccttttctttccactttcccttactgcctgctctttcccctttaaatacaaaagttctcaaaccctgtttggaaaaagcacrgatcacagatgttcctgtgattttgtgttcctttttgccaggcacatgctcaattttggcaaaataaacctgtaaaatgattgagacttacctccgtcacgtcgtttgatttacagaacacattgtcatttggcatctcaagggtgttgtgactttcggagtgtctgaagcttgcttcctgggctgggcagtatttatttcatgaaggacaacagcagtcacagcagaggaaaagcattttccttaagtggcttgtgggtgatagacaccaactaggaaggtggagcagaggaacagaagaccattattgcgtgcgtgtaagacatctctagagacatctgaaaataagtgaaaagcataggcagagaactaagatgagccattgaaatgagggaattaatgctaatgtgaacctatttgtaccagttacaggttgtggggagttaaagaaacctatgttaaacataccagccattttagggctttttcctcttactgccccctctgtctggacaccttcaccaccaccaccaccacgttgccaaagtgggaatatgctaaaatgtggtgcacctggagttacgcagtaactttgcaatagagataacagagtatcccaattactgaccctagtcagggttgttgactctaatcacacttgaaagctgttttagtctgtttgtgctggtataacagaatttctgggactgggtattttatagaagagaaatttactttcttataattctggaggctgtgaaatccaagatcaagagaccagcaggttca

SEQ ID NO: 76764 - DNA, 986 bp, Homo sapiens
tgcataattgactcttcctctacccgcttctttcacatgtaaaatatggattcagtgactgctgatcaaagcttcaaaagaatgcaattgcttttctcttttatttaccctacccccttttctttccactttcccttactgcctgctctttcccctttaaatacaaaagttctcaaaccctgtttggaaaaagcacggatcacagatgttcctgtgattttgtgttcctttttgccaggcacatgctcaattttggcaaaataaacctgtaaaatgattgagacttacctccgtcacgtcgtttgatttacagaacacattgtcatttggcatctcaagggtgttgtgactttcggagtgtctgaagcttgcttcctgggctgggcagtatttatttcatgaaggacaacagcagtcacagcagaggaaaagcattttccttaagtggcttgtgggtgatagacaccaactaggaaggtggagcagaggaacagaagaccattattgcgtgcgtgtaagacatctctagagacatctgaaaataagtgaaaagcataggcagagaactaagatgagccattgaaatgagggaattaatgctaatgtgaacctatttgtaccagttacaggttgtggggagttaaagaaacctatgttaaacataccagccattttagggctttttcctcttactgccccctctgtctggacaccttcaccaccaccaccaccacgttgccaaagtgggaatatgctaaaatgtggtgcacctggagttacgcagtaactttgcaatagagataacagagyatcccaattactgaccctagtcagggttgttgactctaatcacacttgaaagctgttttagtctgtttgtgctggtataacagaatttctgggactgggtattttatagaagagaaatttactttcttataattctggaggctgtgaaatccaagatcaagagaccagcaggttca

SEQ ID NO: 76765 - DNA, 1409 bp, Homo sapiens
tagtaggattggtatctggtacaggtagttctctgcttcaaagatagcaccttgttgccgtgtcttcacatggcagaagagatggaagggcaaaaagggcctaagctagtttcctcctgctcttttataaggccctgatccatttatgcggcagagccctgatgacaatcacttccctagaggccccacctcttaatactaccacagtggggattaagcttcagcatgaattttggccccattcgagccatagtaggcacttaatggggtaattcttgtttgacttttcaaagccttgccagattgatccttcattttacccataaactgctgagactcaggttaagaaacttgcccagtttgcgggtttattgcagcaagacagccagacccacatactggggtaggacaggctctgtgggggcagatgcgacaagcagaaaccaaagtagcagaatagaagtgcaagtccacagaaaagagagttcaaggaggctctgcgtctccatgtctcctgccctgctcaggaactcaccctggagctctctgccggctccagggctgacagagcccactaagacctaccaacctgggcgcccctccagctccaaggaaggaaatatctttggctgggttgacagggcccagctgaggttctctgaccttgtgcaacccatcaagaacaagaaggtctcacaaggagaagggtctcacaaggagaggtgcagagccaacgcttgaggctaccatttccatcctccccaggcactggtagcgattaagtttcagagtccaaagcactggcgataaatggcagtagaactcagtgtaacctcccctctcgtggcctttccttccactcacctcaggggctgcaggccaggctgagtggtgagtagtttgggcttgtggtggagtttgtgaggtgagggtaaagagaagggtgggcctgatctgagagaggtggctgtacacacaaagtgcaacaagagtgcctgatggttcatgcttgtggggtccgcccctagagtgctcctttgtttagcttgctttgtgggtggcttgttgaccctggtggcagtctggccttctatcctctggggagttatggcggaagtggtgctgtggaggctgctgtggctgttggagggcatggcaaggcactttgaggggtgataaagtgagaatcctttccaggtgaaatccaaactcccttttgggactttgagaaaagtagagtgttggagttcagaaagattactatagtcagaactgtcatcgggtactgtggcttgtgtaagggtgttattcacaagcatccataggtggtagaaawttgtatcaatatgtctgggacttcatgccataggctgggtttcctgaagaggaggtagggagtttgtcatgca

SEQ ID NO: 76766 - DNA, 1409 bp, Homo sapiens
tagtaggattggtatctggtacaggtagttctctgcttcaaagatagcaccttgttgccgtgtcttcacatggcagaagagatggaagggcaaaaagggcctaagctagtttcctcctgctcttttataaggccctgatccatttatgcggcagagccctgatgacaatcacttccctagaggccccacctcttaatactaccacagtggggattaagcttcagcatgaattttggccccattcgagccatagtaggcacttaatggggtaattcttgtttgacttttcaaagccttgccagattgatccttcattttacccataaactgctgagactcaggttaagaaacttgcccagtttgcgggtttattgcagcaagacagccagacccacatactggggtaggacaggctctgtgggggcagatgcgacaagcagaaaccaaagtagcagaatagaagtgcaagtccacagaaaagagagttcaaggaggctctgcgtctccatgtctcctgccctgctcaggaactcaccctggagctctctgccggctccagggctgacagagcccactaagacctaccaacctgggcgcccctccagctccaaggaaggaaatatctttggctgggttgacagggcccagctgaggttctctgaccttgtgcaacccatcaagaacaagaaggtctcacaaggagaagggtctcacaaggagaggtgcagagccaacgcttgaggctaccatttccatcctccccaggcactggtagcgattaagtttcagagtccaaagcactggcgataaatggcagtagaactcagtgtaacctcccctctcgtggcctttccttccactcacctcaggggctgcaggccaggctgagtggtgagtagtttgggcttgtggtggagtttgtgaggtgagggtaaagagaagggtgggcctgatctgagagaggtggctgtacacacaaagtgcaacaagagtgcctgatggttcatgcttgtggggtccgcccctagagtgctcctttgtttagcttgctttgtgggtggcttgttgaccctggtggcagtctggccttctatcctctggggagttatggcggaagtggtgctgtggaggctgctgtggctgttggagggcatggcaaggcactttgaggggtgataaagtgagaatcctttccaggtgaaatccaaactcccttttgggactttgagaaaagtagagtgttggagttcagaaagattactatagtcagaactgtcatcgggtactgtggcttgtgtaagggtgttattcacaagcatccataggtggtagaaatttgtatcaatatgtctgggacttyatgccataggctgggtttcctgaagaggaggtagggagtttgtcatgca

SEQ ID NO: 76767 - DNA, 947 bp, Homo sapiens
tgagttgggaagttttccagtctggctggtgggaacaggcaccattcccaattctgtgtttgcgtttggcactattagtctttctggtccttctttccccagacttgggcgtattcctctcacacatgcacagaccactgaacactcaactgggaccccctgcagaccactggcctctttctctgtgcgtctctttccttctggaactctgtgctctgaagtccagccacctgggctccctgacctttcctctccaaccctcaactcagtcttcttggttctgcctgggtccctattccctgtgctacagcctgaaaactccagaaaataatcgggaaaaatctgacagcatgcttcttcccatctcccagagatgactgtctctcctctgatgcgcaatatcttggaaaccatggtttcacagatgctgtccacatttggttgtttatgcaaggagacagctttgttaccgtgtcgtggctgaacgtgaaagcctctcctcatcttctcaggacattcagcagctgtggctccgtcccctcttcattatcrttcttgtttatttctgccttatctctttttgggatcagcctcaccaaagatttgtcatttttattaatatttttcaaaagaccattttttgaccttgctgaccctctctattatctatgtctttcccattccattaatttatcttatctttattattaatgtcatcattctattattctaggttgggtttattttgctaggtgtttttttctaatttctaatgatgggtgctgaagtcattacttttcagctctcttttatcttcatgtggatatctgaggccatagcttctttcctaagtgttgctttcattgtatgccacaagctttccctagcagtcattcatttccatcaacttctatttttctaacctcattattttttttatttgatgc

SEQ ID NO: 76768 - DNA, 947 bp, Homo sapiens
tgagttgggaagttttccagtctggctggtgggaacaggcaccattcccaattctgtgtttgcgtttggcactattagtctttctggtccttctttccccagacttgggcgtattcctctcacacatgcacagaccactgaacactcaactgggaccccctgcagaccactggcctctttctctgtgcgtctctttccttctggaactctgtgctctgaagtccagccacctgggctccctgacctttcctctccaaccctcaactcagtcttcttggttctgcctgggtccctattccctgtgctacagcctgaaaactccagaaaataatcgggaaaaatctgacagcatgcttcttcccatctcccagagatgactgtctctcctctgatgcgcaatatcttggaaaccatggtttcacagatgctgtccacatttggttgtttatgcaaggagacagctttgttaccgtgtcgtggctgaacgtgaaagcctctcctcatcttctcaggacattcagcagctgtggctccgtcccctcttcattatcgttcttgtttatttctgccttatctctttttgggatcagcctcaccaaagatttgtcatttttattaatatttttcaaaagaccattttttgaccttgctgaccctctctattatctatgtctttcccattccattaatttatcttatctttattattaatgtcatcattctattattctaggttgggtttattttgctaggtgtttttttctaatttctaatgatgggtgctgaagtcattacttttcagctctcttttatcttcatgtggatatctgaggccatagcttctttcctaagtgttgctttcattgtatgccacaagctttccctagcagtcattcatttccatcaacttctatttttctawcctcattattttttttatttgatgc

SEQ ID NO: 76769 - DNA, 524 bp, Homo sapiens
tgctggataaatgttagcaattattatcacagtcagttaagtgatttccccaagatgagaagacctcttccctgaaggaggccatggttcagccagacaaagacacaactaccccccaataatagcagcctctccacaccccagcactggactagtcacacaggattctatgcatgtgggctcagtccttcctcacragacctcacctcaccgctcactgctggggccaaaatacttgaccttgcttccatggcagggtcaaaggaaaggcccacagtaccagccacagtcattcctggaagggagacctttccagttgaggaggctcgtagatggactctggtgatgatggaatagaggaaggacaagccttagacaggcttgtgggcaagtggctctcaactgagggcatctcccaggtgttccagtagctaaggacactgccagcatttgagggagcaggtttcaagaagaccctgtgatccctgcgccatggtgctccccctgggacactgccctctcca

SEQ ID NO: 76770 - DNA, 1486 bp, Homo sapiens
ctggtagttaagacaagagtagggaagtgggcaatgccactcttttctcagggcctgcagaggcccccacagcacagaggcgaggccccccaactctgcacccagggcccctgagaatggcagagtcatgggtgggaagctggtgacagccacagcctttctgagagctgggaaggaccagcaggacagctggagccttgccgctgagagcttccataattagaagcaaaatcaaagaaaagcccagtccagtgatggcttcaaacaggattatttttaagtcatctaatgccagggcttgtcagatggggaccatgattagatgggtgtgtgtgtgtgtgtgtgcgtgggtgcgtgcgtgtgtgtataagtgtgtgtgtgcatgtgtgtacacatgtgtgtgtgtgcttttaattttcctacaaagatcacttgcgttttcccagagcccaagcatctcacaagactccaatgacgcttcccgtgagtgccactgacgtgcagtttgagctccactggggcttttccctggagtcagggtggcccatgggactccttcagtcacaggcttactgagtgggttggggccaggaccatcctcccaaagattgtggtccaggaaagcccaagttccagggttgctcagaagagcaaggagcaaggacatccttctagagccttcctgataaggaaggctcacccccaggacacaggatttgagctgtgctgcctgggaatggggactctccagggatcaagcttgggggcaaggtccaatgcacctagtgtgtagcagagagagcctctcgttcctcctctttgatgtgggcaaacccgagtgaactctgccgggtcatacttcattaaatgtcttcagtctatgacctctatctctctaccctcccgggccgggaccccctgcggccaccttcccctgccctgggtggctcagggtgcagcccagcctcacctgctggcatcctgggcaggtctggacagccaccctccacagcactgtgctctttctctgactccttcttagtgtctccaccctgagcctccatcccrttgcctgagcctcctgcacacaacccttgtgaattgaacttggttccctgccagcccctccaaccacctggccttgtctcccagacagcagcagctagtgatcgggccagctgctgtccatcaaggaagccaggcccaaagaaagagctaaagcacatcgccagggccccgtcccagctctggaacttgctggaaatgagagaagccaaggtgatattgtccagcgaaggcaccatggatcctccaggagcggggggcccatgcgtttccacaggcgttgggggatgaacccggtgcatactgaagctcgcactgcatccctgcagcagaggctgtgccgccctgcggctgggtcctgagccttcctggggggatgtcagtgccatcctcttgaagggaaactgtgagcaggatgaga

SEQ ID NO: 76771 - DNA, 1486 bp, Homo sapiens
ctggtagttaagacaagagtagggaagtgggcaatgccactcttttctcagggcctgcagaggcccccacagcacagaggcgaggccccccaactctgcacccagggcccctgagaatggcagagtcatgggtgggaagctggtgacagccacagcctttctgagagctgggaaggaccagcaggacagctggagccttgccgctgagagcttccataattagaagcaaaatcaaagaaaagcccagtccagtgatggcttcaaacaggattatttttaagtcatctaatgccagggcttgtcagatggggaccatgattagatgggtgtgtgtgtgtgtgtgtgcgtgggtgcgtgcgtgtgtgtataagtgtgtgtgtgcatgtgtgtacacatgtgtgtgtgtgcttttaattttcctacaaagatcacttgcgttttcccagagcccaagcatctcacaagactccaatgacgcttcccgtgagtgccactgacgtgcagtttgagctccactggggcttttccctggagtcagggtggcccatgggactccttcagtcacaggcttactgagtgggttggggccaggaccatcctcccaaagattgtggtccaggaaagcccaagttccagggttgctcagaagagcaaggagcaaggacatccttctagagccttcctgataaggaaggctcacccccaggacacaggatttgagctgtgctgcctgggaatggggactctccagggatcaagcttgggggcaaggtccaatgcacctagtgtgtagcagagagagcctctcgttcctcctctttgatgtgggcaaacccgagtgaactctgccgggtcatacttcattaaatgtcttcagtctatgacctctatctctctaccctcccgggccgggaccccctgcggccaccttcccctgccctgggtggctcagggtgcagcccagcctcacctgctggcatcctgggcaggtctggacagccaccctccacagcactgtgctctttctctgactccttcttagtgtctccaccctgagcctccatcccattgcctgagcctcctgcacacaacccttgtgaattgaacttggttccctgccagcccctccaaccacctggccttgtctcccasacagcagcagctagtgatcgggccagctgctgtccatcaaggaagccaggcccaaagaaagagctaaagcacatcgccagggccccgtcccagctctggaacttgctggaaatgagagaagccaaggtgatattgtccagcgaaggcaccatggatcctccaggagcggggggcccatgcgtttccacaggcgttgggggatgaacccggtgcatactgaagctcgcactgcatccctgcagcagaggctgtgccgccctgcggctgggtcctgagccttcctggggggatgtcagtgccatcctcttgaagggaaactgtgagcaggatgaga

SEQ ID NO: 76772 - DNA, 654 bp, Homo sapiens
gtccctggacaggtttttttttttttttgagacggagtcttgctctgtcacccaggctggagtgcagtggtgcaatctcagctcactgaaccctctgcctcccaggttcaagctattctccttcctcagcctcctaagtagccaggattacaggtgcccgacatgatgtctggctaattttagtatttttattagagatggggtttcaccatgttggttaggctggtctcaaactcctgacctcgtgatccaccagcctggacctcccaaagtgctgggatgacaggcatgagaccccgtgcccagccccctgcagaggttttaagctgtgattgcatttttggttctcctgcaacctttgcttgtctcctgttggcaacgtttattgtctttttatctcactcatttccttcttgtggttttctgcccctgattttcagaatgctgcagcattcattttgcatccaaccaagaatgcatgttttttagtatattcttccagttttagtgacaatccctgtccaaaagtcttttcytctagaatcttccagtgaaagctgtttattaattaagacaaccattacataatacatctcatacacagagcgtgtatgaaacacacacatgaatttaagtaatcataacaaaacgagg

SEQ ID NO: 76773 - DNA, 1299 bp, Homo sapiens
ccgtgagtaaagatcaacagctccctaaggaggggaagggtcctggtgcagggagtggtccctgcagatgctgggctggggaagagggagagcagagtccagccatgtccacagcggcttccaccccagctctttccatccttgtcctcctgccatcgggaggccactgggccatgcagggagaaggccaggggtgagtgggcagccttagaggtgatcctcccagctgtaggataatgtgtggagttcaggctgtcaagctgacatcttccattaaggctgcagtacatttttaatacattccatttttctttaatttcagatcatattgagtctagtagactctccctttatgactgagttgtgcatcattaactgttagaacggtcttggcaaagcacsggggcctcgttaacccttccagtgactcctccctgggaatccaggctctgtggtttggtttaaagacaagagacgtgaaattgcctctccagaccacaaagaaaaggctggatcacgacattcaccctcttgtcccctccccctgcatgccctccatctccctgggggacctgggctgggagatggtgacgaggctctacccctaaatagggagccctcacctcatgtcctgtcacttctctgttctggtccagaccccccgcctcctctaacaagggtcttagtggactgaacaggtccaaccacctccccaaccctgtatctcaaatcagaaggtctcaacagtttccactggatctaaccctgagttaagccccatggaagaaacaaggaaatgggccttctgttcacagagacatcaggattttagtgggaaaacacttgacccagagcaagcctggaccacgcacactaagtgtagtcagggctgggagaaaattgggcttgccatgggctgctacaggcacaacaggcttcctggacgagggggacctgtggacctcattctgttctgccctgtgtgctttctggtcagtcttatttgtccaaattggccgtagtgctcgttaacagtggatcttctttctagtatttccttggaacaaaggaaggaataagtaatgaatgaagagaaggaagaagcaggagggagggaagaagctgagcacccactgtaacatccctgccctgggggctctgggaaatgggaggaagcgaaatggtatctgtttcttccctgctatgggaatgtccatgtcccaactagacctgaagcaagctccttgctggctcccttgccgccctcagcctgtcttctcccttcaaactggttgccag

SEQ ID NO: 76774 - DNA, 1299 bp, Homo sapiens
ccgtgagtaaagatcaacagctccctaaggaggggaagggtcctggtgcagggagtggtccctgcagatgctgggctggggaagagggagagcagagtccagccatgtccacagcggcttccaccccagctctttccatccttgtcctcctgccatcgggaggccactgggccatgcagggagaaggccaggggtgagtgggcagccttagaggtgatcctcccagctgtaggataatgtgtggagttcaggctgtcaagctgacatcttccattaaggctgcagtacatttttaatacattccatttttctttaatttcagatcatattgagtctagtagactctccctttatgactgagttgtgcatcattaactgttagaacggtcttggcaaagcacgggggcctcgttaacccttccagtgactcctccctgggaatccaggctctgtggtttggtttaaagacaagagacgtgaaattgcctctccagaccacaaagaaaaggctggatcacgacattcaccctcttgtcccctccccctgcatgccctccatctccctgggggacctgggctgggagatggtgacgaggctctacccctaaatagggagccctcacctcatgtcctgtcacttctctgttctggtccagaccccccgcctcctctaacaagggtcttagtggactgaacaggtccaaccacctccccaaccctgtatctcaaatcagaaggtctcaacagtttccactggatctaaccctgagttaagccccatggaagaaacaaggaaatgggccttctgttcacagagacatcaggattttagtgggaaaacacttgacccagagcaagcctggaccacgcacactaagtgtagtcagggctgggagaaaattgggcttgccatgggctgctacaggcacaacaggcttcctggacgagggggacctgtggacctcattctgttctgccctgtgtgctttctggtcagtcttatttgtccaaattggccgtagtgctcgttaacagtggatcttctttctagtatttccttggaacaaaggaaggaataagtaatgaatgaagagaaggaagaagcaggagggagggargaagctgagcacccactgtaacatccctgccctgggggctctgggaaatgggaggaagcgaaatggtatctgtttcttccctgctatgggaatgtccatgtcccaactagacctgaagcaagctccttgctggctcccttgccgccctcagcctgtcttctcccttcaaactggttgccag

SEQ ID NO: 76775 - DNA, 744 bp, Homo sapiens
gagattacaaattgggtacagtgtatactgctcaggtgataggggcacgaaaatctcacaggtaaccactaaagaacttactcatataaccaagcaccacctgttcccccagaaacctatggaaataaaaataaaataaaataataaaataaataaaaagaaattatgcatgcttctaaccttccaacattattatacaattcaaaatgtatgttatacaaattcaaaaacttgctttaatgtcaaaaaaaaaaaaaagtctgcattccagcctacaagaagggggtggggagagtccaagtgctgtgcaaacagtgcctttttcaaaatacctgactgggaaatgcccacattacttccactaacatctgattggcccagatgtagtcgtgtggacacacctagctacaaggaagctggaaaatgtagtctttggaagggcagccatttgtaagcaaaaactccaggtgttctattatcrcatggaataagaggaaaaggatactagaagaaagttcaccatctctgccacaatatttttttgcctacttttctatagagtttttgtcttgcatttgttaataaggagttctttatgatttacatactaatgttttgaaggttgtgtgcatacaaatatcatcacatttttaattccctatataaataaaatatcattcattatattcatggtatcattatctataacaatattttaatttaacacattttcaagattaatca

SEQ ID NO: 76776 - DNA, 744 bp, Homo sapiens
gagattacaaattgggtacagtgtatactgctcaggtgataggggcacgaaaatctcacaggtaaccactaaagaacttactcatataaccaagcaccacctgttcccccagaaacctatggaaataaaaataaaataaaataataaaataaataaaaagaaattatgcatgcttctaaccttccaacattattatacaattcaaaatgtatgttatacaaattcaaaaacttgctttaatgtcaaaaaaaaaaaaaagtctgcattccagcctacaagaagggggtggggagagtccaagtgctgtgcaaacagtgcctttttcaaaatacctgactgggaaatgcccacattacttccactaacatctgattggcccagatgtagtcgtgtggacacacctagctacaaggaagctggaaaatgtagtctttggaagggcagccatttgtaagcaaaaactccaggtgttctattatcacatggaataagaggaaaaggatactagaagaaagttcaccatctctgccacaatatttttttgcctacttttctatagagtttttgtcttgcatttgttaataaggagttctttatgatttacatactaatgttttgaaggttgtgtgcatacaaatatcatcacatttytaattccctatataaataaaatatcattcattatattcatggtatcattatctataacaatattttaatttaacacattttcaagattaatca

SEQ ID NO: 76777 - DNA, 889 bp, Homo sapiens
gttgagcccargaatttggggttacagcgagctatgattgtgctactgcactctagcctgaatgacagagtaagactctgtctcttaaaaatgtatgtgtatgtgctctaaacaccataattttagaaaaaaattgtcaggtttgcttttaaaaagaaagaattgactatattctatctataataaacttgttataaatatacagatacatgagaagaaagctgatggataaagatataccatataaacaatatgcataagaaagctggaatagttatactaatatcagacaaagaagactttcgaaaaggactgtcacaaggaatgaacaggcacattgcataatgattaagggtcagtttgaaaacttcctccttccccttgtttttgctattgttttcctatatttaacttccgtgtacgttataaacttcacaatacatttttttcatgtatctaggttttcttatatgtaaaatatggcagagtaatcaaatagtacatcaggagatgcatttttaacaaagtattttaacttaataagtaaaaaaaaaagaataaaatgtgaaaaaacaaaatcaaaaagttaacagactgagaaataaaatatgttctctttttctacctagataggaatacaatctggaaatcaagttagaattcagaattcttgaattcttctgtgttttctcatgacatttttaagagcaattacacctgtagtaccccttttttctcctataggctgtgatcatagagctcttcttaattgtactctctgcttatttttacttctttttaattctacctcagctttcttctgctattcctagaactaaacccatttcctgagttctggtcttatgttcatctgaaatatcttgaattt

SEQ ID NO: 76778 - DNA, 985 bp, Homo sapiens
tgcagctctgcttactttgaaacaaggcttaactggaaataaaaatactccttttcttataatctagctgctgtctcaattaagccgatgagatcaaagtcagctttagaagtccattcattcaattccatgttgatgaggctctgaacagcccatgtgagtttaaacaacaaaacaacaattagaaagctacacaatgcaaaacctttgcttattgttctctctggttcctactgtcactgaaaagggtgaaatcctttcaaaagatttaagataagttgaaggaagggttaatgttgtccacctacaagatagcattattatctttattttgcaagtgagaaaaccacaggactttacctcctatgctgaacacacattggttatacctaggatgagcaaagccctaccatggtagcttgggctataaaaaaagggattatttctgccctcaaagattacattrttatctttcaggagggagaacagttctaaatgatggtccatgtggtccttctttattctgtgcatctatgagtctataagttagcaatttctataaaccaagacaatcaaaagtagattacacaggaaagttacacagagtaagagaaaacattcaagtgcagcaatggaaaggtttcagggaggaagtgacatttgcattgtggcagggataggttgaagtttacacactttgactcatgtaactatttttgtataaaaatagttgagttgagcagttcaactcaaattgttcatgagctttaattcctacctttcaggggtcaacagactcaattatgccatttcaagattgttccatcattttttatttaaacttaatctcttatagtttttctatttttttctctgaacaaatttccagcatgttttgttttgttgtttgttgttttcagcatctctgcccactctttttttttctttctccccttaaacctgatctgaagtcccaaggggatcc

SEQ ID NO: 76779 - DNA, 563 bp, Homo sapiens
tttaaaaaaaaaaaaaaagttgtcttccatctggtttaatcacagtgttaaaataccaatgtcaaagaaaagtatctaataaggataatttcacatctgttgcaaggcgagtgatatttcttcttaataagaaataaatacaataatgcaaaagtcttttaggagaaaagaatatgattgtacattatcataaattgctaaagagtccttttaattatcttaggctgtcattcgttaacttgaattatggtagtagactcatctgttttctttttctttttttttcaccrtaagaggagaacatggatggaattgtggttggagggagttggaggtggcattcagttatcttacgctccttacctaagtatcctctatcaattgttgtgtaacagctgttttcttttggtttcgtgttctaatgctaaagaaataaggctgtatttttggaactgaaacttggaaattatatgtctttagaaaataagaatcttataaaaggtttcattttgctctgcttattgcagttggtcgctatttaatatcacaccattctccttagt

SEQ ID NO: 76780 - DNA, 675 bp, Homo sapiens
actaactgcttaaaaacagctaatgcaaccctcaatttcattaatggacgtgtaatgcccagaacatgggtgttaatagcccctctctaccctgggctgggcagaccacgtgtagatcattgtgttccctctcagaaacacattttataagggtcattgacaaatagtattacatttgtttgaaggacgattatcaagatggtgaatgccaaatgagggacattaaagaaattgagggtgtttaaccttgagaagaaaagccctagaatgaaatggggagacaataggtcctatcaattatctgaagttttgttgcgtggaagaggtgtcaagtttgttccctgtggctcaactattaggtggaagttactgggaatcaagttgyggctcagtctcagcaaactttctaacaaggaaggctgcctgaaatttttataagctctctgttccccctgcctgagagtgttcaaacagagactggagcaccacctggcagatgtgcttaattggaaggtaagaggaactagctggaggaacaaacttagatgtcttcaacggcctaggcaggcaggtgaggtgaagccgatgagaaatgtactaataagaagataaggtatgaggcacactggagagagatgcttccccaaactccacccagctgatggcattcaggat

SEQ ID NO: 76781 - DNA, 1005 bp, Homo sapiens
ttaaatttgaatttgctgtacaaacatttgcatcagttttgaacatctaaaagtagttttcacccttaatctacaacattcttttaaaaatcatagtccccaatacaaatgcctttgctaaaatagttcattttatttttcacacaacatattttagcagtgtatactgagattattttaactgaatacttgatatatttttgctattttttcacggcgacatagaaattgcatatgtattactgaatttataaagcaattcacctttgacaatcatgaaaagaattacctaaccacatgtgtaaagtggctgtgtgaaatttttactgatgttcttattttatcagtagataaaatgaaattaagacattagaatgtttgaraaataatatgcttaaaattttagcaaaatataataagaaaaaagttattttagtaatttggaaaaggcaatttgtttaaaagaatatttttcagttcaaacttgaataagtgcttaatgatacattttatataaattattagtcataaaaactaaatgttaaaaataattacttcaatttctatagttctgtcagcaaaacaaaaacaaaacacaatatcatctaaatattggtgaattctattataatagtgtcttcttgggtcccaccagaattcatgccttctattttgctcttgcagttttgcatctattttaaaatagtatatcccaagtccttttattgaattaagaatgtgaataagagcagttataagtcatacaaaaaagataaatcactagtccgtctttattatcattttcattgtggtaatattaaggattccatacaaacttaccttcccattgtttcacggcaagacacttgattgttttaattattatttgaagatttgtgtgaccttgtgttatattaatgaatttttttatttttgtgagaggtcagtgccttgcctcatattgtaatcttggttgattaaatcagaaattcctgacttaaagaa

SEQ ID NO: 76782 - DNA, 1044 bp, Homo sapiens
tgcataatgcttagacagcttaaataacgaattatttcattagaggaacggcagtatcatcattgttatttgttattcatacaaattatgctaattattaccatgtcatattttaagaagcttagatgaagtccctcaaaattaagcaatagttttaggacaataaagtaatatactaagacattccatttgcaaaataagggttatattagccatgattttagaagatgacttttaatctgtgactctaccatttatttttcatgtattctggatctattcatatttatttaatgtcattcatttataatgacttataaataataagaatggcatacttttatctttttttaatttatagagttaaatgttgtgtatrattattaaacattttctcactagtccattttaactcagctgtaataagtgatattcatacctggcatttggactgctgaagtccgtcaagaggccataattacatagctcttctcttgtatttattgtgtactaagataattggaaaactatatttctgaatttcagatgttcaactagtatcctgacagagagaacataatactgttaaggttactcaaaaaaaaatatggcagaccaatttaattcagtttttattgaagggaagctatttctgttagatacaatggtgtatgcagagttttaaaaaaccatctttgtcctctaggtctttaaagtgtggcaatggatcaaggtgaaacaataattaaataaaaatgataatgaaaaacaaaataaaatgtgtgtcataagaaattataaataaattgttatgcagtccaagaaaggggaaatcacatccaattataagcaattaggacaggactttcacttaggtgggacttacagggatgttaaaagatgactttaagaaattttaaaacaaaaggattaatataattttcatatgtagagatgaagtgctgaaggcattctaattaaaaaggaaaatacttgaaaacataaggcatatttaagaaatgccaattagttcaggatcagaaa

SEQ ID NO: 76783 - DNA, 644 bp, Homo sapiens
ctaataagaaaagcaatttttgagtctctatcttatacaagtaacgatctgattcttatttttgactacagaaaaacaggtaagagcatttagccacatagcttcaggactggttttaacagaagtccataaataattttcctggatgagaaggcttgcaggtagttttctgtgagttttgtgtgggagactctgggtggagctctgagattaaagcaatgaggccccttagcttgggatatgccttagctaaaacttgagttgaagtggaaatktaaaaaaaatattttatctgcactggataggatcaatgtatagtcacatttggaatgcaatgtggagactttttaggtattcatgagactttgcattgtttagaaataataggtgtccaagaccattcaaatgacagaagaaaaaatgaaacatgacctgaattgtctttaatccttatcttgtcaagactaaatagctgattatcatataaactaaactccatttgtattccagaattttctatctccttttcatctggctggctgtggccacttttctgagtttaacatgggagatacctcaagagaccaccgtcgagtttgggcactggtaaaggcatctgcatcatgtcacattcaaccacagga

SEQ ID NO: 76784 - DNA, 644 bp, Homo sapiens
ctaataagaaaagcaatttttgagtctctatcttatacaagtaacgatctgattcttatttttgactacagaaaaacaggtaagagcatttagccacatagcttcaggactggttttaacagaagtccataaataattttcctggatgagaaggcttgcaggtagttttctgtgagttttgtgtgggagactctgggtggagctctgagattaaagcaatgaggccccttagcttgggatatgccttagctaaaacttgagttgaagtggaaatgtaaaaaaaatattttatctgcactggataggatcaatgtatagtcacatttggaatgcaatgtggagactttttaggtattcatgagactttgcattgtttmgaaataataggtgtccaagaccattcaaatgacagaagaaaaaatgaaacatgacctgaattgtctttaatccttatcttgtcaagactaaatagctgattatcatataaactaaactccatttgtattccagaattttctatctccttttcatctggctggctgtggccacttttctgagtttaacatgggagatacctcaagagaccaccgtcgagtttgggcactggtaaaggcatctgcatcatgtcacattcaaccacagga

SEQ ID NO: 76785 - DNA, 644 bp, Homo sapiens
ctaataagaaaagcaatttttgagtctctatcttatacaagtaacgatctgattcttatttttgactacagaaaaacaggtaagagcatttagccacatagcttcaggactggttttaacagaagtccataaataattttcctggatgagaaggcttgcaggtagttttctgtgagttttgtgtgggagactctgggtggagctctgagattaaagcaatgaggccccttagcttgggatatgccttagctaaaacttgagttgaagtggaaatgtaaaaaaaatattttatctgcactggataggatcaatgtatagtcacatttggaatgcaatgtggagactttttaggtattcatgagactttgcattgtttagaaataataggtgtccaagaccattcaaatgacagaagaaaaaatgaaacatgacctgaattgtctttaatccttatcttgtcaagactaaatagctgattatcatataaactaaactccatttgtattccagaattttctatctccttttcatctggctggctgtggccacttttctgagtttaacatgggagatacctcaagagaccaccgtcgagttygggcactggtaaaggcatctgcatcatgtcacattcaaccacagga

SEQ ID NO: 76786 - DNA, 743 bp, Homo sapiens
gttgatagcaaaatccaggcctgtgagagaagctggtagaagaaatatacaggaaaatggtaggcccaaagagcacttgtgagcacaggctggctggagcctgatagcacaatgttaattatgggagcagtaacctgggcatgatagagtttgtaggagaaaacaaaccttaaaaggaaataaataaccttaaagttcagatggaaggtccattagccagcaaaattgctatgaccatgaaaacaaaatggttacttcaggcagcagatcaagaatagagaggagaaaattgaaagaattgccaagtagccattagaataatgaaaaggaagctagataatgaatttgacctctgcattagtttgctggggatgcactcagtactacagattgggtggcttcacatcagaagtgtatttcctttcagttctggaggctggatgtctgagatcaaggtgtggacaggattttcttctaaggcctctctccttggcttgtcagtggccatcttttccctgtgtcttcacctaattttttctctatatgtgtctgtgtcctratctcttctaatgagaataccagtcatattggattagagcccaatcacatgacctcattttacctccattgcctctttaaaggctctatctccaaatagtcacattctgaagtactgggacttagaacttcagcatatgaaattgctggggatacaattcaacctgtaacagcctcctcatagt

SEQ ID NO: 76787 - DNA, 688 bp, Homo sapiens
tgtttaaatgtcttaactcttgattttatatgtcaagctatcaagcaattattttaaagattatcaaaataacggtcctgcttatagctaaaacatattaatccagtgtgcaattttaagtgactaactaatgtaaatatatgataaatagtcagctgagtctattaggcaatcctgcaatgaaggcaaataacttcaagtatgcactcaggattgtcacctgtactctgttattttctctgttacttgattttaggtaaaaggagtctatcagacaaacagaaagaatataacaagatgtatctatcaaaaaatacacctgaggaaacccttggacaagactttatactcaatagatgttcacacattcatttatgcaaaggtatattaagcacttactttttgccagactagtattcaacagggcaatgggcatacaggtgaataaaacacccgcccaactaacacttctgcctttttcaggttagtgtgtctctgtcagactcttctctttcccttatcatcttccctcatcctttgcagacaccagwtgacccaatgccacaaaaagttaattaaatatcacctctctatgaatgttttctgaccttctaaatagattccttttctgaacaatgcctctgacccaaacaacaatcctgtgcatgtgcctttagcaagtttttgt

SEQ ID NO: 76788 - DNA, 491 bp, Homo sapiens
tgagcaggaaagtacaatgatggaagttgggtggtgatcaaacctgttctatcctgctccagtggcagtggccaactcccactgcccattactctcctttctacttctgcacacagccactctccttcattagttcatgaatcaaagacaaaggtttctccagtattgtctctacatctaaatgctgcaacagcagacataccacacgccactcgtgcaatcaaaagttaaatgtcacagcggggcccacaaagagctggcagaaaatatgagtcataaatcttgaaggtgaaatatctttgtctctaactctgttacccacaatggttcaatcatatgtccagttttttttaaataaacatgtgtgcttctaatttcttcttsacaataagatgttgtcttacatggtggatagaatagaggtcccagagtcagatgggtgctgagttcacttcctcactcagcacccatcagaacctttttatgaatat

SEQ ID NO: 76789 - DNA, 754 bp, Homo sapiens
attggggtgtgtgtgtgtgtgtgtgttgttttggttttgctgctaagaaggcttgtattttgtcaggtggtccatgatactagagtttggaagtggctactatctaattctcaggccaaggccttgcttcgcccactcactagtcattcaatatttttctatcttatttcttagtagggggatctagcaggaagtaatagaagtaggcacctaaggcagtctataaagtaagtaaagcaaaggctgcattaaagaaagtaacataatgcagactgaatagaatgaacgggtcccctagatgtatttggaaatttgcawagagttatttaaaatttgaagaatgagctctattagaaaacaggggaagaacccgacaggattatagagcaagacctgaactagaaagggaattaacatggcaaataatggctaaggaagaagggctaaatgaggcattgatttagttatatagagactgtttttctcttaaaataaaaccagaaattgtatcacttttgttgatttagcacctttcactgcttattttaatgctcttcaatcttagggttccagagaacctataaatgtcttttcactgactcaagcaccatttatcaaagttattgcatgatctcaccaagcaggagtttaggcatcttcctctgtgctatttccctttcagagataattctaaagggaattaactaaagagagagcaccacatttgagtacaagtcgatcataagcctgaaat

SEQ ID NO: 76790 - DNA, 1279 bp, Homo sapiens
tgcatttttaagtgttccccaaattcacttctttctggctctggggagaggggatgtttggggccagaggcgggagcccctgctgtgtctagatgtcaggtctagatgtgtctagggtcaggttccagctcatgctgaggtctgaagggagtgggtggatgagcagaaagaacactcgggggggctacaggcaggtgaaagatgattttattcagcagcagctctctgcagcagcttactctcacaccatctgccctgtctcagctgcttagtctgttggctcccacacacagctgcgccggctctcccttgccttcagggtcagcagcttaactctttccctctgggcacaagccgtttcctagctccgtgtccgactgccagacgggcattctctcttacagggggcagtagcttcactctctctctgggcacacacaagcctgcacagtgtcagcagggcaattatgccttttacagaccatagtggcacagggccaaggcatggccttcccatgttacgactgtgataacaagtggagttatacgtctgtgctctaaacttgctgagtcactctggatgtttaccttggcctatccttgaccaaagcacagccatgttccttacattagagaatgttctaggctgagcattgtgggaggtgacggaggaagaagtccttgtcttcaaatctgagcccaggtaaatgatggggtgggacaaatagaaacacctggaaacaaacaggtgccattcatatgaaaatctattcttaacgcaattgacagctttaccaatgcaccccgagaccttatcttgctaattactatattytagaagctggcatctcatttatctcccagggcaaattattttaaagccgcttgatttgcggatggagcttttgcaaacagcagagatgtacctgggtacattttctcctctgtatccctcaggaggacagcaagggaagcagggatgagctcttagataaacttgtgcctgatgagaaaaacaaagcactgagtgcccctctccaggaatgcaggggctctgtgctgaggtattgaaggaacttggaaaaagtgagactggaaagacttcctcgtgcagaactctaaaaactctgtcccctgtaaagagaagtctggcctggagaaggtcagctcctgggtcccaggatacacgtgctgggctgctgtggtaacaccacataggccacctgccctcacctacctgacaggtgcaggcaagacacaaagccacatctctgaaaaa

SEQ ID NO: 76791 - DNA, 778 bp, Homo sapiens
cccaggcagggcaggggccaaggtaagcacgtgaggatggaccaggttcagcaaacttgcccgacagagatctgggcattctccctaaatggttgggcagaccaaccattgggtcaccatggggtgagccttaggtaagctgggcactgagctgagtgagcaggagacacacagtgtgagcggcctttgaggtctagctcacaagtaagtggcttcaggtgggactgctcagaaagtgggccctgcctgggctcagatttaggggcaggattcctggaggtccgaggaaacgaagctgttccccagctgcagggagactggagtgggacacagtgggtaaaactggggtaccatgaggggtggaaccccaggaattatacacattttcattactggaaccgggatatgaagtggagccacyccagcagtgaggggaagcaaggctgagtctccagcccaggcctccttccgtaaagagcctcatcttaaaagtccagggctgggtagaaagtggaaagggtggccgagtgccccctgctgtggccatgcaagctagcggcagcagggagccaggcagattattccaccacagaagaggtcagtatcatggagaacacgcaggaagggtccggaatgaacaacggtgctttccgtgagcatgcatggcaggaggctgtctgagactagaggttgtccctcgccaggctaggctggcaagcagcaggaagtgcccacccaccatattgcaggcagcagacgaaggggtacagggcacccg

SEQ ID NO: 76792 - DNA, 778 bp, Homo sapiens
cccaggcagggcaggggccaaggtaagcacgtgaggatggaccaggttcagcaaacttgcccgacagagatctgggcattctccctaaatggttgggcagaccaaccattgggtcaccatggggtgagccttaggtaagctgggcactgagctgagtgagcaggagacacacagtgtgagcggcctttgaggtctagctcacaagtaagtggcttcaggtgggactgctcagaaagtgggccctgcctgggctcagatttaggggcaggattcctggaggtccgaggaaacgaagctgttccccagctgcagggagactggagtgggacacagtgggtaaaactggggtaccatgaggggtggaaccccaggaattatacacattttcattactggaaccgggatatgaagtggagccaccccagcagtgaggggaagcaaggctgagtctccagcccaggcctccttccgtaaagrgcctcatcttaaaagtccagggctgggtagaaagtggaaagggtggccgagtgccccctgctgtggccatgcaagctagcggcagcagggagccaggcagattattccaccacagaagaggtcagtatcatggagaacacgcaggaagggtccggaatgaacaacggtgctttccgtgagcatgcatggcaggaggctgtctgagactagaggttgtccctcgccaggctaggctggcaagcagcaggaagtgcccacccaccatattgcaggcagcagacgaaggggtacagggcacccg

SEQ ID NO: 76793 - DNA, 778 bp, Homo sapiens
cccaggcagggcaggggccaaggtaagcacgtgaggatggaccaggttcagcaaacttgcccgacagagatctgggcattctccctaaatggttgggcagaccaaccattgggtcaccatggggtgagccttaggtaagctgggcactgagctgagtgagcaggagacacacagtgtgagcggcctttgaggtctagctcacaagtaagtggcttcaggtgggactgctcagaaagtgggccctgcctgggctcagatttaggggcaggattcctggaggtccgaggaaacgaagctgttccccagctgcagggagactggagtgggacacagtgggtaaaactggggtaccatgaggggtggaaccccaggaattatacacattttcattactggaaccgggatatgaagtggagccaccccagcagtgaggggaagcaaggctgagtctccagcccaggcctccttccgtaaagagcctcatcttaaaagtccagggctgggtagaaagtggaaagggtggccgagtgccccctgctgtggccatgcaagctagcggcagcagggagccaggcagattattccaccacagaagrggtcagtatcatggagaacacgcaggaagggtccggaatgaacaacggtgctttccgtgagcatgcatggcaggaggctgtctgagactagaggttgtccctcgccaggctaggctggcaagcagcaggaagtgcccacccaccatattgcaggcagcagacgaaggggtacagggcacccg

SEQ ID NO: 76794 - DNA, 778 bp, Homo sapiens
cccaggcagggcaggggccaaggtaagcacgtgaggatggaccaggttcagcaaacttgcccgacagagatctgggcattctccctaaatggttgggcagaccaaccattgggtcaccatggggtgagccttaggtaagctgggcactgagctgagtgagcaggagacacacagtgtgagcggcctttgaggtctagctcacaagtaagtggcttcaggtgggactgctcagaaagtgggccctgcctgggctcagatttaggggcaggattcctggaggtccgaggaaacgaagctgttccccagctgcagggagactggagtgggacacagtgggtaaaactggggtaccatgaggggtggaaccccaggaattatacacattttcattactggaaccgggatatgaagtggagccaccccagcagtgaggggaagcaaggctgagtctccagcccaggcctccttccgtaaagagcctcatcttaaaagtccagggctgggtagaaagtggaaagggtggccgagtgccccctgctgtggccatgcaagctagcggcagcagggagccaggcagattattccaccacagaagaggtcagtatcatgsagaacacgcaggaagggtccggaatgaacaacggtgctttccgtgagcatgcatggcaggaggctgtctgagactagaggttgtccctcgccaggctaggctggcaagcagcaggaagtgcccacccaccatattgcaggcagcagacgaaggggtacagggcacccg

SEQ ID NO: 76795 - DNA, 805 bp, Homo sapiens
caggaaattttggagagtactgccagcatctaggacagtccacccctgcaccgctcacatccagcagtgcctcacatgaagttgactccttcttaaaactaattactcacaagagtaactaaaatgtctcacaaaaagaacattagtggaatgttggacaagctacagtctctactactacagctaaacccaggacaccatagttcatatttaccatctccctcctctccatccattctagctttctctcatcctcagccaacacttttgccaaactaggctacttgccaaatggggtarccctaaccttaatttttcttaacaatgcacatgtattactctgatgacaaaatattttataaaatattgacattattaatacatcttttagcacattataggtgctcaaaattgttaattccctaccctcaaattatattcacatgttgaatgaaatgtgtttatttcacaacaaaatagaactcatttaaaaaaaaatttttttttgaaaccctttttctgcctgattgcacatgctgacatgttcttgccaaatccaactgatggctcatcaaaaaagagttcattcgtgctgattcttctggcacttccctagtagataccatagtgtgcctctggaataaagcagtagcattgctggctgatggtgtccaaagccagggagatgatcctcagtccagaagcaatttcctccctgtcacattatctgtttttcttatcagctgccctacagaaccctactctataagggagaacagtttttacccaggcattactgactttc

SEQ ID NO: 76796 - DNA, 731 bp, Homo sapiens
acccatataaacatcatagcattcagaaaatagaatattttcatcactccataaagctcctttacaatgctttgctgaaaatttcatacccctcttccctgcctwccagacaaacactgaatgcattactttttcactttcttttttttgtttattattattattattatactttaagttttagggtacatgtgcacaatgtgcaggttagttacatatgtatacatgtgccatgctggtgtgctgcacccactaactcgtcatctagcattaggtatatctcccagtgctatccctcccccctccccccaacccacaacagtccccagagtgtgatgtttcccttcctgtgtccatgtgttctcattgttcaattcccacctaggagtgagaatatgcggtgtttggttttttgttcttgcgatagtttactgagaatgatgatttccaatttcatccatgtccctacaaaggacatgaactcatcatttttatggctgcatagtattccatggtgtatatgtgccacattttcttaatccagtctatcattgttggacatttgggttggttccaagtctttgctattgtgaataatgccgcaataaacatacgtgtgcatgtgtctttatagcagcatgatttatagtcctttgggtatatacccagtaatgggatggctgggtcaaatggtatttctagttctagatccctgaggaatcaccacactg

SEQ ID NO: 76797 - DNA, 731 bp, Homo sapiens
acccatataaacatcatagcattcagaaaatagaatattttcatcactccataaagctcctttacaatgctttgctgaaaatttcatacccctcttccctgccttccagacaaacactgaatgcattactttttcactttcttttttttrtttattattattattattatactttaagttttagggtacatgtgcacaatgtgcaggttagttacatatgtatacatgtgccatgctggtgtgctgcacccactaactcgtcatctagcattaggtatatctcccagtgctatccctcccccctccccccaacccacaacagtccccagagtgtgatgtttcccttcctgtgtccatgtgttctcattgttcaattcccacctaggagtgagaatatgcggtgtttggttttttgttcttgcgatagtttactgagaatgatgatttccaatttcatccatgtccctacaaaggacatgaactcatcatttttatggctgcatagtattccatggtgtatatgtgccacattttcttaatccagtctatcattgttggacatttgggttggttccaagtctttgctattgtgaataatgccgcaataaacatacgtgtgcatgtgtctttatagcagcatgatttatagtcctttgggtatatacccagtaatgggatggctgggtcaaatggtatttctagttctagatccctgaggaatcaccacactg

SEQ ID NO: 76798 - DNA, 644 bp, Homo sapiens
agtttcagctttctacatatggctagccagttttcccagcaccatttattaaatcgggaatcctttccccattgcttgtttttctcaggtttgtcaaagaccagatagttgtagatatgcagcattatttctgagggctctgttctgttccattgatctatatctctgttttggtaccagtaccatgctgttttggttactgtagccttgtagtatagtttgaagtcaggtagcatgatgcctccagctttgttcttttagctcaggattgacttggcgatgcgggctcttttttggggccatatgaactttaaggtagttttttccaattctgtgaagaaaggcattggtagcttaatggggatggcattgaatctgtaaattaccttgggcagtatggccattttcaygatattgattcttcctacccatgagcatggaatgttcttccatttgtttgtatcctcttttatttccttgagcagtggtttgtagttctccttgaagatcaaaccaggtctttattactttctcattaccacaacatcttttatttctacttgaattgcagattccattttgtgacatcatctcttcgtctagttgttggcattatctgaaatacattgtcttttgtatctttg

SEQ ID NO: 76799 - DNA, 526 bp, Homo sapiens
tatccctaatgaccctgtgaagttagtgctgtcatttcccccaatttacagaagaggagactgagacatcaagagcttaagtaattgaccagtgtcctcacatggctgttagacagcagatctagaactcagtcccaggtcatctagtgcaggattacccatgcttagccactckactctcttgcctcctttctaatctattagtttctgcatataagtctccattttcagtcaccacagacactgtgagcagtgtaccagtattctctttttaagatgaggaaactgaggctcagaaggtttggagtgtgtctctctcaaagcctgagttctttccttagcagagactagtgaagtgctgatcagaaagggcaacggcaaccaagaaattgcatctcaccaccaaatgttatctaccactaattctgaactacatacagcattttgttttgttttgctttgtttgttttttatcttgagtcatgtataccttctataaagagttgaccatgagtcagcattactg

SEQ ID NO: 76800 - DNA, 526 bp, Homo sapiens
tatccctaatgaccctgtgaagttagtgctgtcatttcccccaatttacagaagaggagactgagacatcaagagcttaagtaattgaccagtgtcctcacatggctgttagacagcagatctagaactcagtcccaggtcatctagtgcaggattacccatgcttagccactcgactctcttgcctcctttctaatctattagtttctgcatataagtctccattttcagtcaccacagacactgtgagcagtgtaccagtattctctttttaagatgaggaaactgaggctcagaaggtttggagtgtgtctctctcaaagcctgagttctttccttagcagagactagtgaagtgctgatcagaaagggcaacggcaaccaagaaattgcatctcaccaccaaatgttatctaccactaaytctgaactacatacagcattttgttttgttttgctttgtttgttttttatcttgagtcatgtataccttctataaagagttgaccatgagtcagcattactg

SEQ ID NO: 76801 - DNA, 645 bp, Homo sapiens
ctgaggccttgatttctcttaggcaattttaaccataaagatgcataactaatatatgcatgggctttacaagtcttcaaatgctttcacatgctgtatctcttctgctatacagaacaaccagtaaatgtgggaaactctgctgtatttactttaaaaatgaggaaactgaggctcagagagtttaaattacctgctgcatcccccagctggatgctggagcctggacagctcaggggttcccactcccatccttttttgtgtatcatgcaggtatccaggggctagtgagtgggcttggaggaagaaaggcaggagggaaattcgtagggcaacaggccaaattattataatagttttttttttttaacatggttcatggagaacagaatcttattgtattggctgaatatatacactcccatttgtttttcattacatcactgtctgataggcattcggagtcctatttagagagagttagcaaggtaatcgggaactcctgtkcctaaatttccccagctagtagtgacatagagcctgatgtgaagcccaagctccttcaactattccacactgccctttaaagacagagccacataaagagaaatactgctaactgctgtgctatggtgtctgtttaca

SEQ ID NO: 76802 - DNA, 552 bp, Homo sapiens
attgtgcagttttttcagcagcttgaaaatggactaatacaccacattttggagataagaaaaattaagacaaagtttaaacgacttgctccatttccatagtgactaggtgacagagctagtattcaaatccacatagcctatatttacctctgctgatataatgtacttattctttttttatttagaaaaagcatttaagagtttgatttattgttgtttggtgtataacattccatatctatcacatctgctgtgaggattataccctttattggtataaaaatttccttttttaaatttaatgtatattgactcactttacatatcaaaatatttaattttgtcttatttgtatttgtcaatatatctttgaacattgtttaatttacarccttataaagagcacacagttggagtttatttcttatactgactgtgtcttctgttgttatgcttaatgcttttttcccctttccctcatttcctttgttatttctttttatgcatggactacattgttctttacttttacctccttcaggtatttga

SEQ ID NO: 76803 - DNA, 552 bp, Homo sapiens
attgtgcagttttttcagcagcttgaaaatggactaatacaccacattttggagataagaaaaattaagacaaagtttaaacgacttgctccatttccatagtgactaggtgacagagctagtattcaaatccacatagcctatatttacctctgctgatataatgtacttattctttttttatttagaaaaagcatttaagagtttgatttattgttgtttggtgtataacattccatatctatcacatctgctgtgaggattataccctttattggtataaaaatttccttttttaaatttaatgtatattgactcactttacatatcaaaatatttaattttgtcttatttgtatttgtcaatatatctttgaacattgtttaatttacaaccttataaagarcacacagttggagtttatttcttatactgactgtgtcttctgttgttatgcttaatgcttttttcccctttccctcatttcctttgttatttctttttatgcatggactacattgttctttacttttacctccttcaggtatttga

SEQ ID NO: 76804 - DNA, 552 bp, Homo sapiens
attgtgcagttttttcagcagcttgaaaatggactaatacaccacattttggagataagaaaaattaagacaaagtttaaacgacttgctccatttccatagtgactaggtgacagagctagtattcaaatccacatagcctatatttacctctgctgatataatgtacttattctttttttatttagaaaaagcatttaagagtttgatttattgttgtttggtgtataacattccatatctatcacatctgctgtgaggattataccctttattggtataaaaatttccttttttaaatttaatgtatattgactcactttacatatcaaaatatttaattttgtcttatttgtatttgtcaatatatctttgaacattgtttaatttacaaccttataaagagcacasagttggagtttatttcttatactgactgtgtcttctgttgttatgcttaatgcttttttcccctttccctcatttcctttgttatttctttttatgcatggactacattgttctttacttttacctccttcaggtatttga

SEQ ID NO: 76805 - DNA, 2620 bp, Homo sapiens
tgatcaagttggctttctttccaaattttcaaatgtcttaacactggaaaatcaatcagtgtaattcattatattaacagagtacaggagaaaaaaaaatacaatcatcttaatagaaggaggaaaagcatttggcaacatttaacatctattcatgataaaaaaaaaaacctctcaacaaattaagaataagaggcaacttcctcaatatgacaaaagagcatcatatttaatggttaaatattgaaccattaatattttcctccttagactgaaagtcttgggcaggacttccaggtccaggaaatctttaaaggtagctacccaattggctggtccctttactcttccctcgtcccctgtctcttttttcctagaatgtagatggcaggagctgcagctaccgtcttgtaaccgggaagtaactaactttgaagaaaaaataagcttctataattttaggttacttttactgaggcctcggttacccatggctgaatgcaatgcttgattgatacgaagaaacaactttggttgagtccttattatgcgctgggctgtcatttcttttgttatttaaattctcaagggcctttgtagtgggcattgtgcaccccaatttacagatgagttaacagtaaaaagaaaagctcacctactctgggcagccttcctaaagaaaattaaccaatgcttctaagatcctgtctagcagatcttatctagcaactgacacatcatattttaggtatagaagcatacagtttggtcatattcgagtaggctatttgaggtctggaatgacatcttattcaccatgtcattgctagtgcttgaacagaatatgttttaaaaatacaattcagggaatagactgtcatgtactgtgttattcagaatcgtcattatcaagaagaccaactgcatactagagtcaggagcacgtggcaattggtaaagagtttcaccacctagacatcaaggattgaaaagttcttgcattacgcaggctctttccagggcgactgcttgctagagcctacccgtatgttctttggatccttggggcctatcctgtgttttatgacccatgatcctatttcctaggtgcaaaatagtgtgtttgaaatacagctgataaaccactctacccaacagacaagaaaaatatccctgactgggcagaccagtaatctgatacttctttagtaaaagaagagaaaggaaaaataatggacacacgattttgcagtggttgacagcagcaacagcaaggtattcccattgccacacattgtgttccaaaggaagacctttccatggcaacgttgctgtggtcccactctctgtgagtgtggtttgtccatccccaagtttgttccaccctaggttttaagtgtcctcttaaagccatgacccctctccttgaccctttcaaggcacactcagctcttygggaagaccctggaagtaattatgtaattaaatgaagtctccatatgtttgtttctgtttccattttgcttttggttctcactcacattcacctactctcctgcctcactctgagctaggtctgagaaaacaaggattataattctagacagggaaaaacagaccaaattccagttaaggggtaggtggttttgagacattttcttccctggttccttctttttctatactcttcttccctctcccttttcctgccctcatttccttttttcttccatgaaaaagagggacagggtttgaggttcagtgttgaatgaagagtccacaatgtttatacctgaagacaaaaatgggatttgtcatgacgataggaaagatgtaagacagaaaagatgtgcttatgagtatctagaggtggctattgaaagaagtccagtccttttagaaggacaatgattcctggatatttttaacagcctgcctcctagtggattggaagactgttgctctgtttgtggaaccctatcacttctctctgagaaagccccgcagatctaggtttctggttttgcgagtttgggattttccccctaaccaggcttgtatcgacaagtttactgaattgtcaactttaagtgtgcagcactcatggcatctcaggacactcaggatgcccctccccccgccaccaaagttttaggattttttgttagttttttactatgtcgcaaacaacttgcataagctccatggatgttagcacatgaagttttataacaaatcaagaatatcccagacaacgtgtctctttccccacagcttcaatatttctccagcgagagcataagatttgccaaggaagctcatgactcttcatcagaaacagatccctgcccttcatcactacccagacagggaccgaattgttacagggtcagggtctggataaccccaacgtattgccagagttccactgtagtccgcaggggctctgcagtccttgggtgtgactgtgagcccacccaagaagcctgctgtccccagcagcccaccagccagacctatgacacagggagcccagcctttggaggtcagaactagagaagagcctgacctattccttgctgaggaaataaccagagaagctgtgtgataaggaatgtga

SEQ ID NO: 76806 - DNA, 683 bp, Homo sapiens
ggatccatccttcctaatgcttatttttttgaacagcattcagaccaggcatacagaaagtgacttgatgtatgccctattaatacacaagcgtacattaaatacagtaatatctgtggaaacaagtaataagaatgaaagagatgttaagtaatagtattatcttttcacatcatcacaaatctcaaactaaccctataggatatggcatgttaatgtaggattctaacaatgtgcctttaccactaaatttaggcatatttcttgcctttaaaattataacagtgttttagcccttataatattatccttcattatttaaaaatattgaatcatgctactgtatgttatttactacaagtgactcaagtattgtagatgaggtaaacaaaacattttctgtaagtgaaagctggtgttaacattatcataaattgtgttaaggtacttatatagcatctaggctcggcatgtagctaagaaagatagttttattgttcttggaaactaattyagcatttcttaaatttgaattggatttcatatttttcttctaaaaaacatatttttaaaatacttttaattgtggtaaaatacacgtgacataaagtttacctgttaaccatttttaagtgtacagttaagtgcttttaaatatgttcattatgttgtgcaactatcac

SEQ ID NO: 76807 - DNA, 683 bp, Homo sapiens
ggatccatccttcctaatgcttatttttttgaacagcattcagaccaggcatacagaaagtgacttgatgtatgccctattaatacacaagcgtacattaaatacagtaatatctgtggaaacaagtaataagaatgaaagagatgttaagtaatagtattatcttttcacatcatcacaaatctcaaactaaccctataggatatggcatgttaatgtaggattctaacaatgtgcctttaccactaaatttaggcatatttcttgcctttaaaattataacagtgttttagcccttataatattatccttcattatttaaaaatattgaatcatgctactgtatgttatttactacaagtgactcaagtattgtagatgaggtaaacaaaacattttctgtaagtgaaagctggtgttaacattatcataaattgtgttaaggtacttatatagcatctaggctcggcatgtagctaagaaagatagttttattgttcttggaaactaatttagcatttcttaaatttgaattggatttcatatttttcttctaaaaaacatatttttraaatacttttaattgtggtaaaatacacgtgacataaagtttacctgttaaccatttttaagtgtacagttaagtgcttttaaatatgttcattatgttgtgcaactatcac

SEQ ID NO: 76808 - DNA, 842 bp, Homo sapiens
aaaagtaacatttttaacctaaaaagaccagacctctagcatgactgccacaatcttctagatttcctaaagtgcaggaaaatatattgttcaaaggaaaatatgtcttgcaggaaaatagaggaaagaacctatttgtacaaataggtttagggaaaaaaaggaaagaagatgggaaaaaatagtactgacagactgagaaatgaaacaaagtcatagtactagtctcaaatctcaagttatatgattttaatatactttgtcttagaagcagtcaactggttgattttggagatgaggtaatctatgcaaaagtcattgtatggttcttgccttttccttcatggatttcatgaggcaaactctttgtagaaatataaatatggaaactgttcttataaattccaaaataattcagtgtaggcacttggtttgttgtttgaggttaattcctcttcactgtgagaatttcaattcagtgcttataatatgaacaatataatgatrataatagtgtatttgagaataaatctcaagcaacatagtgatgtgacaggcaagtagtgtcctgctgctagggaagtatcaacgcagaattaaaataggcttagaaaataaatctgtaggtgaaactgacacatttcaaagctgacatcttttattctatcactacattcatatctagcatagaaatgtgactctatttttgtttagatctgttccttcttgaaaactaaatctcttccaacattaaaagcaacacacttgtatttcttaaagttgtatttggaagcatgaaatccatcttgtttaactgaagtttttcctcatattcatatttt

SEQ ID NO: 76809 - DNA, 677 bp, Homo sapiens
aagtttctggagttgcagagccagagaggctgtttcagggtgggttctggacaggtgaaggtcagagtagagcatgtgccagagtgagaggaagggctggaaccccgaggaaggaagagagaaaccaagataggcaacacgagagacacatttcagatgtcttagcagtaatacaagtagcttagctcagagagcagtgatttttgattagggcaggatggtggawggagggggtcctctggcaaccttaggaccataagctcaggaagctgcttctgtacagactagaaggcctctgccaacaaaggtgatggtgcagcagcccacacaatgatcattactgtcccatagtaaacatctacctgcctgctggatggactatgagcagaagagatatgaacaccattcctttaaacagtttattgcaattctgcaatttttgaaacattaatcccagttgatgggaaaatgttattctttgagcattcagtatttctaaatgggctgttttgagttattgtcccttaattaaatgaagttctcagaaaatgtactgttattgttatcatatatttttaccaataaggaaagaaaatggaccaagatgatactttctgaactcccttttaaattggcaagtgtaatggaatcgtagcataacactttcctaaggaatt

SEQ ID NO: 76810 - DNA, 625 bp, Homo sapiens
atttctctggtaagagacattacggtctcactgaagtttgcatgtctgtgtctgcatggtcatgtatgttgaagtttgcatgtctrtgtctgcatgtgcatgcatgttgaagtttgcatgtctgtgtctgcatgttcatgtatgttgaagtttgcatgtctctgtctgcatgtttatgtatgtttatgtgtgtgtgtgcatgtgttgcttctgctgtgctcagtgcttgcccctcattgtttctgaggaacttttggaggtttttaagtgcacttatgtccatgctgcttcttgatcacaccagctgtgcccagcccagagcagcatcccaatatgctttcagcaacaccatcacagactgatggatacacttaaacgaaaaacacaaaaacaaaattctggatccccaagccctggccagggtctcactaaccatccaaaaaatgaaattaaaaccacaatgaggtatcatcttacaccagtcagaataactactattaaaagataaaaaatagctgatgttgacaaggatacagagaaaagggaatgctcatacactgctggtgggaatgtaaattagtacaactactatagaaaacagtgtggagattttttgaagaactaa

SEQ ID NO: 76811 - DNA, 625 bp, Homo sapiens
atttctctggtaagagacattacggtctcactgaagtttgcatgtctgtgtctgcatggtcatgtatgttgaagtttgcatgtctgtgtctgcatgtgcatgcatgttgaagtttgcatgtctgtgtctgcatgttcatgtatgttgaagtttgcatgtctstgtctgcatgtttatgtatgtttatgtgtgtgtgtgcatgtgttgcttctgctgtgctcagtgcttgcccctcattgtttctgaggaacttttggaggtttttaagtgcacttatgtccatgctgcttcttgatcacaccagctgtgcccagcccagagcagcatcccaatatgctttcagcaacaccatcacagactgatggatacacttaaacgaaaaacacaaaaacaaaattctggatccccaagccctggccagggtctcactaaccatccaaaaaatgaaattaaaaccacaatgaggtatcatcttacaccagtcagaataactactattaaaagataaaaaatagctgatgttgacaaggatacagagaaaagggaatgctcatacactgctggtgggaatgtaaattagtacaactactatagaaaacagtgtggagattttttgaagaactaa

SEQ ID NO: 76812 - DNA, 625 bp, Homo sapiens
atttctctggtaagagacattacggtctcactgaagtttgcatgtctgtgtctgcatggtcatgtatgttgaagtttgcatgtctgtgtctgcatgtgcatgcatgttgaagtttgcatgtctgtgtctgcatgttcatgtatgttgaagtttgcatgtctckgtctgcatgtttatgtatgtttatgtgtgtgtgtgcatgtgttgcttctgctgtgctcagtgcttgcccctcattgtttctgaggaacttttggaggtttttaagtgcacttatgtccatgctgcttcttgatcacaccagctgtgcccagcccagagcagcatcccaatatgctttcagcaacaccatcacagactgatggatacacttaaacgaaaaacacaaaaacaaaattctggatccccaagccctggccagggtctcactaaccatccaaaaaatgaaattaaaaccacaatgaggtatcatcttacaccagtcagaataactactattaaaagataaaaaatagctgatgttgacaaggatacagagaaaagggaatgctcatacactgctggtgggaatgtaaattagtacaactactatagaaaacagtgtggagattttttgaagaactaa

SEQ ID NO: 76813 - DNA, 625 bp, Homo sapiens
atttctctggtaagagacattacggtctcactgaagtttgcatgtctgtgtctgcatggtcatgtatgttgaagtttgcatgtctgtgtctgcatgtgcatgcatgttgaagtttgcatgtctgtgtctgcatgttcatgtatgttgaagtttgcatgtctctgtctgcatgtttatgtawgtttatgtgtgtgtgtgcatgtgttgcttctgctgtgctcagtgcttgcccctcattgtttctgaggaacttttggaggtttttaagtgcacttatgtccatgctgcttcttgatcacaccagctgtgcccagcccagagcagcatcccaatatgctttcagcaacaccatcacagactgatggatacacttaaacgaaaaacacaaaaacaaaattctggatccccaagccctggccagggtctcactaaccatccaaaaaatgaaattaaaaccacaatgaggtatcatcttacaccagtcagaataactactattaaaagataaaaaatagctgatgttgacaaggatacagagaaaagggaatgctcatacactgctggtgggaatgtaaattagtacaactactatagaaaacagtgtggagattttttgaagaactaa

SEQ ID NO: 76814 - DNA, 698 bp, Homo sapiens
gaccttgggaaagtcagtcctcattcctgccccagggttcagcttaacttgacaggtagtggggcgatatgatgaccttcaaacttgtaccttcagctggaatttcagactgaacactgtggggttagaggtgaccagaggcatctgtcagctggaccttgagtcgaggccttttctggtcaccaggggttgtgctctgacacttaagttttgtgggggagactgcaccgtattgtttgtttccaggctatagttagcaggaatatgcctccttccttccctgggaccccttctaggctgagcaaggccacagtacctcctggaagggcacttggtaacctgtgacttagtccacatcctaactcgaccactcttgagctgtgtgatgttgatctaacagccaaacctctcagcctgtctttcctcaactgcgaaatgaggatgttaagtcttcaaattaargtgaggaacatcattcatgaaacgtccaccacactcccttgctgtgccagtgcttgaggggaaatatctcactgaggcttctcaatagtatttatgagtgaggtgctttgatttgttctattttacagatgcagaaactggggcgccgagaggttaaatcactcatctggagacacacagccagggaggatagtaagcagccaggatccaagcccacatccataggacctgaggct

SEQ ID NO: 76815 - DNA, 1135 bp, Homo sapiens
aaaaccatctttctgaaactcactatgctacaagcagcattcaactctttctcaaccaagatttcactaacctatctccagcttccagatggtgagggaaagtgtgatgagattttatgataaattgtgcctgtctctgagtccatctccttctattgaagagaaggaaaatgaggtgagcacattacagccctgctgacaaaagtcacaagataagcaaataattattacttaaaaccagggagtcctataatttattcatgaatgccacacattctatattagatcttccatttcaatttacttgtattatttgaagctaatttataagattcaaattattcagaaaatgctcccacgtaaatagaagaaaacactttaaccagaggaagtatcatgctacacaatatggtgtggtggtgaagggtgcaggctctaaaaccagaaaacacaggttcaagtcctggccttaccaccttgggaaagttacatggtctctctgtgcctccatttccccatctaaaatgtggggatgacaataatagtgtctatttcacagagcagttttgaggaaaataatatatgtaaagcactgtgaacagcagttagtgctatgtaagtgtttgctctagttattttaacatttcagatgataaatatctaccctgttattcagatgacaagcgtccctaagctgataacatgatgaagagcttttgggtttyttaatttccatcagttttgtgagggaaaaaataccacatgaagaagagcaactgaagcaggcgtgaggaggaaacttggcttaagattggggggcttggggttattaggctttcatcttctaaaatgtcctaagctccattgataagaagacacttagtatcaatccagctaaaaaggaacaatagaccccacaagacactgagttagagacaaaaatagcagggtaataaatgaaatatggaaaactacacaaccagaaaaataaacagctaccagtacccaaaacgtggttaaatctcacaggattatattgaatgaaagaagccagccacaaacgtgcacatactgaatggtcccatttatatgaagctaaagaacaggcgaaactaatccatggttgcagaggtca

SEQ ID NO: 76816 - DNA, 1203 bp, Homo sapiens
actagagaaatgtaaggaaagatgagtgcacagaggaacagtgatcaggaagaagcctgcagaaggtttctgtagtgcgagcaatgttccttctcttcacctgggtgctggctaggtgttggctcccaagtattcactctaattatgagttacactaagcttatgttttacatatttttaatacatgtcatctctcacaataaaaagttttaatagtatggcaatgtgaacaaatgatggaataaacttacttagaaaacagattttaaaacttgtgcaataaactcaaacagcacccaaagaaaatgtatacccttacatgtttgtttaaaaagcaatttaaattacattaatccactaaactagaaaaagcaaaataaaaaggggaaataattaagacataagcaaaaaatgaaaaacactagatttaaaaaataaaactaaaagaggattctttcacaagactaataaaacagccaagcctctgataagtaatcaagataaagaaaacttttgaagtgaaaacggcatatagccacatgtgaatatgatgcaacagcttagaagtatacatgaagcgatccttttttttttttttttttagaatctacagttactaaaactgaagaagtggaaaatctggagaccgatacatagaaaaaggaaaaagacagtcaaagactcatcctccagattggagttttatttaaaccatggtttctcaacctcagcaatattgacrtattgggccagacaattctttgtggagggttctcctgtgtgttgtaggatgtttagtgacatcccctctacctaagaaatgccaacagcacccctaccatgaccagttgtgaaaaccagaaatggctccagatatttccaaatgtcccacgggaggcaaaaatctcctccagttgaaaattactgtgtaaaccagatctacaccctagatcttaggaaaaaagatgtaaagctttccaagtcacccctgcatacccttgatactgaaataagagcctaaaaggaaacaaagtataaccttacttaatatagaagtaaaaatccaaaaataaagtattaccatatccattctaacggtgtttactatagaaatgcaaggatgattcaaaattaggaattcataaattatatccctatacagaatcgtgggcacaatcatgaaaaaccaggcagctctctatg

SEQ ID NO: 76817 - DNA, 1097 bp, Homo sapiens
aaagaacaagatcatgtcttttgcaggaacatggatggagctggaggccattatccttagcaaactaatgcaggaacagaaaaccaaataccgcatgttcccacttataagtgggagctaaatgataagaacacatggacacaaagaagggaacaaaagacactggggtctacttgagagtgaagggtgggaggagaaagaggagccaaaaatataactattaggtactgggtttaatacctgggtgatgaaataatctgtacaataaaccctatgacatgagtttacctatgtaacacaccttcacatgtactcctgaaccttaaataaaagatttttttaaaaaaagaacatgaatgtggaagaatgcccaattatatgttccatgctattctggtctaacatattctttaaggccgtgttcaaatgccatctccttcagtgagccttccctagtcccctatattgaattttagtccctccttttcctgaatttcccagtaccttgtctattacagcacttatttaactctgcctttgttatgactagctggtttctcatttgtctcctctgcgagattatgaacaacttgtcctaatcctcttcatgtctgtagcacatagcctggttcctgggacatagaaagcacccactaaatgatcgttacgtgaatayagcctactgaaggtgaaacccatgtaacatccttacttagaaagactgcaagtaaattgtgagagaagtgatctagtttgactaaaatgtcagggaagtggtgaggacctctccctgtctaaagtgagcacacatcagcatgtggccactaggcccagacaaccacagcactacccaggaggcacaggaaactgagcccatccctgttgaaatgaacaagtgactcattattcaactgcagccaactcagccagaaagtttttctaagctacaattttcacaagtttggactctggcttataacaaaactcctatctttgattttagttttagttagcaacactcatcatttctctcttgcctgtattataaagggctttcagaccaagatgtaaacaccttgaagtggtatgaatttggg

SEQ ID NO: 76818 - DNA, 464 bp, Homo sapiens
ggggagaattaaagtgagatccaattcatgaaaaaagagatttctaaggcaagggtcctaggaaggtgggtcttcaggttcagttactgggtcctgtgaagccaaggaggagggggtggggagagggagggagagagggagaggaagagaggagagagagacagagagagagagagagagaaagagagagagagagtcggtcctcaaagtttttagttgcagacatgtagagccatgttgcctggatctgggtggcgtacccctggctgccttggtcccccagccctggcctgctgaccctctctgaaatgagaagaaggggaaggcaaacaggwttcaagagtttttaaacaaaaaaggagatctcccagggcatgagtgacaggcttctgagaaggttcctgggtccctgatcctgttacattctatgaactaactacgcaactgaaagtatcaatccacat

SEQ ID NO: 76819 - DNA, 713 bp, Homo sapiens
cccggattccgagggtatctggcgccagggagcctgagcccaattcccagggtgctggaggccgctcttgcctcccccatcggtgcccatggaccgcattcacctcaactccctcttcatcarttaggcttctctttactccctccccggccaaggagcctcgatttcccccaccaccctgtattttaaaataacagtccaaacagtacacttctttccatcttaagaagcaactcaactctttgtttcttcccagaattcagctgcctctctgaggagtggtggaggagctgcgggagccgagaagcccaagagccctctggacccagaaaagtcctacagatgcccactcctcaccacacaacagaaggagctctggtcctgcctgccagccccagagggcactcaaactttggaggccagccacccggatgaagtgaataaggcctgaaaattgcttgtttgctcgtattgtaaaataataataattaccattattatttttaaactgtctaatttctctagggaaagtaacatcgaaagcctaaaacagacgccaaaaggcccatagaacacagagggccctctctgcctctggccaccacagcccctaggccaggcatgggtatttattcttaggtatgttgcttttaagaagctgtaatcagcatcttgagccgggcctccctttgtgaggcttctgtaactatgga

SEQ ID NO: 76820 - DNA, 713 bp, Homo sapiens
cccggattccgagggtatctggcgccagggagcctgagcccaattcccagggtgctggaggccgctcttgcctcccccatcggtgcccatggaccgcattcacctcaactccctcttcatcaattaggcttctctttactccctccccggccaaggagcctcgatttcccccaccaccctgtattttaaaataacagtccaaacagtacacttctttccatcttaagaagcaactcaactctttgtttcttcccagaattcagctgcctctctgaggagtggtggaggagctgcgggagccgagaagcccaagagccctctggacccagaaaagtcctacagwtgcccactcctcaccacacaacagaaggagctctggtcctgcctgccagccccagagggcactcaaactttggaggccagccacccggatgaagtgaataaggcctgaaaattgcttgtttgctcgtattgtaaaataataataattaccattattatttttaaactgtctaatttctctagggaaagtaacatcgaaagcctaaaacagacgccaaaaggcccatagaacacagagggccctctctgcctctggccaccacagcccctaggccaggcatgggtatttattcttaggtatgttgcttttaagaagctgtaatcagcatcttgagccgggcctccctttgtgaggcttctgtaactatgga

SEQ ID NO: 76821 - DNA, 554 bp, Homo sapiens
agcagaagcagagggaccttgggttccggggcccagcggccttccacgctggtctgggaaccaagcaagccctagggcagtgcgaggactgggaagggaccctgggggaccgctagaggaggtggcgcgtggagggcgcctgcaccctggggtcgctcagagcggagagtctcgggtggataggtcagcttgcagatcctctaggtctcttctctgctctctggccgctctgattgcgggatctgggacttggcgcccgtacaggccgggtcacctgtgcagaacaaatttgctgccatcatccccgcttcaatcctggccccggcgatctaaaatatcgccttcaggtggggcagggagaaaaratgtctttggggtttaaatagtgttctccttgtacccggaccaactggcatttatttacaaatgtcacccgccaccccagcactgggaaagtctcaaccacatctggagaacgcccgagagacctcccactctctccttgttttgggttacagggaaagccaacgggtctgcaggcctccgggagacga

SEQ ID NO: 76822 - DNA, 924 bp, Homo sapiens
tatatttggtttttatgtctttcaggtagaacagtgtctcccctttgttttcttgtcagtgaaaccttgatgaaaccatttgacatgggtcctgcaggatgtctcactttgtgagtttgtctgcttctttgcagggttaacttgttcctctatcccttgtatttcttttaaaagatggaagttagagctaaatgcttgattagatttagatgaaaccttctgggcaagacttcttcccaggtgttgctgtgcacttcatgttacatcacatcaggatgcacagagtgtctgcttgtctcattatttgtgtctacaattggtcagtgggtctaggaaggaagtaatccgaggtgatgactggcatgctgcaatctttcatctagtgatttaagtcatgatgcttgcccgaattacctgttttatttgaaactgcaaaatggtaattttctttttcttttttttttttttttgagacggagtctcactctgtcgcccaggctggagtgcagtggcgcgatctcggctcactgcaagctccgcctcccgggttcaygccattctcctgcctcagcctcctgagtatctgggactacaggcgcccaccaccacgcccggctgattttttgtatttttagtagagacggggtttcaccgtgttagccaggatggtctcggtctcctgaccttgtgatctgcctgcctcggcctcccaaagggtaattttcttattctatcatttattcttcatttattagctagaatttctgcagttaaaaattttgtctcatcatgtagcaccatttgactaccctacaattcaattcttacaggaaataaaggataaatactcttctttccatttaattatcaagtttcaagtaaggagttgatacaatagttacttccagtggtgacgagagatgt

SEQ ID NO: 76823 - DNA, 2084 bp, Homo sapiens
tacttctctcattcagtaagttgtatgtttactctgttatttcttttcctgtgcaaatttttagtttaagtcaaatttgtctagttttatttttgtggcctttgtttttgcagccttagtcgtaaattctttgcctaggccaatgtccagaagagttcttgtttgtttgtttgtttgttttcagttttttttaggttttcttttaagaattttgtagtttcaggtcttatatttgagactttaattcatattgagataatttttgtatatggygagagacatgggtccagtttcatttttttgcatatagctatctatgattaatatttttggaaaaaaggagtttgtctgtccactctagagagaataggttagaagaaaactagagtgaaagggggagaaaaattactgacatggcataatctaatgatgatggtgaattggggccagttacaatttaaaaagaaacagattccagatatattttataggttttatctatggtctccttttaatttttactttttaattttctcagcatcaagagaactatgtaagcttttttaaaaaaagcacaaatcaaatgacagttacgaggagagtaacacactacatatgttttttttaaaaaaaagtatagtctaataaaacagtctccagcttaaagattccatctattggactgatatggtttggttctatgtccccaccgaaatctcatctcaaattgtaatccccatgtgtcacgggagggacctggtgggaggtgactggatcataggggcggatttcccccttgctgttctcatgacagtgagtgagttctcacgagatctggtagtttgataagtgtccagagctccctccttcttgctctctatctcctgccaccatgtaaaattgtccttgcttcccttttgccttctaccataactgtacttttcctgaggcctctgcagctatgtggaactgtgaatcaatcaaacttcttttctttataaattacccaatcccaggtagtatctttatagcagtactagagaactcaattactataataatgctgagataataagtgagtcatgaagagccaagccagtcttctcaagggtagagagagggaagagacaacactctctttcttctgtttttaaggactatttaatatgcatgactaaagaaatgcaacactggagctgcatagaaatttagacctatatcagctgtatttgtttttgccaggactataactgaatatgctaagggaatctgaatgtcttaagcagagtcaagaatccagaatgaggaactgaggctcaccctcacttcccctcctagcgtttattttttgtgtgtgtgttggtgtgacagacaaaggtggaaggtagaggcaaaatggaagtagaaaagcagaatcattagcagtcagggtggctgagataggaacaatagggacttcctctggatatgaggcatatggagatcttccaggatcccatgccatggtttatcatggtgggctagagggtttatcagccaccccaaagttactttcaacgctcttttttttttttccacatctcatatgttttctcagcctccattttaagtagagatacccaaattgactcaatcttcattcagagacttaagctgggggcctctgagaaaatttatttttttccagttaaaaaaaaaaaaaaaagatagatgtaactggcatgtctcttccttctatttcattccttctgccttgaatgtagagaagatggcaagaacttcagcaattatctggcaacaaagaaataaaggccaacagggctcccacccttgacactgttaagtcacagaactatgacctacaatttctggacttactgttaaatgagaaaaatgaactccaattcatttaggtttcttgagtcaaattactattacttatagccaagagttatattaactggtccaaacatcttctgccctcagaaataaaacataaatttaggaaggtttaaaaaaattataataatgcaatcatcattagtatttcagtatattactattcagtcttcaaatttacatat

SEQ ID NO: 76824 - DNA, 2084 bp, Homo sapiens
tacttctctcattcagtaagttgtatgtttactctgttatttcttttcctgtgcaaatttttagtttaagtcaaatttgtctagttttatttttgtggcctttgtttttgcagccttagtcgtaaattctttgcctaggccaatgtccagaagagttcttgtttgtttgtttgtttgttttcagttttttttaggttttcttttaagaattttgtagtttcaggtcttatatttgagactttaattcatattgagataatttttgtatatggtgagagacatgggtccagtttcatttttttgcatatagctatctatgattaatatttttggaaaaaaggagtttgtctgtccactctagagagaataggttagaagaaaactagagtgaaagggggagaaaaattactgacatggcataatctaatgatgatggtgaattggggccagttacaatttaaaaagaaacagattccagatatattttataggttttatctatggtctccttttaatttttactttttaattttctcagcatcaagagaactatgtaagcttttttaaaaaaagcacaaatcaaatgacagttacgaggagagtaacacactrcatatgttttttttaaaaaaaagtatagtctaataaaacagtctccagcttaaagattccatctattggactgatatggtttggttctatgtccccaccgaaatctcatctcaaattgtaatccccatgtgtcacgggagggacctggtgggaggtgactggatcataggggcggatttcccccttgctgttctcatgacagtgagtgagttctcacgagatctggtagtttgataagtgtccagagctccctccttcttgctctctatctcctgccaccatgtaaaattgtccttgcttcccttttgccttctaccataactgtacttttcctgaggcctctgcagctatgtggaactgtgaatcaatcaaacttcttttctttataaattacccaatcccaggtagtatctttatagcagtactagagaactcaattactataataatgctgagataataagtgagtcatgaagagccaagccagtcttctcaagggtagagagagggaagagacaacactctctttcttctgtttttaaggactatttaatatgcatgactaaagaaatgcaacactggagctgcatagaaatttagacctatatcagctgtatttgtttttgccaggactataactgaatatgctaagggaatctgaatgtcttaagcagagtcaagaatccagaatgaggaactgaggctcaccctcacttcccctcctagcgtttattttttgtgtgtgtgttggtgtgacagacaaaggtggaaggtagaggcaaaatggaagtagaaaagcagaatcattagcagtcagggtggctgagataggaacaatagggacttcctctggatatgaggcatatggagatcttccaggatcccatgccatggtttatcatggtgggctagagggtttatcagccaccccaaagttactttcaacgctcttttttttttttccacatctcatatgttttctcagcctccattttaagtagagatacccaaattgactcaatcttcattcagagacttaagctgggggcctctgagaaaatttatttttttccagttaaaaaaaaaaaaaaaagatagatgtaactggcatgtctcttccttctatttcattccttctgccttgaatgtagagaagatggcaagaacttcagcaattatctggcaacaaagaaataaaggccaacagggctcccacccttgacactgttaagtcacagaactatgacctacaatttctggacttactgttaaatgagaaaaatgaactccaattcatttaggtttcttgagtcaaattactattacttatagccaagagttatattaactggtccaaacatcttctgccctcagaaataaaacataaatttaggaaggtttaaaaaaattataataatgcaatcatcattagtatttcagtatattactattcagtcttcaaatttacatat

SEQ ID NO: 76825 - DNA, 747 bp, Homo sapiens
catcctggccctccagggaaaatttccagagcatgagataattgattcaccaaaatttcctcatgcttccgtatggttgctatgggcactactaagtttaagactcgaagggagctgatttcctaggattagaaagctgtacctgccagtactcaggaacctgaagaggggacagtggaatgatttkcaggaacatctcacatccgacaactttgcctcctagcagaggaagttgacctcaggctcacttgtcccattataaatattgtgagatacatctaactgttggtattgtgtttgtattcagaatcgtgcctgaaagatagatatggaaaaattataccatgaaataaatatatttacatacagttaaataataatatataacagttatatataatttaataatatattattaataatataatatataatatataatttatataatatatagtaatatttacaccatgaaaattgacaaataatacacatcagaccccccaccaccactaagagccagccgatttttaaacatttattagtacatccctggtacattgactcaatccatattatcttccatattttgcacagtatatataatatgtaaataaaatatacaatacaattagaatattataagattagaattttgatgaattatttggtgttgacaaatatgaagctattccttttgtaaatttttgtaaataatcttatgaatgaaggcactggacttaagcc

SEQ ID NO: 76826 - DNA, 646 bp, Homo sapiens
ggattttgctctgtcactccagctggagtgcagtggtgcgatcaaggctcactgcggcctggacttcctaggttcaagtgatcctcctgctcagcctcccaagtacctctgggactacaggcatgtgccaccatgtccagtttttttttttttttttttcagaaatagggtctcactctgtttcccaggctgatctggaacccctggtctcaagtgatccgcccgccttgacctctcaaaatgctgggattataggtgtgagatactgtgcctgaccacttccctgatttttaaaatgtttagttgaaaaaatctatttgagggactgtcagataaaatgattacctaaacactgacttctagttcctcctcttatatyctcatctgtaatgacaaaaataatagaatgaggggaaaatactgtaaatttgccataacatttcaggaatttgtgcgtgatggtatagattgatgagaactctgagagccaaatttgaaattttcccttttggtgaagtaggttagcacagagaattctggaagacttccacagaaggcaagagcaccactgggagaggagaaaccttccacttggattcattttcactgttgtaatttcagacatttaaaataacctgcatccaag

SEQ ID NO: 76827 - DNA, 857 bp, Homo sapiens
agctttgggaaaggaacccatgctaagagaaagcaaccatcacagggttgagcaataatggtagtcgagatctctctgtcagataataggaaaaaaagagcaggatcagattttatagcttagaatttcatgcagaagtgtttagattttttggtgaactcaagtgttttgcaatctctcaagtacccatgtccttgaaaaattattttgttctctattttattgaaatgtattataactgcaaaacatgaagttaatcttcttaaatatgaaccgttctactttattattggtataggagtaacctatgtacaatgaagaaatgcaaatgatgttgagattcaaaatataacattgtctaaattaggagtaacctttattttcaactcagactgtgtaccattgtactaaagcaggggaaagcctaatttagtacggatacactcagtaatagacccctgaatttgcttcaagcagcagaaggcagagagtttgttgttgttacttcttttgtttgtttgtaagccttgattcgtgtttgtctgttgttttcttttcaaaaaaaawtttttttttcagtatgaagtgaaatcacaaggcaggctgtgaaaaaacaaaaaggctggatgtgcagaggcctgcagaggacagaaggcccttccagtgcctaggcgtttatccaggaaggactgttaggtgtcataggtcataaatgaagaatatgtattaaaatcactgtagccaaaatgttatattgtgaagtgagtcattttattacaaatgttgccccctcaatgttcaactctgtagcttgatgtggataaaatgtctttttctccttgagatttttgtgctta

SEQ ID NO: 76828 - DNA, 857 bp, Homo sapiens
agctttgggaaaggaacccatgctaagagaaagcaaccatcacagggttgagcaataatggtagtcgagatctctctgtcagataataggaaaaaaagagcaggatcagattttatagcttagaatttcatgcagaagtgtttagattttttggtgaactcaagtgttttgcaatctctcaagtacccatgtccttgaaaaattattttgttctctattttattgaaatgtattataactgcaaaacatgaagttaatcttcttaaatatgaaccgttctactttattattggtataggagtaacctatgtacaatgaagaaatgcaaatgatgttgagattcaaaatataacattgtctaaattaggagtaacctttattttcaactcagactgtgtaccattgtactaaagcaggggaaagcctaatttagtacggatacactcagtaatagacccctgaatttgcttcaagcagcagaaggcagagagtttgttgttgttacttcttttgtttgtttgtaagccttgattcgtgtttgtctgttgttttcttttcaaaaaaaattttttttttcagtatgaagtgaaatcacaaggcaggctgtgaaaaaacaaaaaggctggatgtgcagaggcctgcagaggacagaaggcccttccagtgcmtaggcgtttatccaggaaggactgttaggtgtcataggtcataaatgaagaatatgtattaaaatcactgtagccaaaatgttatattgtgaagtgagtcattttattacaaatgttgccccctcaatgttcaactctgtagcttgatgtggataaaatgtctttttctccttgagatttttgtgctta

SEQ ID NO: 76829 - DNA, 669 bp, Homo sapiens
ggcactggagagtatgcgaaagcacttggatagactagggatgtgataaaagtgttgttaaaggaagctgattcctatagtcatgttcttcccctctctcatagcaaacaggactccagggcgacccagtgcttgggagacagcccagattcccagtgtgaccttagcctcagttcawccttcctgaaatccaccataccaaagctttgggggcaggtggaaggctcttggagaccccagttttgtaggacaaattcccctctgatttgctctcctctcttttctgtgttgctctttcctcttgtcttccctgtctgttgcagggagagcacaaagaggaggtagggcacaagcaccacccatcaaactctcattttctttcaagaaaaaattacaattatgaaagatttcaccattgggtctaaaaacaccacaatgcaaatgcctctgttcccccagtcctcttccctctctcctcatcatcgtgtccctttcttcatcagcaccgctgatcgactacactctgggggaagggggttcgtgcggaagccattgggatcttcagcagcagagaggagaagtgaggacggggaggggagaggcgaggtgtggtcagagccaggtgcagctgggaaagagggaggctggagtactaggagtccacagctt

SEQ ID NO: 76830 - DNA, 669 bp, Homo sapiens
ggcactggagagtatgcgaaagcacttggatagactagggatgtgataaaagtgttgttaaaggaagctgattcctatagtcatgttcttcccctctctcatagcaaacaggactccagggcgacccagtgcttgggagacagcccagattcccagtgtgaccttagcctcagttcatccttcctgaaatccaccataccaaagctttgggggcaggtggaaggctcttggagaccccagttttgtaggacaaattcccstctgatttgctctcctctcttttctgtgttgctctttcctcttgtcttccctgtctgttgcagggagagcacaaagaggaggtagggcacaagcaccacccatcaaactctcattttctttcaagaaaaaattacaattatgaaagatttcaccattgggtctaaaaacaccacaatgcaaatgcctctgttcccccagtcctcttccctctctcctcatcatcgtgtccctttcttcatcagcaccgctgatcgactacactctgggggaagggggttcgtgcggaagccattgggatcttcagcagcagagaggagaagtgaggacggggaggggagaggcgaggtgtggtcagagccaggtgcagctgggaaagagggaggctggagtactaggagtccacagctt

SEQ ID NO: 76831 - DNA, 815 bp, Homo sapiens
atgggctaagccaatgacagtattcttaccttccctggcctcagtgattgggtaaggaaaaggcatataacccagcaccaagccaatcaatgcataggattctcttggccatggtgattggcttgagagctacctcgtgatgtaagttggtccaatcagagagaaagttgggatttgtggtaaaagttgggagtaagaaaagccttttaaacctccgtggttatgaaaaaggaagcatgtgaccccggaggtgctagcacacattttgctattgtgagggaattcaatctgagaatgggcctgatacatkagaaaaggagagtggagagaatcacaaagaaatgtagccaaggattatgagacattaccaacctctgggtgaaactcctcctgaagctgacatttcccctggggattccaatttcatgagtcaatagatttcctattggttaagtaattttgagtttgattttctgttatatacagtggacagtataatatctttacatttgattccttctgttctttcagctacaggcctcgtgaaagcttttgcagagtgtatctgcaggcctgcgttgggcagggttccaggggaagactgggcttcagatgaactcctctcccagaagcttaactcagtccccagggtcaggctggtagggggagggaaggagggaggagtaaaaggccagagaatccacattctggaaggtcaggccctttccactcagctgggcaaactctccctgctcagccccgagtcagtcttcagagcacctttcagctccaggtacagattccccagactggga

SEQ ID NO: 76832 - DNA, 735 bp, Homo sapiens
ttggctcactgcaacctccgtttcctgagttaaagcgattttcctgcctcacccttccaagtagctgggactacgggtgtccccccccccccccagctaatctgcgtacttttcgtaaagagggaatttcaccatgttggccaaaatggtctcctttttttgacctcgggatccgcccgcctcggccaccgaagtgctgggattacgggtgtgagccaccgcgcccggccgtcaccacaagctttacctgtttactgaacgaaagatatgcttctttcttccaaaattcataggttgctgagaataaaggtaaatttggcaccatatgatatttagaaaagtcctattacaatgaagagaaaaaatattaaatgaaaagggactatgtttctatcttagaccattttatgctgtcagaatgccgaggactggttaagttatttaaaaacagaggtttatttcttaccgttctggatgctgggaagtccaagatctaggagcctgtrtctggcaagaggtttcttcctgtatcatcccgtgagggaaggtggaagggcaagagagcatgtgcaacacagagagggagtggagctgaactcattcttttatcaggaacccactcaggataactaaccaacttccaccatgacagcattaatccattcatgagggcagagctctcatgagccaatcacctcttaaatctcacctctcaacacggttgcagtggggatt

SEQ ID NO: 76833 - DNA, 639 bp, Homo sapiens
tcctgacagtggctggaactgaaattactaccttgcagatgtccacatttggttaagtctccaaattaactgcttcaaataagaacttaatttcggtttaataggacagccagtgtgtgctaattaaagacagaatgattcttgaaaaggcatttactgagtgyttaacaacgatgtaatagaagcggaccagctgcatactgtggtcgctgaacttccacaaccgggttcttactgatcaattggagtttactcatcaggaaagacctatcctggcaaatctcaatcactccacagggcagaatttctggccactgcaggtagatgcttaggtttaattgtttcacggcacgtcttgggattcaggaggttttcctcccataaatcaatgattcttttgactgcttcagattctttgctaactctgatttttttcattttgtctgaatccattaataagtcctttcattttatgctggcttatatatatttttagtttacattgaaaatttcaaattaaaatatttaagtcgttttctatttttaccagaaagatatttttatccattatacaaaagcccatgttgaaaaaggtggatgcaacttgtaaagtacattgaaatggttaaacatttttgg

SEQ ID NO: 76834 - DNA, 1841 bp, Homo sapiens
ggacattgtgctaagtgaaataagccagtcacacaaaaaaagacaaacatggtgttattccacttatagaaggtacctagaggtagtcagattcatagagacaaaaaagtagaatgatggtttccagaggctgagggattagggaaatggggagtcattgtttaaaggatgtagaattttgattttgcaagatgaaagtgctttgtagatggatggggatgacagtggtacaacactgtgaataaaattagtgccactgaactgtacacttaaaaatggttaagatggtaaattttgtwgtttgtactttatcaaaattttaaaaaataataaaataaaaaactcaggcatcaacatttctgtgaaaactttccctgtccccaacaccaagccgaattagtctttccttcctcttcatctccagtgataattaaaacagtactaattaaaattatttgtctgaatgcccttcttcctttccaactagaagctccttcagagtcaagactttgtctttttcatctttatcttgcatggtcatcactgggacaattcacaaatatccagctctctccttcctggtgaatgatagatgacacttcacatttatccttggccaatgaagtgtgagcagaaatgatgtgcatttcagggcaagggccttaagaatcaacctgcatttgtcatgtactctttgccctctgccagatagcggctaccggatcacaataagttcccaaatgaggactagatgactaagagtgcccctcagtggatatgtagtaagaacaagaaataaatttttgtgttttaggccaccaaaatgttaatagtgtttattaccataacttagcctaatgtatctttactcataaatccataatgcttaggatagtacttatatcaattacttttcttaaagtcttaattgaataacttaatgaagaataataaactatccctataagactaaaacaaatagattttaaatgcattggtaattcatttaaacttagtttgtaaattgaggtgaccactttggtgatcaagagcagtaataggataatgaatccacagttccatccccagccctttatatcattacttattaattataataataactaccacgtgttgagttcttgtagctgttcaaaactgtattataagcttacatgcattactttatttaataattacaacagttttatagattacaaacctgaaactagaaatcttaattaactttcccaagaccacaaaggtaggaattggcagagccaggatttaaaacaggtctatcaatttccaatggctgtgtttataaactacagcccagcagattccttttttttcccaacacccaggaaagtttctgggtgagaaaaacaagtaaaaccggcaatgagaaaacttcatccatctggatggcaaaaataaaaaagtgatgtcatccaatgctggcaaagctgtaaggaacaggcattcttccactgtggataggagtgtaaaatgcagcaatatttttggaaagtaaagtggaaacatcttttaaataaacctctttgcccaggaatccactttgggaaatcttatgctacaaaaaataaggacaccaatgtgtacaatgggatgttaggtaattattaaacagagtgcatgagacacatatccatgttgcccagagataagtccatgatataatgtttatagtataatccatttttataaagacaaaagagaacaattgtgtatatgttcacatgggatgtggaaggatagacacagctattgattggctagctatcttgaggggatgagaaagcagaggatgaggtaat

SEQ ID NO: 76835 - DNA, 1841 bp, Homo sapiens
ggacattgtgctaagtgaaataagccagtcacacaaaaaaagacaaacatggtgttattccacttatagaaggtacctagaggtagtcagattcatagagacaaaaaagtagaatgatggtttccagaggctgagggattagggaaatggggagtcattgtttaaaggatgtagaattttgattttgcaagatgaaagtgctttgtagatggatggggatgacagtggtacaacactgtgaataaaattagtgccactgaactgtacacttaaaaatggttaagatggtaaattttgtagtttgtactttatcaaaattttaaaaaataataaaataaaaaactcargcatcaacatttctgtgaaaactttccctgtccccaacaccaagccgaattagtctttccttcctcttcatctccagtgataattaaaacagtactaattaaaattatttgtctgaatgcccttcttcctttccaactagaagctccttcagagtcaagactttgtctttttcatctttatcttgcatggtcatcactgggacaattcacaaatatccagctctctccttcctggtgaatgatagatgacacttcacatttatccttggccaatgaagtgtgagcagaaatgatgtgcatttcagggcaagggccttaagaatcaacctgcatttgtcatgtactctttgccctctgccagatagcggctaccggatcacaataagttcccaaatgaggactagatgactaagagtgcccctcagtggatatgtagtaagaacaagaaataaatttttgtgttttaggccaccaaaatgttaatagtgtttattaccataacttagcctaatgtatctttactcataaatccataatgcttaggatagtacttatatcaattacttttcttaaagtcttaattgaataacttaatgaagaataataaactatccctataagactaaaacaaatagattttaaatgcattggtaattcatttaaacttagtttgtaaattgaggtgaccactttggtgatcaagagcagtaataggataatgaatccacagttccatccccagccctttatatcattacttattaattataataataactaccacgtgttgagttcttgtagctgttcaaaactgtattataagcttacatgcattactttatttaataattacaacagttttatagattacaaacctgaaactagaaatcttaattaactttcccaagaccacaaaggtaggaattggcagagccaggatttaaaacaggtctatcaatttccaatggctgtgtttataaactacagcccagcagattccttttttttcccaacacccaggaaagtttctgggtgagaaaaacaagtaaaaccggcaatgagaaaacttcatccatctggatggcaaaaataaaaaagtgatgtcatccaatgctggcaaagctgtaaggaacaggcattcttccactgtggataggagtgtaaaatgcagcaatatttttggaaagtaaagtggaaacatcttttaaataaacctctttgcccaggaatccactttgggaaatcttatgctacaaaaaataaggacaccaatgtgtacaatgggatgttaggtaattattaaacagagtgcatgagacacatatccatgttgcccagagataagtccatgatataatgtttatagtataatccatttttataaagacaaaagagaacaattgtgtatatgttcacatgggatgtggaaggatagacacagctattgattggctagctatcttgaggggatgagaaagcagaggatgaggtaat

SEQ ID NO: 76836 - DNA, 1489 bp, Homo sapiens
aggaatgctttacaatcagggtcaaggttatagtcaaagcctaggagacagggaatctatacattatttgaaatacctaccacctgtgtggtatgyttactccaaggaagaagttgagtaaaggaggcagagtttaatatagaaagagtagtacatatatctaccagaatctggtgaggtttcaacatttatatttatagttaattcatcctgtatgtttaagactaaggcaaaatgttgggcactgttttcttccttagagagctcttgttgatctgaattgagaaatttttctttatcatggcttttcttttccaagatgaaaccatcttttttcccttgttccttctgtttacaatttctacaggtatctttgttaatagatagtctgttaggaagttagccacccagctgtttggtctgcagaggtgtaagtttatttggttcctctctcattttgttctagagccctttcaagacattctacctggtgttgtagttcaggtaaaaggcttactttccgttctaatttctgttttcttattaggtccccaatgaaagggctgctgttatgtcaacatcttctttaactaccagatgttgtcagatggtattttctagcctatcctaaaatcctctatagtttcatcttttctctgtttgcatgatttaattgcagtccaattaatttttattgcaaatgtttaagatatggcttttgggaaactttgtcctactttccagccctattttttgactctgagatttattagggaaagggggatcctacagacccctttttggatcagtctcatttcttttgccaccaagaatttagtatctaagattccaaccaacatgagtacaagtggatataaatcagttaactctattgagtgcatacgaggtatatgcactcaaaacaattctaaattcttctatgaatagctgctgatcatgcctggattaagagaacttcataattatagttcttaattcagcttggctccaaggttttaattctactgtagctttcatctggctcatgggcaagatgatagatgtttagaggcaattgacattttgaggcctttaaacaagtctttaggaaaaggtagggcatctggacaaggtgagtaggtaagatgagtccatgggtgtgcagaagaggaaagatttgaaaaatagagaaaaaaagtagagctggacatagggaagtacctggaggacaaggaggaagataatttactagggaaaataaatacagtatattgttacctaagtgtgtcaaattgttcacttgctttggccaaaaaaaataaaatctcttagtaaagcaatgttttctcagagttttgttttgaggcctctgaatactaattaaattttttaaatgctaccaattgggcctgagaaagcttaattccttttattttctaaagcatctctcaaatgaacagttttgttcaagttcaaacattctccaaag

SEQ ID NO: 76837 - DNA, 1628 bp, Homo sapiens
ttctttttcattataagctttattgtgctatttgaccttttaatctatgttatttttagtctatatgttattctaataaaaattttaaaaaatcaagtttcataaacttgttcctgacagaatacatgtgtttctccatattcaatcctactgattcatatagttttttccgatactttaatgggaaaattttcaaacgtatagcaaagttcaaagaggcttacagcgaacacccatacacccaccacctagagtctcctccaagcatttattctacttcctttatcaagtatctgcttctgttagagaattgattagatgagtgtgatccttgattagaggtcttttatgaattccttcttttttggtttgttttcttaatttgcatcaagttttattgctgtttcatttagctctgcgtgactaagattcctttaattgtgtgtatgtgcatgtgtatgtgtgtatacacacatcttcacaaccaaagtttccaggtgtttacaccaaagtggccagttaccactattggattaactattatgtgggagggtctcttatatctcagcacaatgtataaaattgtaatctttttttctgttctcctctcaggagttccaggttaatttaaatgaaacaatgcataattaatacttctctaggaaacaacaaccaagcagattttattggatatttttwaaggcatctacaaagtttatgctacatttgaatcttgctgtataaccctcaaatattttactcaagtataaaataagcattattttaatatatacctatattttcccaataaatcatatgcctaaagcctatcccattcagttattctggtctccagaaataattgcctgttgactttattggttttgtctttacctcttttccttctcatttatgttttttaaacattaattttaatcatagcctttttgtgaataagagatttattatgtatcctttattcgttgaaacttgaatcagttttccctgtgttgtctggttcatacccatttcttatcactgaaactctccagtctcttacctcttttctttctagggactgctctgtaatatgttattactggtttaaagcagccctcctgaccactatcctttgtgggggtttttttttcccccattccacgtctgtctcttaggtctgccctctttttgatttttatagtggacccagacgttttcttctcttaggctttagtaattcattcagatcactaatgtcttgagtgtaattatgtgccaagcattattgagctatcaagatgcctccaccatattcctattctgctcaacttggattcttagtgcctcctgaacacattatggccattcccaaccagaacctgtgccctggtttgcaatgcctttctcacccattcctccctgtttcattcttaaccagtatccttcagcacctagctgctttgagcttttgctgaacttaatgggtacattgaaaatgtgaagtttctttatatcaaggtaattttattttaagttccagggtacatgtgcagggtatgcaggtttgtcacataggaaaatgtgtgccatggtggtttgctgcacctatcaacccatcacctaagtat

SEQ ID NO: 76838 - DNA, 1628 bp, Homo sapiens
ttctttttcattataagctttattgtgctatttgaccttttaatctatgttatttttagtctatatgttattctaataaaaattttaaaaaatcaagtttcataaacttgttcctgacagaatacatgtgtttctccatattcaatcctactgattcatatagttttttccgatactttaatgggaaaattttcaaacgtatagcaaagttcaaagaggcttacagcgaacacccatacacccaccacctagagtctcctccaagcatttattctacttcctttatcaagtatctgcttctgttagagaattgattagatgagtgtgatccttgattagaggtcttttatgaattccttcttttttggtttgttttcttaatttgcatcaagttttattgctgtttcatttagctctgcgtgactaagattcctttaattgtgtgtatgtgcatgtgtatgtgtgtatacacacatcttcacaaccaaagtttccaggtgtttacaccaaagtggccagttaccactattggattaactattatgtgggagggtctcttatatctcagcacaatgtataaaattgtaatctttttttctgttctcctctcaggagttccaggttaatttaaatgaaacaatgcataattaatacttctctaggaaacaacaaccaagcagattttattggatattttttaaggcatctacaaagtttatgctacatttgaatcttgctgtataaccctcaaatattttactcaagtataaaataagcattattttaatatatacctatattttcccaataaatcatatgcctaaagcctatcccattcagttattctggtctccagaaataattgcctgttgactttattggttttgtctttacctcttttccttctcatttatgttttttaaacattaattttaatcatagcctttttgtgaataagagatttattatgtatcctttattcgttgaaacttgaatcagttttccctgtgttgtctggttcatacccatttcttatcactgaaactctccagtctcttacctcttttctttctagggactgctctgtaatatgttattactggtttaaagcagccctcctgaccactatcctttgtgggggkttttttttcccccattccacgtctgtctcttaggtctgccctctttttgatttttatagtggacccagacgttttcttctcttaggctttagtaattcattcagatcactaatgtcttgagtgtaattatgtgccaagcattattgagctatcaagatgcctccaccatattcctattctgctcaacttggattcttagtgcctcctgaacacattatggccattcccaaccagaacctgtgccctggtttgcaatgcctttctcacccattcctccctgtttcattcttaaccagtatccttcagcacctagctgctttgagcttttgctgaacttaatgggtacattgaaaatgtgaagtttctttatatcaaggtaattttattttaagttccagggtacatgtgcagggtatgcaggtttgtcacataggaaaatgtgtgccatggtggtttgctgcacctatcaacccatcacctaagtat

SEQ ID NO: 76839 - DNA, 1850 bp, Homo sapiens
tgcaaaagagctcctgaattttgggattctaaatttgaatactgtatgttattacttttctacatgccaagagctgttgtaatatttctaggccatttttcaacactaagtaagttgctttgtaagtgaacataattattaaagtggtaaaacaacgaagcagaacactaacttcacacttcagtgtattatttattttggttaaggaccaataagaccaagattgtgggttataatcccatgtgggccagttgatatcccaccaacaaatactttcagtattcacatgaatatgactaatttagtacagactcatggtcagcagtgcaagcttcagatcccaagattaatagatgcactttaaaacaatatgttttaatgaaagcacttttttggcaggtttactttctttaatgcaatgccagagatacaccaacaaagtgacataaatgttgtatataagttctccataaatagtataatttaattggcatgtcatatatatctatagatagatatatttatctacaacaaaacaaggatcctatagatatctatctatagatatatatatctatagatatatatataatgttaaactataaaaacttcaaaacagtccaataaagaagtagtataaaattgagaacaaatcacatttggggccagctccaacagtgggctgcctagatatgatgaggggaagaggcatttgacagactttccttttgttaggtaggagacttggttgtttttcatccagcttctttctcaataggatttcaggtggcaggcaatagttagatttaatcaaatagacaaatggatgaaagacctgtagggctttcattggcaaataatggggtgataagtgtgtttgagaaagatgctgcttgtagctgtgttaacagtgtagcagatagattgctgagcttttaaaaccagacattttctgcactgtgtatcttactagatctttccagcaaattggaagatgcatactgggaggagttatagttcactccttctgcaccagaataccagatccaaagtattttaactctaagagttatagagaactttgagaaattttcaggaagccagcctttggtaaaatggctacaacgtgaattttgtttcggtggtccccaccttaccctttcagtaactgccatcattgactgagatcctgctgttgtttggccatcttagacttctgcctagacacacctgcactgggaattgttttgtactctgtcccatccaaaatcatcacttctctgtctcatttctttcaagtttttcacaaacagattaatcagttccttcctaatgactttttttcttcctctctatatattatgcacatttaatatcagcttttattttaatggtgtgaaataaaggagtgtttctaatggtgtaaagtttaagcatcatgaccatttactctgacagcaggttgatcctggagtgctactcttcacactagctcagtattagctcagccctggcttcccatccctgtcttttggttgaatacatatacatttagacaaagataagaagatgtctagaaatggggattgtacaactttcttccaggaacagcggracagtaatttacagcatggatttgagaactggaaagaattgagttagaatcataattccatgtcttattagctgtgtgacctagggtggtatatttaacatccccttggtaaatgaggataataaagctttacctaacattcttattgtgctgcttcagtgaaataatatatctaagaaatttagcatcaatatataatgcaacatatgtaagaaatttaaaatatgtgtggcac

SEQ ID NO: 76840 - DNA, 650 bp, Homo sapiens
tgcatgggaggactcattctgggatcataaatgacatcccccaaattctaccccagatctgcctacagtcaagcttgaggccttgtgggcctagaaccagggcatcctggacttccgatgggcagggctgtataggaagttatgccaccaacgaggtggtcctggacaggggctgcattaggtccatgatttgcaaatgtgctctgtggaaactgaggaagtccatggagcttttttggaagcggggaagagcaggacggcatctaatgaaagggctcggtaggcagggtaaggaagctccaaggaccccctgcccccaaattctaccagagcagtcccacctttatatgatgtcaygctggccttcctgaaacactctttttttttttttttttttttttttgggaaacggagtctcactctgtcacccaggctggagtgcagtgctgcgatcttggctcactgcaatctctgcctcccaggttcaagtgattctcctgcttcagcctcctgagtagctgggactacaggtgtatgccaccaggcccggcaaaattttgtatttttagtagggatggggtttcaccatgttggccaggctagtctcaaactccagacctcaagtgatccacctgcctcagcctcccaaa

SEQ ID NO: 76841 - DNA, 560 bp, Homo sapiens
ttgcaatctatccatctgacaaaggtctaataytcagagtcaacaagaaacttaaacaaatttacaagaaaaaaaaaacaaccccattaaaaaagtgggcaagggacatgaacagactcttctcaaaagaagacatttatatggctaataaacttatgaaaaaaagctcaacatcactgatcatcagagaaatgcaaatcaaaaccacaatgagataccatctcacaccagtccaaatggcaattatttaaaagtcatgaaacaacagatgctggcaaggctgtggagcgagaggaatgcttttacattgttggtgggaatgtatattagttcaaccattgtgtagctgggactacaggcgtccactaccacgcccggctaatttttttgtatttttagtagagacagggtttcaccatgttagccaggatggtctcgatctcctgacctcatgatccacccgcctcagcttcccaaagtgctgggattacaggcatgagccaccgcgcccagccaaggaaatatctttatagatgtcttcttgtgtacctgtgtaagaa

SEQ ID NO: 76842 - DNA, 560 bp, Homo sapiens
ttgcaatctatccatctgacaaaggtctaatactcagagtcaacaagaaactwaaacaaatttacaagaaaaaaaaaacaaccccattaaaaaagtgggcaagggacatgaacagactcttctcaaaagaagacatttatatggctaataaacttatgaaaaaaagctcaacatcactgatcatcagagaaatgcaaatcaaaaccacaatgagataccatctcacaccagtccaaatggcaattatttaaaagtcatgaaacaacagatgctggcaaggctgtggagcgagaggaatgcttttacattgttggtgggaatgtatattagttcaaccattgtgtagctgggactacaggcgtccactaccacgcccggctaatttttttgtatttttagtagagacagggtttcaccatgttagccaggatggtctcgatctcctgacctcatgatccacccgcctcagcttcccaaagtgctgggattacaggcatgagccaccgcgcccagccaaggaaatatctttatagatgtcttcttgtgtacctgtgtaagaa

SEQ ID NO: 76843 - DNA, 560 bp, Homo sapiens
ttgcaatctatccatctgacaaaggtctaatactcagagtcaacaagaaacttaaacaaatttacaagaaaaaaaaaacaaccccattaaaaaagtgggcaagggacatgaacagacwcttctcaaaagaagacatttatatggctaataaacttatgaaaaaaagctcaacatcactgatcatcagagaaatgcaaatcaaaaccacaatgagataccatctcacaccagtccaaatggcaattatttaaaagtcatgaaacaacagatgctggcaaggctgtggagcgagaggaatgcttttacattgttggtgggaatgtatattagttcaaccattgtgtagctgggactacaggcgtccactaccacgcccggctaatttttttgtatttttagtagagacagggtttcaccatgttagccaggatggtctcgatctcctgacctcatgatccacccgcctcagcttcccaaagtgctgggattacaggcatgagccaccgcgcccagccaaggaaatatctttatagatgtcttcttgtgtacctgtgtaagaa

SEQ ID NO: 76844 - DNA, 560 bp, Homo sapiens
ttgcaatctatccatctgacaaaggtctaatactcagagtcaacaagaaacttaaacaaatttacaagaaaaaaaaaacaaccccattaaaaaagtgggcaagggacatgaacagactcttctcaaaagaagacatttatatggctaataaacttatgaaaaaaagctcaacatcactgatcatcagagaaatgcaaatcaaaaccacaatgagataccatctcacaccagtccaaatggcaattatttaaaagtcatgaaacaacagatgctggcaaggctgtggagcgagaggaatgcttttacattgttggtgggaatgtatattagttcaaccattgtgtagctgggactacaggcgtccactaccacgcccggctaatttttttgtatttttagtagagacagggtttcaccatgttagccaggatggtctcgatctcctgacctcatgatccaccygcctcagcttcccaaagtgctgggattacaggcatgagccaccgcgcccagccaaggaaatatctttatagatgtcttcttgtgtacctgtgtaagaa

SEQ ID NO: 76845 - DNA, 2459 bp, Homo sapiens
  misc_feature (1)...(2459): n = A,T,C or G
gnnnnnnnnnnnnnnnnnnnnnnnnnnnnnnnnnnnnnnnnnnnnnnnnnnnnnnnnnnnnnnnnnnnnnnnnnnnnnnnnnnnnnnnnnnnnnnnnnnnnaagggctcagttacagttttctgggttggaagtgctcctttttgaggtccctgtcagttacccttatctagataaaggatttggtccatggctaaagactgaggtggattggctcatggctaacccaaggccaagcagactggcgccctgtgctgatgaaggggtgcccagtgcttggcccttggccactccaaggcactctccctttccatcttagacatggtggggtggggagggttgtagagaaagtggccttggatcccttctttctggggtgtggggaggcagggttttcccttttggtttagctttaggaagttcgcattaattggtcttaggttctctgaccccagacccaggtgtttaacctttgatttaactttaagaaattatcacgaattgtcctcagattcctttcccccagaccttgatggtttcccttgattcagctttaggaagtcagcacaaatcagcggcctaagttccctgccaccagaccctattcttctgcctcagtggtctccgcatcatttcttcgagatcaaaagagaaccaaaagtcatctcttctacatccttgctttagtaagataatgcttatttacacgtaaagacatgaatgtaccttaaattttataaaaatattttctaccctttactcattaaaataatgtatgaattttaaggctctctaagatagatatttggtaggagagagagagagaaaaaaataatgcactcacaaattatttctgtggaaaaagttctgcaatttccgtacttctttctcatctgtccctctgacttggttaattgtttgggtcatagaaaagaataaagaacaagttttcaagtgacttgcaaagttntgagttagacactttcagaaggaagatgcttcaaccttcaacctaaaaattgaatgcaaaatcttgtagtcaagcatttctattcatgttagcctggagtaagaacaaaaagcataaaagactaaaaagatttcagttgaaacaaagggcatttgggaatggagtcacatactgagcatatcaaagattccaaagctaggttcctgcttttcggttttctgtagaaatgacatctcagaggagtaaatataaagaagaacaatgaaagagagagggtattggtaggaggagatcaagaaaaacattataaaaaatgagattttgaatagttcatatggattttgttcttcttttatcctgaatgggaaccaaaatctatctggttgggagacaaaaaaaaaaaaaaaatagagaaaactttgattcataacaattgactagcaaagaatctaagagaatctaaagttttgggtgataaaatgatttttcagacactctttaatatacttttaacaatatttctgcctctgttttttcatattttctggttatataataaagagaattatctgattacagttttctttttcctaggctttttatatctccaatgcattttaatgtttctatagagtcaacccaatatgccaattttatccaaagaacaaaatttctaacctatattatttctctgtttgtcttcttccccttcctctccaacccacccacatactgacaaacttatgtatcctttatttgagttccccgttctcctaatttagaatatctatgacttaccaggttgtaatgtagtattcatgttgtctcacttgaaatcggagtaagttatgcactaagggaattttgcaagtgaaatcgcttaaagacaagacgatgacacatcacaattttcttttcctagttgcaagcggtacaatgtattaggtggaaattatcaatgtctcggaaagacacagtaactcaaaactcctccagcacagtgaactgctacagctggggcaaaaaggaataaaactgccaaaaagcatcaaggagtttgagaaagtgataaagtctggaaatgcatttatgaatgacaagcatatgggtttttagcaactcacttgttgaaaagttgaaaaaagtgcagaggttatatttttcttcaattccttttattattattgaattattccagcagcagacctttttcttcaaaagaatttcttagaattcrttaattacctgatttcatgtcagccagatattttcctctcaagccagcgcaccgtaacagttgatgcccggtggctaacctcctggcaaccaatgcagcttcgtttgatgattaattattcattgagcgcctaccatgaagagggaaaagcttgcattcttgctagaagcttgcagcttgctaggcaaacaccaaccaaatgaagcaaacaaaaatgttacacatttgtcctttttctgcatattctggatcc

SEQ ID NO: 76846 - DNA, 857 bp, Homo sapiens
agttcaaatccgggtgtgcatgactttatatcattgtatcactctatcttttgaacgatgggatgcacagaaaaattccattaagatctagaaagtgctgtttaatattaccatttcaaatcttcaaatcttgaatatcctctcaatgtgttttagtttggcttcaatgctcctaaaatttagatacttttattttctttatttgacgtagcattatctatagataggcatttgattaayaattacatatatatcgtttacctacattatctatttgctctctagtgaaacagaatagatggatatatttctccatttctttctttttattttcttatttttgagacacagtcttgctctgtcaccctggctggagtgtagaggtatgatcatagctcactgcaacctcaactcctaggcttaagtgatcctcccgcctcggcctcccaagtacccaggactactggtgcacaccaccacacctggctaatttttaattttttttttttatagagatgggggtctcacgatgttgctcaggctggtcttgaactcctggcctgaagcgatcctaccaccttgacctcccaaagtgttgggattacatgtatgaaccaccatgcccggctctatttctccatgtcttgaatgaggaaaccgaggcttacagttaatgacttatggaattccgcactctcacaatggtatataatgctttctttgatgttaataatggtgggagtgtttatagctcttgtgtggaacacctaagggagaaacttagcacatcaaatcagcaataagatgagactaggggagctggagcattcatggaacggaggaggccgggtcttggg

SEQ ID NO: 76847 - DNA, 1017 bp, Homo sapiens
aaatcggaaaagactgcagcaaggcatcttcctatgcgacaggggattctgccttcgcccaggtgagtaatgccccttaaatggcagatggcagatgtgttattcaggctgagagagactgtggggaggaggcttgcctggatggagacttggaggcgaggcttccccagctgaggttaccagttcttgggagcagggaaggctttcctgccaggcaggagtgtgatgatgggcactcccccgttcctctcgcyagcacctcatttatatccggcttgctccaggctcaatcccccaatgaaggctatgcaccgtctggctccactgccttgaagggttaggtaaataagcacatggctcctcggggaatgtgtcccggcgctgggccgctgccctccccgcagccatcccggcagatttatgggcttcaggtcactgaagcatgtgccacttcactttcacttgcctgggattcccagaggggcaggggcttcctaaagacctgtgtctggtgctctgtgatgtcccagccaagccttgagccccgtcgccaggatccgactccaggtgtcacactgtggagcccccttctaccttctcttgctccccagtccccacccccacttggcatacaaggctcccagaaactctagcctcccagatgccagctcctgtttttatacagcattgtgtgaggatttgtgggaatgggccactgcattgaccaacccaccctccatggagccacctgctcggtgcaagccctggggagagaggagtgaatcggatgtggcatctgtccacagggtcagctctgggatgggaagagatccaataaagaagtcccacactatgtttgctgtccttgtataaggcactgatgatcagttcccttaggattcagatctagaaaagattttcctttttcaaagacaaagagaacgatgggagctattcatgctggcgtattacctttgttctcagaaaacatcgcacaaaatcaatgtgcaagggtag

SEQ ID NO: 76848 - DNA, 778 bp, Homo sapiens
aacaaatactgagtgtcaatgcactatatgttagggataaaatcatgaccaaaaccaacatggtacctgctttcatgggacattgaagttggtggccatttctttcatttattttagagttaaaacattttcttggctggatgtggtggctcacgcctgtaatcccagtactttgggaggctgaggtgggcggattacctgcagtcaggagttccagaccagcctcgccaacatggcaaaaccccatctctactaaaaatacaaaaattagcgggtgcctgtaatcccagctaytcaggagcctgaggcagtagaatctcttgaacccaggaggcagaggttgcagtgagccgagatcacaccattgcactccagcctggccaacaagaccaaaactctgactcaaaaaaaaaaaaaaaaatttcttcgcaagttttataaactgggtgctccaatgttgggtacatatatacttaggatagttaaatctcattgaattgaaccctttataattatgtaatgtccttctttgtccttttgttatggtgactagtttgaagtgtgttttgtctgatacaacaataatgacctcttctattttttgttttccttttgcttggtacatctttctccatctctttactttgagcctgtaggtgtcactacatgtgagatggatgtcttaaaaacagcagaagattgggtttttttttttttattattcaatttgccactgtatgtctttttaaatggagcaattaggccatttacgttcaag

SEQ ID NO: 76849 - DNA, 778 bp, Homo sapiens
aacaaatactgagtgtcaatgcactatatgttagggataaaatcatgaccaaaaccaacatggtacctgctttcatgggacattgaagttggtggccatttctttcatttattttagagttaaaacattttcttggctggatgtggtggctcacgcctgtaatcccagtactttgggaggctgaggtgggcggattacctgcagtcaggagttccagaccagcctcgccaacatggcaaaaccccatctctactaaaaatacaaaaattagcgggtgcctgtaatcccagctattcaggagcctgaggcagtagaatctcttgaacccaggaggcagaggttgcagtgagccgagatcacaccattgcactccagcctggccaacaagaccaaaactcygactcaaaaaaaaaaaaaaaaatttcttcgcaagttttataaactgggtgctccaatgttgggtacatatatacttaggatagttaaatctcattgaattgaaccctttataattatgtaatgtccttctttgtccttttgttatggtgactagtttgaagtgtgttttgtctgatacaacaataatgacctcttctattttttgttttccttttgcttggtacatctttctccatctctttactttgagcctgtaggtgtcactacatgtgagatggatgtcttaaaaacagcagaagattgggtttttttttttttattattcaatttgccactgtatgtctttttaaatggagcaattaggccatttacgttcaag

SEQ ID NO: 76850 - DNA, 778 bp, Homo sapiens
aacaaatactgagtgtcaatgcactatatgttagggataaaatcatgaccaaaaccaacatggtacctgctttcatgggacattgaagttggtggccatttctttcatttattttagagttaaaacattttcttggctggatgtggtggctcacgcctgtaatcccagtactttgggaggctgaggtgggcggattacctgcagtcaggagttccagaccagcctcgccaacatggcaaaaccccatctctactaaaaatacaaaaattagcgggtgcctgtaatcccagctattcaggagcctgaggcagtagaatctcttgaacccaggaggcagaggttgcagtgagccgagatcacaccattgcactccagcctggccaacaagaccaaaactctgactcaaaaaaaaaaaaaaaawtttcttcgcaagttttataaactgggtgctccaatgttgggtacatatatacttaggatagttaaatctcattgaattgaaccctttataattatgtaatgtccttctttgtccttttgttatggtgactagtttgaagtgtgttttgtctgatacaacaataatgacctcttctattttttgttttccttttgcttggtacatctttctccatctctttactttgagcctgtaggtgtcactacatgtgagatggatgtcttaaaaacagcagaagattgggtttttttttttttattattcaatttgccactgtatgtctttttaaatggagcaattaggccatttacgttcaag

SEQ ID NO: 76851 - DNA, 892 bp, Homo sapiens
tgcataaaaccgaactgtaagctgactgcctcaggcacaccttctcaaaacctctggagactgttccccaggccatggtctgtcatactgggtcagaataaacttctttaaatattttactgtgctttgtttttccattaacaagctcatggattgacttacagatatacccacccaattatcatgctaaactccttatagaagtgcccagaatagaaatggtcatcaccatctcttcacctgatatgtggcatccaggccaaagcctgctttctccattacattccatttcacatcctctatcctatcctaggaagtcttaggatctgtatatttatttagcacatatgaaatattttttgttaaaaaaattgtaaataaatctttataggcatagtaattttcttttctagttttgttctctcgtttttaaggatcatttgctcattgtaaaaactttaagaatttaaaatttatgaaaaaacgcagttgtggttctccccaaaaccaaaccttgttaactttttcatctgtatctttctagtgggataaaaatatgtgcgagcaaatcagtgtttgaccatattttyattacataaaagaaattattcactatacattgtctgtgactttttcttttccaagtaaaaatataccttagacatatctcaacatctactaatactgatttccttcattcacttcaataattacagagatttctgttctatgcagataacatacttcatttaaacaatgacatagtaatgaacacttggattatttttaaacttttttcattgaaaaaatgctgcaataaactcttcacataaataacctgacattttttgacagtgtatccagtggataaatttccagcaaatattcaaag

SEQ ID NO: 76852 - DNA, 1354 bp, Homo sapiens
gcccctcccaatgggtgtctctggaaagggagttagatcaacatgaagcaacacatattttattgaattcaagttctgaacaaatccctcgccagtggcagcattatgtaaagatccatgacattggagacagtgtcaagatggggactgatgcccctttctgctgatcatgattcctgattaggaggctttgagcagttatttaagctgtctgagctttaggggtttttgtttttgtttgcttgcacagggcttgctccccccttgccagtttgtcgtgatagttaaatgacataatatatgtgagcatgcattgtaatttaaaattgtctatgaatgtaagaatcattagttatgaggatatacggtctgcccttaaacttattgtatgtgccatttaaatgtgtgatgtcctaaatgtagaggtttaaatataccttcacctaatagatgtaataaatgtgctcttgaactacattttaataaattgactagtacttgctattgaagaaatcctatatggaaacttcagtaaaagtaataatctgctacctgatttataggtaataataataaaaaaactggcactgggcayggtggctcacacctgtaatcccagcactttgggaggccaaggcaggtggatcccctgaggtcgggagtttgagaccagcctggccaacatggtgagaccccatctctactaaaaatacaaaaattagctgggcgttgttgtgggcacctgtagtcccagctacttgggaggctgaggcaggagaatcgcttgaacccaggagacggcagtttcagtgagccgagatcatgccattgcactccaacctgggcaacagagcaaaactcggtctcaaaaaacaaacaaaaaaactggatttttacaggtaagaaaatcctgtgtgaggcaccgtatagatgataaataggcttacatctttttagacaaaataaatctttacatttattgctttatatatcaaatacttaccaagcttgctttatgccaagcacagtgttaaacactttggaaatgttaagacatttaatccaacaacaaccctgtgaacagatactactatctgcccccattttgtgggggaagaaactgggattataagagttagaataacttgcccatggttatacagctaatgaatggtgatgcggggctttaactcaagcagtctagctcaaagtctatgctcttagccactgtgtagcctttcaaatctgaatttacaaaacctataaattgaggtttcttagcctcaagagattcacctttgaaaatttttaaataacttcatttaaaatatttaatttggaaaaaaaatcactt

SEQ ID NO: 76853 - DNA, 659 bp, Homo sapiens
agtgcattccagagcagaaatgcctgggtgcaaactcgtagcaccctatttagtatcttcatgacattaacatccttatgcctcagtctcttaatctataaaatgtgaggataagaatgagggccgctgccttagggttatgctgatgacttcatgagtaaatacatgctaaggactaagacttgtgtttagcatagaggaatttctcaatgttgtcagcagctattattaactagccatgtgacttcatgaaagttggcaaattccctgggcctctgtttccttatctgcaatatgagggggtctgggatactttatatcacaagttctgtgtattagtttcctactgctgctataacaaattaccacaaatttaaaggcttaaaacaacacagatctatcatctttcagttctggaggtcaaagtctgaaatgggtcttatagggtgaaagtygaggtataggcagagctgcattccttctggaggctccggtggaggatctgttccttgccttttccagcttgtaaaggccctttgtattctataaatctatttgcagagtgtctttgtttacctgagggaccaccactctgagtcattacattaactggcaattgcaggtcatgtgggacattcctggtctagacaatttcttgt

SEQ ID NO: 76854 - DNA, 659 bp, Homo sapiens
agtgcattccagagcagaaatgcctgggtgcaaactcgtagcaccctatttagtatcttcatgacattaacatccttatgcctcagtctcttaatctataaaatgtgaggataagaatgagggccgctgccttagggttatgctgatgacttcatgagtaaatacatgctaaggactaagacttgtgtttagcatagaggaatttctcaatgttgtcagcagctattattaactagccatgtgacttcatgaaagttggcaaattccctgggcctctgtttccttatctgcaatatgagggggtctgggatactttatatcacaagttctgtgtattagtttcctactgctgctataacaaattaccacaaatttaaaggcttaaaacaacacagatctatcatctttcagttctggaggtcaaagtctgaaatgggtcttatagggtgaaagtcgaggtataggcagagctgcattccttctggaggctccggtggaggatctgttccttgccttttccagcttgtaaaggccctttgtattctataaatctatttgcagagtgtctttgtttacctgagggaccaccacyctgagtcattacattaactggcaattgcaggtcatgtgggacattcctggtctagacaatttcttgt

SEQ ID NO: 76855 - DNA, 748 bp, Homo sapiens
ctggtctcgaactcctgacctcaggtgatccacccgccttggcctcccaaagtgctgggattacaggtgtgagccaccgcgcctggccaaccttttagtttttgttgtttccagcttaattccaccagtcgtaacatactctgaatggcttcaattctttgaaatttgttgaggctttctttacagcttggtatgcagaaactgctaagggagtaaaaattcacactgtggagtcagagaaggcatctgaaattcataagtgtctgagatatgaaaagaatttctacaaatgaataaagaaaaggcaacatcttagaaaactttcattgtcaaatttgatatgtgtaaatgattcttccttcctgactrtatttcctcattctttataaaaaatttctgaatcttctcccacactgaccttttcctggctcatattcctgtatcaagtggaagaaactccaaggtctccaccttggttacactattgtgtaacttgctctatttactttcacagcttcaatttttacctatattaataatttctaaatccgtaattccaaccccattttcctcttgagtttcaggaatatatttccaatttgaagtacctcaaactcaacactcacaaaccaaagttcattatctttcctctccatatgtgagcctcctagtgagttttctattttagttaataaagataaattcatccttatgttaatttacggcataatttttcctttttgacagc

SEQ ID NO: 76856 - DNA, 748 bp, Homo sapiens
ctggtctcgaactcctgacctcaggtgatccacccgccttggcctcccaaagtgctgggattacaggtgtgagccaccgcgcctggccaaccttttagtttttgttgtttccagcttaattccaccagtcgtaacatactctgaatggcttcaattctttgaaatttgttgaggctttctttacagcttggtatgcagaaactgctaagggagtaaaaattcacactgtggagtcagagaaggcatctgaaattcataagtgtctgagatatgaaaagaatttctacaaatgaataaagaaaaggcaacatcttagaaaactttcattgtcaaatttgatatgtgtaaatgattcttccttcctgactatatttcctcattctttataaaaaatttctgaatcttctcccacactgaccttttcctggctcatattcctgtatcaagtggaagaaactccaaggtctccaccttggttacactattgtgtaacttgctctatttactttcacagcttcaatttttacctatattaataatttctaaatccgtaattccaaccccattttcctcttgagtttcaggaatatatttccaatttgaagtacctcaaactcaacactcacaaaccaaagttcattatctttcctctccatatgtgagcctcctagtgagttttctattttagttaataaagataaattcatccttatgttaatttayggcataatttttcctttttgacagc

SEQ ID NO: 76857 - DNA, 1018 bp, Homo sapiens
  misc_feature (1)...(1018): n = A,T,C or G
tctctgtgtcttcacctgtaaaataggcatattggtgtcttctgcatagggctgttgtgagaggttaatgagatggtatagtagagtgtctagcacagaatccaacctgatattcaataartgttgattcttttgttgcttaaggctctctttcccctacgcagcagggagtgaggaagggagactttaactgaatgtgctttttggcagtttgtggcgtgaagatttcttgcttggaggaggacctgtctggacacaaatatggtactgggacaggcagggctgttgtgtatacttaagttcccagaatatctcaccatgtgacatctgtcactgctgataaatggtgggataaggcctggcaagactcatgatcttgcatgacactcattcttcttggaaactgtacagctctgggcttagcactgacattgtctttgtattttctctaagtctgtgtcttgtctggttattggaagnttgtgtggagtttatataaaatcaggcagcttaggttcatttgttaattcactcattcactcatccatccatccatccatccatccatccatccatccatccatccatccaacatacggaggaccaatttgctctgggccctattctaggtactgaggttacaaaagtaaaccagatgtggtgcctgcctttgaggatctctcagatacatgcaggaggcagagtagtaaacagtcaactatagtccactctgaaaagcatggtaggggaggaacactcatagtttatgggtgtacagggatggagtggaggatgcctaattcaaacttcaaaagctgtgatgcccttgctgtcaagggcagggttgactgcatacccatatgatttttttctcattattttagtatgaaaacatgcaaatacgcagtgaaggtgaaagaattttacattaagcaccaatgtcttccacctccattcccaattaacattctaccaaacttattttatgaaatacctatccttctacccacacatcaat

SEQ ID NO: 76858 - DNA, 1018 bp, Homo sapiens
  misc_feature (1)...(1018): n = A,T,C or G
tctctgtgtcttcacctgtaaaataggcatattggtgtcttctgcatagggctgttgtgagaggttaatgagatggtatagtagagtgtctagcacagaatccaacctgatattcaataaatgttgattcttttgttgcttaaggctctctttcccctaygcagcagggagtgaggaagggagactttaactgaatgtgctttttggcagtttgtggcgtgaagatttcttgcttggaggaggacctgtctggacacaaatatggtactgggacaggcagggctgttgtgtatacttaagttcccagaatatctcaccatgtgacatctgtcactgctgataaatggtgggataaggcctggcaagactcatgatcttgcatgacactcattcttcttggaaactgtacagctctgggcttagcactgacattgtctttgtattttctctaagtctgtgtcttgtctggttattggaagnttgtgtggagtttatataaaatcaggcagcttaggttcatttgttaattcactcattcactcatccatccatccatccatccatccatccatccatccatccatccatccaacatacggaggaccaatttgctctgggccctattctaggtactgaggttacaaaagtaaaccagatgtggtgcctgcctttgaggatctctcagatacatgcaggaggcagagtagtaaacagtcaactatagtccactctgaaaagcatggtaggggaggaacactcatagtttatgggtgtacagggatggagtggaggatgcctaattcaaacttcaaaagctgtgatgcccttgctgtcaagggcagggttgactgcatacccatatgatttttttctcattattttagtatgaaaacatgcaaatacgcagtgaaggtgaaagaattttacattaagcaccaatgtcttccacctccattcccaattaacattctaccaaacttattttatgaaatacctatccttctacccacacatcaat

SEQ ID NO: 76859 - DNA, 1018 bp, Homo sapiens
  misc_feature (1)...(1018): n = A,T,C or G
tctctgtgtcttcacctgtaaaataggcatattggtgtcttctgcatagggctgttgtgagaggttaatgagatggtatagtagagtgtctagcacagaatccaacctgatattcaataaatgttgattcttttgttgcttaaggctctctttcccctacgcagcagggagtgaggaagggagactttaactgaatgtgctttttggcagtttgtggcgtgaagatttcttgcttggaggaggacctgtctggacacaaatatggtactgggacaggcagggctgttgtgtatacttaagttcccagaatatctcaccatgtgacatctgtcactgctgataaatggtgggataaggcctggcaagactcatgatcttgcatgacactcattcttcttggaaactgtacagctctgggcttagcactgacattgtctttgtattttctctaagtctgtgtcttgtctggttattggaagnttgtgtggagtttatataaaatcaggcagcttaggttcatttgttaattcactcattcactcatccatccatccatccatccatccatccatccatccatccatccatccaacatacggaggaccaatttgctctgggccctattctaggtactgaggttacaaaagtaaaccagatgtggtgcctgcctttgaggatctctcagatacatgcaggaggcagagtagtaaacmgtcaactatagtccactctgaaaagcatggtaggggaggaacactcatagtttatgggtgtacagggatggagtggaggatgcctaattcaaacttcaaaagctgtgatgcccttgctgtcaagggcagggttgactgcatacccatatgatttttttctcattattttagtatgaaaacatgcaaatacgcagtgaaggtgaaagaattttacattaagcaccaatgtcttccacctccattcccaattaacattctaccaaacttattttatgaaatacctatccttctacccacacatcaat

SEQ ID NO: 76860 - DNA, 702 bp, Homo sapiens
tatgtaatgagataccatttcatactcatcgtactggcaaaaataatggaagtcctaaatcattcacatgtggactacatctgtgtaaatgamagctactaaaattgtaggtgacatgcaaattaccccactatggagtaatttgttaatatcttctaaatcccaagatgggcaaactccgtggcccaggaattctaccgtttctcagcgtgtatttagagtacctaccctacagaaactcccatggatgtgcacaaggaaacccaaacaacaatgttcccatccatcatcaataagggaatgagtcaataaagtatgccataatcacaggtgatactgtagagcagttaaattaaatgaactgcatcatatgagtaaacataaaaaataatggggagtgagaaaaacaagattcaaaatgatctaatttcagtttggtagagtttaaaaataagacatatccttctgggttatataacattaggcagaagaataaaaacctgcatggaaatgctcaaggtaagctctgggaagggagaaggattcggatgtggcaaacatggggctttaactgtgtctatgtttcacttcgtaagctgagggcagggtacactggtgtgtgttatattatttctatgcttgtctttgacacatttcattctttaaaatcttttacaaaatagtaattttattcatggatcc

SEQ ID NO: 76861 - DNA, 552 bp, Homo sapiens
gacagagatagtccttagattatgagatcatgagtgatttttaacttcttaagtttcttgtgttattatcaaattgtaataattaagatagtgtgtgtgtagtgcagggktggacaaatagagcattggaacagaacagacaaacccacccagagaaggaaatgatagatggcactgaaggtgcctggggaccatgaatgtctacaataaatcatgctggaatagtgagttgtctataagtaacaaaatgaacctggacctacacattattgtattagtctgttctcacactgctataaagaactacccgagactgggcaatttataaagaaaagaggtttaattgactcacagttccacaagctgttacaggaggcatggctggggaggcctcaggaaacttacaatcatggcggaaggcaaaggagaagtaaacgcatttacacatggcagcaggggagagagaaccaaggaggaagcactacacacttttaaacaaccagatatcatgagaactcactcactatcatgagaatagcaagggagaaaccc

SEQ ID NO: 76862 - DNA, 680 bp, Homo sapiens
aaagggcatgattatattggctctttatttattttactaatttggtctccgaaatgatttttccaatgtgtgcgtgtttctttttccctgcagtcttactaacgctgagctttgtaatcttaaattttctctaaaattattttagtgggtagaaaaggatactttaatagtcttaatttgcctgtctttggttagcagtgagaacaaacacttttacactgcatcttattgtctaacactctgatgcatgtaaaaactattggcctctgcttcctcagacctaggttatctctgacaatgaaccttttgctagcaatccacaccttcaacaagaataagcaatgtgtctgccagactcctcttcacatatctgcccttctagagrgatatttaggagctcaagtagctgtgggtggtggagttgtctatgcacttcgacttcgttctttctgtaacccaggcttttatggaccacagggacaggaaagaacagctcatatcattagcagatgcttcattggctgggggataagagtagggaggtaatcactcaaactctttctgcaatgctgactacaggatgttattagaaagagcagatggggtttggatggtttgaatcaggaatctgaaaccctagtgttgtgtccccaaaatacactagcatcaaaggcagacct

SEQ ID NO: 76863 - DNA, 1877 bp, Homo sapiens
gtcttttcactatcacactcccaagtttgaatactagaaccactttccaatcaatgcagaaccattacaactggcaggtagactataaaataagctggtgtgaagcagtttacaccacccacccacaattcctgagaatgttcagggcattcggggagtcagtgttacatgacacagttctggattcacaatgccatgggtcctggctccaatgcacattggctgtgtgacttgggcaagttattggatcactcrgaactgagtttcctcacctcataaactggaaataaccctacctcatctatatttccaaatgaataagtagaacattgtaaataaagagctcagaacagtgcctggcatattgtagacattcagagaaatatggacatttgggatggatgactgcctcagttttcttgggactgaggaagttcctggcatgaggaactttccgtgttcaaaaagggaaggcctcagataaattagagctaggtgttcactttgggtgacatcaataattgtgattctgagaatgagatggctcagaaaaaggaatactcttatgctttggttgaattatttggtttaaactaagatatgataagtccaaacacactaagatttcccatctaaatgttaactgctgtactactggtcagagtggctgtcctcaggattgagtttgacacattaggtaaacatagccctgctggaggagtgtcaataactggaaggtcatgtgcagaggtgaaggtgctctgaattgggagctgggactctagatggtcaccaggctgctgctctgggtaagtcctgcacctctgtttccattttggaaaaaggggcaaactagatagcaaaaaacaatatgcattcctttagttatttacagttcacaggtgcattttcttgccactatctcatgtgaccctcactacaatgcagtgaagatgatgtcaccctcagtatttgctgcccccaatttacagatgtggaaaatgaggctcaaatgagacagagcatctttcccaaggcctcacagccaggaggtgcccccgacagaactcaagcctaattctagagcacatctctttttcttgttacctctctgcctagctgaacacagaggtcccttcctctttcatgatctcatgacactgaaactcaaaattgtggccttttagtctaaggggtaaaagtcaaagccttgagctaaagttcctttggctaaacatctttttggagcattacttcatcatctctctgacctttgcaggcacaggggaaaataggcaagggtttctctctccattagaagaaaagaacttctatgacctctgtggaataagaaaacgtgatggtttcatgggcagtgattgctctgagcagaaattagcagaatagaaacagatcatctaagtgcagaccatgacttgggaaaatttttaatttagcggaaacctaattactcatttatatgtagtacactttctctcttttctccagaacatgtgtgcgtgcacacacacataaagctaattatgatccaaaggttcctctggaaagagtagttaattggttctaagaatacctccatcaacaaaaacagtgacacccttgtcctgggttctgtggagtcagcaggaagccttgcctatgaattctcagttgcaaagtaaacctttatttcagtacaacatgttttatggtgccataaaagaggaggaaagtcaatagttctatctaatatcaacggaaccaagaaaatactttactgattctctactgtttaaagggcaaaagaatatgaatagttacacttaacaaagtatttgaaaatcttagaggtttgacttcagcttttgctcaagcaa

SEQ ID NO: 76864 - DNA, 1877 bp, Homo sapiens
gtcttttcactatcacactcccaagtttgaatactagaaccactttccaatcaatgcagaaccattacaactggcaggtagactataaaataagctggtgtgaagcagtttacaccacccacccacaattcctgagaatgttcagggcattcggggagtcagtgttacatgacacagttctggattcacaatgccatgggtcctggctccaatgcacattggctgtgtgacttgggcaagttattggatcactcggaactgagtttcctcacctcataaactggaaataaccctacctcatctrtatttccaaatgaataagtagaacattgtaaataaagagctcagaacagtgcctggcatattgtagacattcagagaaatatggacatttgggatggatgactgcctcagttttcttgggactgaggaagttcctggcatgaggaactttccgtgttcaaaaagggaaggcctcagataaattagagctaggtgttcactttgggtgacatcaataattgtgattctgagaatgagatggctcagaaaaaggaatactcttatgctttggttgaattatttggtttaaactaagatatgataagtccaaacacactaagatttcccatctaaatgttaactgctgtactactggtcagagtggctgtcctcaggattgagtttgacacattaggtaaacatagccctgctggaggagtgtcaataactggaaggtcatgtgcagaggtgaaggtgctctgaattgggagctgggactctagatggtcaccaggctgctgctctgggtaagtcctgcacctctgtttccattttggaaaaaggggcaaactagatagcaaaaaacaatatgcattcctttagttatttacagttcacaggtgcattttcttgccactatctcatgtgaccctcactacaatgcagtgaagatgatgtcaccctcagtatttgctgcccccaatttacagatgtggaaaatgaggctcaaatgagacagagcatctttcccaaggcctcacagccaggaggtgcccccgacagaactcaagcctaattctagagcacatctctttttcttgttacctctctgcctagctgaacacagaggtcccttcctctttcatgatctcatgacactgaaactcaaaattgtggccttttagtctaaggggtaaaagtcaaagccttgagctaaagttcctttggctaaacatctttttggagcattacttcatcatctctctgacctttgcaggcacaggggaaaataggcaagggtttctctctccattagaagaaaagaacttctatgacctctgtggaataagaaaacgtgatggtttcatgggcagtgattgctctgagcagaaattagcagaatagaaacagatcatctaagtgcagaccatgacttgggaaaatttttaatttagcggaaacctaattactcatttatatgtagtacactttctctcttttctccagaacatgtgtgcgtgcacacacacataaagctaattatgatccaaaggttcctctggaaagagtagttaattggttctaagaatacctccatcaacaaaaacagtgacacccttgtcctgggttctgtggagtcagcaggaagccttgcctatgaattctcagttgcaaagtaaacctttatttcagtacaacatgttttatggtgccataaaagaggaggaaagtcaatagttctatctaatatcaacggaaccaagaaaatactttactgattctctactgtttaaagggcaaaagaatatgaatagttacacttaacaaagtatttgaaaatcttagaggtttgacttcagcttttgctcaagcaa

SEQ ID NO: 76865 - DNA, 1877 bp, Homo sapiens
gtcttttcactatcacactcccaagtttgaatactagaaccactttccaatcaatgcagaaccattacaactggcaggtagactataaaataagctggtgtgaagcagtttacaccacccacccacaattcctgagaatgttcagggcattcggggagtcagtgttacatgacacagttctggattcacaatgccatgggtcctggctccaatgcacattggctgtgtgacttgggcaagttattggatcactcggaactgagtttcctcacctcataaactggaaataaccctacctcatctatatttccaaatgaataagtagaacattgtaaataaagagctcagaacagtgcctggcatattgtagacattcagagaaatatggacatttgggatggatgactgcctcagttttcttgggactgaggaagttcctggcatgaggaactttcygtgttcaaaaagggaaggcctcagataaattagagctaggtgttcactttgggtgacatcaataattgtgattctgagaatgagatggctcagaaaaaggaatactcttatgctttggttgaattatttggtttaaactaagatatgataagtccaaacacactaagatttcccatctaaatgttaactgctgtactactggtcagagtggctgtcctcaggattgagtttgacacattaggtaaacatagccctgctggaggagtgtcaataactggaaggtcatgtgcagaggtgaaggtgctctgaattgggagctgggactctagatggtcaccaggctgctgctctgggtaagtcctgcacctctgtttccattttggaaaaaggggcaaactagatagcaaaaaacaatatgcattcctttagttatttacagttcacaggtgcattttcttgccactatctcatgtgaccctcactacaatgcagtgaagatgatgtcaccctcagtatttgctgcccccaatttacagatgtggaaaatgaggctcaaatgagacagagcatctttcccaaggcctcacagccaggaggtgcccccgacagaactcaagcctaattctagagcacatctctttttcttgttacctctctgcctagctgaacacagaggtcccttcctctttcatgatctcatgacactgaaactcaaaattgtggccttttagtctaaggggtaaaagtcaaagccttgagctaaagttcctttggctaaacatctttttggagcattacttcatcatctctctgacctttgcaggcacaggggaaaataggcaagggtttctctctccattagaagaaaagaacttctatgacctctgtggaataagaaaacgtgatggtttcatgggcagtgattgctctgagcagaaattagcagaatagaaacagatcatctaagtgcagaccatgacttgggaaaatttttaatttagcggaaacctaattactcatttatatgtagtacactttctctcttttctccagaacatgtgtgcgtgcacacacacataaagctaattatgatccaaaggttcctctggaaagagtagttaattggttctaagaatacctccatcaacaaaaacagtgacacccttgtcctgggttctgtggagtcagcaggaagccttgcctatgaattctcagttgcaaagtaaacctttatttcagtacaacatgttttatggtgccataaaagaggaggaaagtcaatagttctatctaatatcaacggaaccaagaaaatactttactgattctctactgtttaaagggcaaaagaatatgaatagttacacttaacaaagtatttgaaaatcttagaggtttgacttcagcttttgctcaagcaa

SEQ ID NO: 76866 - DNA, 1877 bp, Homo sapiens
gtcttttcactatcacactcccaagtttgaatactagaaccactttccaatcaatgcagaaccattacaactggcaggtagactataaaataagctggtgtgaagcagtttacaccacccacccacaattcctgagaatgttcagggcattcggggagtcagtgttacatgacacagttctggattcacaatgccatgggtcctggctccaatgcacattggctgtgtgacttgggcaagttattggatcactcggaactgagtttcctcacctcataaactggaaataaccctacctcatctatatttccaaatgaataagtagaacattgtaaataaagagctcagaacagtgcctggcatattgtagacattcagagaaatatggacatttgggatggatgactgcctcagttttcttgggactgaggaagttcctggcatgaggaactttccgtgttcaaaaagggaaggcctcagataaattagagctaggtgttcactttgggtgacatcaataattgtgattctgagaatgagatggctcagaaaaaggaatactcttatgctttggttgaattatttgktttaaactaagatatgataagtccaaacacactaagatttcccatctaaatgttaactgctgtactactggtcagagtggctgtcctcaggattgagtttgacacattaggtaaacatagccctgctggaggagtgtcaataactggaaggtcatgtgcagaggtgaaggtgctctgaattgggagctgggactctagatggtcaccaggctgctgctctgggtaagtcctgcacctctgtttccattttggaaaaaggggcaaactagatagcaaaaaacaatatgcattcctttagttatttacagttcacaggtgcattttcttgccactatctcatgtgaccctcactacaatgcagtgaagatgatgtcaccctcagtatttgctgcccccaatttacagatgtggaaaatgaggctcaaatgagacagagcatctttcccaaggcctcacagccaggaggtgcccccgacagaactcaagcctaattctagagcacatctctttttcttgttacctctctgcctagctgaacacagaggtcccttcctctttcatgatctcatgacactgaaactcaaaattgtggccttttagtctaaggggtaaaagtcaaagccttgagctaaagttcctttggctaaacatctttttggagcattacttcatcatctctctgacctttgcaggcacaggggaaaataggcaagggtttctctctccattagaagaaaagaacttctatgacctctgtggaataagaaaacgtgatggtttcatgggcagtgattgctctgagcagaaattagcagaatagaaacagatcatctaagtgcagaccatgacttgggaaaatttttaatttagcggaaacctaattactcatttatatgtagtacactttctctcttttctccagaacatgtgtgcgtgcacacacacataaagctaattatgatccaaaggttcctctggaaagagtagttaattggttctaagaatacctccatcaacaaaaacagtgacacccttgtcctgggttctgtggagtcagcaggaagccttgcctatgaattctcagttgcaaagtaaacctttatttcagtacaacatgttttatggtgccataaaagaggaggaaagtcaatagttctatctaatatcaacggaaccaagaaaatactttactgattctctactgtttaaagggcaaaagaatatgaatagttacacttaacaaagtatttgaaaatcttagaggtttgacttcagcttttgctcaagcaa

SEQ ID NO: 76867 - DNA, 1877 bp, Homo sapiens
gtcttttcactatcacactcccaagtttgaatactagaaccactttccaatcaatgcagaaccattacaactggcaggtagactataaaataagctggtgtgaagcagtttacaccacccacccacaattcctgagaatgttcagggcattcggggagtcagtgttacatgacacagttctggattcacaatgccatgggtcctggctccaatgcacattggctgtgtgacttgggcaagttattggatcactcggaactgagtttcctcacctcataaactggaaataaccctacctcatctatatttccaaatgaataagtagaacattgtaaataaagagctcagaacagtgcctggcatattgtagacattcagagaaatatggacatttgggatggatgactgcctcagttttcttgggactgaggaagttcctggcatgaggaactttccgtgttcaaaaagggaaggcctcagataaattagagctaggtgttcactttgggtgacatcaataattgtgattctgagaatgagatggctcagaaaaaggaatactcttatgctttggttgaattatttggtttaaactaagatatgataagtccaaacacactaagatttcccatctaaatgttaactgctgtactactggtcagagtggctgtcctcaggattgagtttgacacattaggtaaacatagccctgctggaggagtgtcaataactggaaggtcatgtgcagaggtgaaggtgctctgaattgggagctgggactctagatggtcaccaggctgctgctctgggtaagtcctgcacctctgtttccattttggaaaaaggggcaaactagatagcaaaaaacaatatgcattcctttagttatttacagttcacaggtgcattttcttgccactatctcatgtgaccctcactacaatgcagtgaagatgatgtcaccctcagtatttgctgcccccaatttacagatgtggaaaatgaggctcaaatgagacagagcatctttcccaaggcctcacagccaggaggtgcccccgacagaactcaagcctaattctagagcacatctctttttcttgttacctctctgcctagctgaacacagaggtcccttcctctttcatgatctcatgacactgaaactcaaaattgtggccttttagtctaaggggtaaaagtcaaagccttgagctaaagttcctttggctaaacatctttttggagcattacttcatcatctctctgacctttgcaggcacaggggaaaataggcaagggtttctctctccattagaagaaaagaacttctatgacctctgtggaataagaaaacgtgatggtttcatgggcagtgattgctctgagcagaaattagcagaatagaaacagatcatctaagtgcagaccatgacttgggaaaatttytaatttagcggaaacctaattactcatttatatgtagtacactttctctcttttctccagaacatgtgtgcgtgcacacacacataaagctaattatgatccaaaggttcctctggaaagagtagttaattggttctaagaatacctccatcaacaaaaacagtgacacccttgtcctgggttctgtggagtcagcaggaagccttgcctatgaattctcagttgcaaagtaaacctttatttcagtacaacatgttttatggtgccataaaagaggaggaaagtcaatagttctatctaatatcaacggaaccaagaaaatactttactgattctctactgtttaaagggcaaaagaatatgaatagttacacttaacaaagtatttgaaaatcttagaggtttgacttcagcttttgctcaagcaa

SEQ ID NO: 76868 - DNA, 1066 bp, Homo sapiens
tatagactatgccgcaaggtttcattcccacatggaagtacgcatgctcgtttctcctgagactgcataaagtctgaacattccagtttcccttttaagtcacttcatagccctagcagcagtttagaaatgcaaaagtttggttgctttaaagaatagttcttgagtggattcttaattaagtacaataatattttctctttgattttaaagagctttaytgcccagaatggatacacaataaaattttgaaaggaaaaagaaagttagctgtatcccagttttctaaaccctggcaagctggcagagctagaattagctttacagatggcatttggcaacatatctacatatctctaagccctcaactcctgcgttttgttatgcctgtctatcaattacaatatccaatcactgctcagagatggagaaatgggacgatcacagctcacacgatgctgttttgttagaaacgtcagtgctgcacaacccacggctgagtcagtgtctgtgagaaaataaactgaattaatatgtagagggggttgtatctctgaatatttaaagcctaaatattgcaacagcattattacacagtagagggaggaagctaaaggaagtctatggacaggtgaggtagggggagactggggaattttctgattgttcagaggaatcttgaagatgatggaaatatcagatgtgctaaagtttcctagtaatgcccaaggatgctgacctggctttcagtgcttcattgtttgaaagagcagagtccctttatactctgatttcaaaatttttttcttgtttttgtgtgtctaccttggcatatactaaaggaaggtgtgtattcatttattacatgatatctctgggttataattatttacatatatgaatttgaaagaaagattgagagggatatgtgtgacctttgtttcattatgatcatttacatgactaaagataaagatcatatgtctgattttcagtttaatggcaagttacttaaaataaatgaaatatgtttttattgttttcgtgggtttgatgctttgtgttt

SEQ ID NO: 76869 - DNA, 1185 bp, Homo sapiens
ctagctcagtaaaggcactcagtttgctgaatgataaaagggatgtcttcttaaccctttgtcaagtccatcactgaggtgtagaaagagaacaagctaccaactcactgggcatcctggggggactcttggtcctggaagtggaggcacaggccacagatgagatggctgtggaaagtggcccgactccacctgaacgctgagcagccacccaaattgaagtggcccaggatgaggcagcagagcaaacaaaatggtcacaatgggagcatctgagtgggcaagcagatcgaggagattactctttcaacagggctgattttaatgactgcagaatgacttggagtcccaggaaccatcaatccccctaacatatccacgaaccatctgaaaagggaactgataccaattagtgcttttactgctctagaccctttagaacatactgattcagagcatgttctctgatgggagatgacggtcaagtttcaaatcctgaccccatcatgtatgagtgcctagggttcaaatcttaggtcccacatttaccagccgtgtgatgttgggcacaacatttagcctgtatgtgtcattggtctcctgacctgacctgtaggataaggataacattacctgcctcacagttgtggtgaaaagtaagtgagatatataaagtgctcagaatggtgtctggagcataacaagccctctgtaagtgtcattattatcttcccattaaccatcacaacagcctcataagacaactagctaatgtttcatcccctgtcttacagataaggaaactaagtttgagagagtaagtaacttgatcragatcagagattttgtataatgggaaagcagatttaaacacaggccagtcccatctaaagcccatactccttccactgtacagcacagcctccatgcaatctaagaaatgggcacagtccagagggtgcagggatttacaaattcttcaaaaaacacttcccaaagttctgccatggaacactaatcccataggattgtaatgatgttattcgggggaaaaaatcaggggccaaatacgtatagggaatgctggttcaatagttaggtttttcttctgcagggcttcttggacctttaaacgcagccctgtggagggtgaaagtctaagggcagcagagtctgagtcccaag

SEQ ID NO: 76870 - DNA, 1185 bp, Homo sapiens
ctagctcagtaaaggcactcagtttgctgaatgataaaagggatgtcttcttaaccctttgtcaagtccatcactgaggtgtagaaagagaacaagctaccaactcactgggcatcctggggggactcttggtcctggaagtggaggcacaggccacagatgagatggctgtggaaagtggcccgactccacctgaacgctgagcagccacccaaattgaagtggcccaggatgaggcagcagagcaaacaaaatggtcacaatgggagcatctgagtgggcaagcagatcgaggagattactctttcaacagggctgattttaatgactgcagaatgacttggagtcccaggaaccatcaatccccctaacatatccacgaaccatctgaaaagggaactgataccaattagtgcttttactgctctagaccctttagaacatactgattcagagcatgttctctgatgggagatgacggtcaagtttcaaatcctgaccccatcatgtatgagtgcctagggttcaaatcttaggtcccacatttaccagccgtgtgatgttgggcacaacatttagcctgtatgtgtcattggtctcctgacctgacctgtaggataaggataacattacctgcctcacagttgtggtgaaaagtaagtgagatatataaagtgctcagaatggtgtctggagcataacaagccctctgtaagtgtcattattatcttcccattaaccatcacaacagcctcataagacaactagctaatgtttcatcccctgtcttacagataaggaaactaagtttgagagagtaagtaacttgatcaagatcagagattttgtataatgggaaagcagatttaaacacaggccagtcccatctaaagcccatactccttccactgtacagcacagcctccatgcaatctaagaaatgggcacagtccagagggtgcagggatttacaaattcttcaaaaaacacttcccaaagttctgccatggaacactaatcccataggattgtaatgatgttattcrggggaaaaaatcaggggccaaatacgtatagggaatgctggttcaatagttaggtttttcttctgcagggcttcttggacctttaaacgcagccctgtggagggtgaaagtctaagggcagcagagtctgagtcccaag

SEQ ID NO: 76871 - DNA, 779 bp, Homo sapiens
catgattttgctcctcctttgccttctgcagtgattgtgaggcctcccaaccatgtggaactgtgagtccatcaaacctctttttctttatgaattacccagtcttgggtatgtctttattagtagcatgagaacagactaacacactgaccttctgtagaggctctgatacatataaggtgctcaatgtttttgtttttattttcattgaatatataactcatggttggaactgaaacaacaaactttgtctttggtagtattgtcagaggcatgtgaaccagagcaactccatcttgaataggagctggataaaatcaggctgaaactcactcggctgcattcccagatggttaaggcattctaagtcacaggatgaaayagaaagtaagcacaaaatacaggtcctaaagaccttgctgataaaacagtttacagtaaagaagctgtccacaacccgccaaaaccaagatggtgacgagagtgacatctggcccttccattagcaccatgacattttataaatgccacggcaacaccaggtagttaccctatagggtctaaaaaggaaaagcataaataatctatccttgtttagcatataatcaagaaataaccataaaaatgggcacccagcagctctcagggctgttctgtctatggagtagccattcttttattcctttatttcttaataaacttggtttcactttactctatggacttgccctgaattatttcttgcatgagatccaagaaccctttaggggtctggatca

SEQ ID NO: 76872 - DNA, 629 bp, Homo sapiens
aatctaataaaataacatgtagtagttttatcttataattttgaatttggttcaaaacaaaaaataataaaacaaaataaattgcgaaagtccagggaagagaagctaaaggaataagctctttctacaaacctgtctgccctggactctgacaggttcactctctgtattggactctgtaaaccttttarccaaaataaaccctgtgagaattgattttagtcaaaagcaaactctccttcgtcaatcatgagactttgcactgaccaacaatgtgagcttgtggtttttctctcctagcagtctctgcgtggcaattctccagcagtgaagcctgtagatcctaccccagtagttttcagcccacagtgcagaaactggaaagcatttgctaagttgcatctttaaccctgtgtttccctgaacccaccacttcactccctagagcacatcctaggaaagctctggtcctctttagaattcagaggtagaattactgttggcaaggcccagagatattctggattaatattttatctggcctatagttaataacaatatattgtttactgaaaaattgctaagagggtagaattttaagtgttctcacaacaaaacataagtgtgtg

SEQ ID NO: 76873 - DNA, 629 bp, Homo sapiens
aatctaataaaataacatgtagtagttttatcttataattttgaatttggttcaaaacaaaaaataataaaacaaaataaattgcgaaagtccagggaagagaagctaaaggaataagctctttctacaaacctgtctgccctggactctgacaggttcactctctgtattggactctgtaaaccttttagccaaaataaaccctgtgagaattgattttagtcaaaagcaaactctccttcgtcaatcatgagactttgcactgaccaacaatgtgagcttgtggtttttctctcctagcagtctctgcgtggcaattctccagcagtgaagcctgtagatcctaccccagtagttttcagcccrcagtgcagaaactggaaagcatttgctaagttgcatctttaaccctgtgtttccctgaacccaccacttcactccctagagcacatcctaggaaagctctggtcctctttagaattcagaggtagaattactgttggcaaggcccagagatattctggattaatattttatctggcctatagttaataacaatatattgtttactgaaaaattgctaagagggtagaattttaagtgttctcacaacaaaacataagtgtgtg

SEQ ID NO: 76874 - DNA, 1074 bp, Homo sapiens
ccaacatgcagaatttatgaatgccagctgtctgggccttatctagatttcctttgttgacaaactgatacaccaaagctctgctagggtctgtatgcggtgattcacaccagggttcaaaacgggttcaggacaggacagggtagaccctgaagacgaaactataccagctaattaatccttgtactctgagaactcatttatttctgaaaaaaatctgtgaaggcagcaatgtcctaggcactaaagattcaaagcaaaaaagatacagttactgcccttaggagctgacaattgtaaagtcagcttgcaagcacctacttgctgtaacagtgctacagtaaatgctagggcatggaagggacagaatcccttctatggtcaaaggaaagctgtctgcagtatctgtacacagagaccaccaatgtgctaggtcttcagggatgacttcatcaagaagagactggggtgggagcagggagcagactgaataattctttaaaagaaggatttagaggagtggttttgatggagatagaggggttgctcttgattttacataagacactaatgtcttaaatgcaatatgtttcaaagtgatgttttggccctgttctctagtctccataaacctttctactcccagtaaatttagaatgccagaaggttttgtgagtcaggccccagccatcccaagaggaggccttctgggtttgaaaagccagcatttgctcaagaagagctttgtgcagagtcaggccaagctctcagccttttctcaccttcaagtcactcttataattaagctataaaatgaaattctagattttagtggtaaaggagctccaaaggtcatctagcccagccctatcttcagcaggtgatacatgataatctttgttttatagatgtggtagctttgtgccttgcccrgggccatacagctgatgagagtagcatactgattcaagaaagggccctcttgggcccctactttattatctgcatcttaagaacagggactcttcctttttaaatgtgaatcataacctcagtgctatgtactgtataaga

SEQ ID NO: 76875 - DNA, 1074 bp, Homo sapiens
ccaacatgcagaatttatgaatgccagctgtctgggccttatctagatttcctttgttgacaaactgatacaccaaagctctgctagggtctgtatgcggtgattcacaccagggttcaaaacgggttcaggacaggacagggtagaccctgaagacgaaactataccagctaattaatccttgtactctgagaactcatttatttctgaaaaaaatctgtgaaggcagcaatgtcctaggcactaaagattcaaagcaaaaaagatacagttactgcccttaggagctgacaattgtaaagtcagcttgcaagcacctacttgctgtaacagtgctacagtaaatgctagggcatggaagggacagaatcccttctatggtcaaaggaaagctgtctgcagtatctgtacacagagaccaccaatgtgctaggtcttcagggatgacttcatcaagaagagactggggtgggagcagggagcagactgaataattctttaaaagaaggatttagaggagtggttttgatggagatagaggggttgctcttgattttacataagacactaatgtcttaaatgcaatatgtttcaaagtgatgttttggccctgttctctagtctccataaacctttctactcccagtaaatttagaatgccagaaggttttgtgagtcaggccccagccatcccaagaggaggccttctgggtttgaaaagccagcatttgctcaagaagagctttgtgcagagtcaggccaagctctcagccttttctcaccttcaagtcactcttataattaagctataaaatgaaattctagattttagtggtaaaggagctccaaaggtcatctagcccagccctatcttcagcaggtgatacatgataatctttgttttatagatgtggtagctttgtgccttgcccagggccatacagctgatgagagtagcatactrattcaagaaagggccctcttgggcccctactttattatctgcatcttaagaacagggactcttcctttttaaatgtgaatcataacctcagtgctatgtactgtataaga

SEQ ID NO: 76876 - DNA, 591 bp, Homo sapiens
tcttggccctttggaacccacggcactgcattcaagatgcttccaagggcagccacgcggaggggctgcagagcccagctccacccatcattggtgtgcagcaccaggcagatgctctctagcctggatctgaggcacaccagcagcatgacaaactcatgaaatggtgggagagagtctgctgcaagggtgagaccaggcagcctgctgggccacactgtcctgttggcatcacagccccaaggctgggggaasttcatgctgggacaagcagcccatcaacgccatgggttcaggctgatccaggagatgctcacaggccacaggacctggaaaacactcttggtggtgtcttggggatttggtgcacacaagaccaaggaaaggacagaatgaggaaaggcctggggcagaagagcccaactccttctcatagctgaccctcatcctcctgccttggcctcctggctgctttctccccttccccccagcgtggcaggatctcttcctgttagcaaggatgaaagagagaggtcagtaggactggaacttggtaactgcaagggcctcaggtggggcaggtgcagaggg

SEQ ID NO: 76877 - DNA, 591 bp, Homo sapiens
tcttggccctttggaacccacggcactgcattcaagatgcttccaagggcagccacgcggaggggctgcagagcccagctccacccatcattggtgtgcagcaccaggcagatgctctctagcctggatctgaggcacaccagcagcatgacaaactcatgaaatggtgggagagagtctgctgcaagggtgagaccaggcagcctgctgggccacactgtcctgttggcatcacagccccaaggctgggggaacttcatgctgggacaagcagcccatcaacgccatgggttcaggctgatccaggagatgctcacaggccacaggacctggaaaacactcttggtggtgtcttggggatttggtgcacacaagaccaaggaaaggacagaatgaggaaaggcctggggcagaagagcccaactccttctcatagctgaccctcatcctcctgccttggcctcctggctgctttctccccttccccccagcrtggcaggatctcttcctgttagcaaggatgaaagagagaggtcagtaggactggaacttggtaactgcaagggcctcaggtggggcaggtgcagaggg

SEQ ID NO: 76878 - DNA, 1606 bp, Homo sapiens
ataaacctaggccttgttaaaatacagattgctaggtgttagagtttctgagtcagtagatgtgtttggggcctgagaatttgcatttctaaccagttcccaggttattctagtatttcttgttctgctttgggaatcattggtttagcagtaccatgccagatattcccccaggacatcacaaaaggggcagatatggggtgaagacccagacctagaaaaaacaaagctagacaaagttggacatagtggaaacaaagggcttacattttgttatagagggtagaggcaagggtagaatagaaacattgctaaaatggaagatgtcctttaaaaaacacaaatggatattagattgttagatcaaaaatgaaaatgaagttctctgttctgcttttgaccattcttattgaccaaattgactgagcagctgccatatttttcttggggacatttaaatagcatgatacagtattagttaaaaagacaagtttctttttttattaccctgtgaaaatccaaattccaactccaatttcttgctaagtaagactttgagcaagttgtcattacttaaattcttttagcctcatttctcagtctgttccttgtagrcatttaaatagtatgatatagtattagttaagaatgagaggttttgttttgttttgttttgttttgttttggttacactgtgaaaatccaaattaaaattctaatttcttgctaagtatgactttgggcaagttgtcataacttaaattctcttagcctcatttcttggtctgtataatggaaatgtttccatacttcaaaaaagtatcatgaagactaaataaatcaattatgaaaggggacactgtatggtccataataaatggcttgtcaaggttagccattattatacagaaatttcctaatctttaatagacttttcaaagaatgattatttcgcatctttttctcccagaatgattttgcactgattaaatagtgttaattctgtgcccgtgaacacatggttgttccatatcaggctgaaattctagcagctttcattaagtgcagaagacatgtaatgggaattttatcttccattctgaattcatacagaattgattgaaatgcatcagcctcttagtctgtgcctcaatagtccatctaaagtatctcatgggaaatgaccagaaaagaaaattcacagtcttttttaaatcaataactgtctcagtgtccttccactttatccttcaatactcacccatgcccccaccctcaaaaacacacctctttttcaactagtctcctctcagatattgctaaactactgtagatcacctttgtaagacttaactcatgaggttgtacattccccaagccgtcccattattttttctcttggagaattgggtccaggtctccacttctttaaactccatggtgctagcacaatgcttttcatatggcatgttctcaggaatgagcatccaattctttttgtgcaaagactctcaactgagggtaattataacttcctcttctgaggtatatgtaggtgataacagatctttcttctatgaatatttatttcaagcagtttatcatt

SEQ ID NO: 76879 - DNA, 1773 bp, Homo sapiens
ttgccaagagatgtagccaggagcccttctctcttgagtggctgtctccacacacctcagtttatcttcctcagttccaccacaacagtggtggcaaaactttccaaagtgagactcttttacacctagagggaaaggaatctgtccccaatatcacatgcaaaggaaatctcattctattcttaagtgatcaatatagagaagcttatttgaatgggtacatgatgctcataagtggaagattggttttgctgttttgtctttactgtttttgaaaaagagatcataataggaaatatacgtctttcaaacaacttgtaaaaatctctgattttgtgtttattaaaagtcttctaaggtaaaattctatgtagcatttgtagtactagttggacattcaccatgttaataataggggtatcaggctgattaaatttttatcatytttataatttttttcttactaatgtgcaatattgttataacatgaaaagaaaatgttatacatgtttaaaaaccattttcacacaaggcttcaactgtattttgcaatgttttgttatattttcaaaatgaagcaaaatgtcagaatcttcaggcaagataaggtagttgatctctataattttctataggttcatgatattttacaatacatttttaatttaattttctcagtatcatagaacataacatatcatatatgaaaatattaaggcctttcccttgaatacccatttaaaggtaagattaatttggatccaaataggaattccaaaaattaaaatttttttctataaaaaaattagctgggggtggtggttcacacctgtagtcccactactcgggaggctgaggcaggagaatcacttgaacccaggaggtggaggctgcagtgagcccagttcgtgccactgcacttcagcctggtgacagagtgagaatccatctcaaaaaaaaaaaaaaaatcttttgagtaaaatctaccagataaattagaacctgagtcagcatcactcttttcattgctaaacatgacacagataataatgagtttgctttttttttttatttaaataatcggaaaaacccgtttactgacttcctagtgttacaaagaagaaaagctggagcatccctggtgttttttcccggcaggaaaatgttagcattttaatatttgacaaggtgaatattttgactctgaaaaaaacccttaaagtcaccaccattatattttcatttgacatcatattgagatcttgtatcatttttgttttttggtgaattgttggatttttttttctcctgcagtgaaaacattccatgcatgtatgtttagggtatctttctgaaaactttgttttaatttaggaaatactttttagggaaaaaaatgagtgaagactatatatattggggatctaaaaaccaaaaatataacatgctcataatcaataatatttgacagaatgtctttaatttttgcctactatcaatgttttgtttgatttaccacatccataaaaaggggttctctacatagttaatgagtttcatcaagtgtccatcagcagatgaatggataaataaaatgtggtacatatacacaataaattgatttttttaaagggactgtttgtctactacttgctcttagtgtcagccatccgtatttcaagtaaagacgatactcgaaaggcattattcctaatgtatggcactctcctcttgacattttaaagcactgccccaaaaccctcactctaggga

SEQ ID NO: 76880 - DNA, 1773 bp, Homo sapiens
ttgccaagagatgtagccaggagcccttctctcttgagtggctgtctccacacacctcagtttatcttcctcagttccaccacaacagtggtggcaaaactttccaaagtgagactcttttacacctagagggaaaggaatctgtccccaatatcacatgcaaaggaaatctcattctattcttaagtgatcaatatagagaagcttatttgaatgggtacatgatgctcataagtggaagattggttttgctgttttgtctttactgtttttgaaaaagagatcataataggaaatatacgtctttcaaacaacttgtaaaaatctctgattttgtgtttattaaaagtcttctaaggtaaaattctatgtagcatttgtagtactagttggacattcaccatgttaataataggggtatcaggctgattaaatttttatcatttttataatttttttcttactaatgtgcaatattgttataacatgaaaagaaaatgttatacatgtttaaaaaccattttcacacaaggcttcaactgyattttgcaatgttttgttatattttcaaaatgaagcaaaatgtcagaatcttcaggcaagataaggtagttgatctctataattttctataggttcatgatattttacaatacatttttaatttaattttctcagtatcatagaacataacatatcatatatgaaaatattaaggcctttcccttgaatacccatttaaaggtaagattaatttggatccaaataggaattccaaaaattaaaatttttttctataaaaaaattagctgggggtggtggttcacacctgtagtcccactactcgggaggctgaggcaggagaatcacttgaacccaggaggtggaggctgcagtgagcccagttcgtgccactgcacttcagcctggtgacagagtgagaatccatctcaaaaaaaaaaaaaaaatcttttgagtaaaatctaccagataaattagaacctgagtcagcatcactcttttcattgctaaacatgacacagataataatgagtttgctttttttttttatttaaataatcggaaaaacccgtttactgacttcctagtgttacaaagaagaaaagctggagcatccctggtgttttttcccggcaggaaaatgttagcattttaatatttgacaaggtgaatattttgactctgaaaaaaacccttaaagtcaccaccattatattttcatttgacatcatattgagatcttgtatcatttttgttttttggtgaattgttggatttttttttctcctgcagtgaaaacattccatgcatgtatgtttagggtatctttctgaaaactttgttttaatttaggaaatactttttagggaaaaaaatgagtgaagactatatatattggggatctaaaaaccaaaaatataacatgctcataatcaataatatttgacagaatgtctttaatttttgcctactatcaatgttttgtttgatttaccacatccataaaaaggggttctctacatagttaatgagtttcatcaagtgtccatcagcagatgaatggataaataaaatgtggtacatatacacaataaattgatttttttaaagggactgtttgtctactacttgctcttagtgtcagccatccgtatttcaagtaaagacgatactcgaaaggcattattcctaatgtatggcactctcctcttgacattttaaagcactgccccaaaaccctcactctaggga

SEQ ID NO: 76881 - DNA, 1773 bp, Homo sapiens
ttgccaagagatgtagccaggagcccttctctcttgagtggctgtctccacacacctcagtttatcttcctcagttccaccacaacagtggtggcaaaactttccaaagtgagactcttttacacctagagggaaaggaatctgtccccaatatcacatgcaaaggaaatctcattctattcttaagtgatcaatatagagaagcttatttgaatgggtacatgatgctcataagtggaagattggttttgctgttttgtctttactgtttttgaaaaagagatcataataggaaatatacgtctttcaaacaacttgtaaaaatctctgattttgtgtttattaaaagtcttctaaggtaaaattctatgtagcatttgtagtactagttggacattcaccatgttaataataggggtatcaggctgattaaatttttatcatttttataatttttttcttactaatgtgcaatattgttataacatgaaaagaaaatgttatacatgtttaaaaaccattttcacacaaggcttcaactgtattttgcaatgttttgttatattttcaaaatgaagcaaaatgtcagaatcttcaggcaagataargtagttgatctctataattttctataggttcatgatattttacaatacatttttaatttaattttctcagtatcatagaacataacatatcatatatgaaaatattaaggcctttcccttgaatacccatttaaaggtaagattaatttggatccaaataggaattccaaaaattaaaatttttttctataaaaaaattagctgggggtggtggttcacacctgtagtcccactactcgggaggctgaggcaggagaatcacttgaacccaggaggtggaggctgcagtgagcccagttcgtgccactgcacttcagcctggtgacagagtgagaatccatctcaaaaaaaaaaaaaaaatcttttgagtaaaatctaccagataaattagaacctgagtcagcatcactcttttcattgctaaacatgacacagataataatgagtttgctttttttttttatttaaataatcggaaaaacccgtttactgacttcctagtgttacaaagaagaaaagctggagcatccctggtgttttttcccggcaggaaaatgttagcattttaatatttgacaaggtgaatattttgactctgaaaaaaacccttaaagtcaccaccattatattttcatttgacatcatattgagatcttgtatcatttttgttttttggtgaattgttggatttttttttctcctgcagtgaaaacattccatgcatgtatgtttagggtatctttctgaaaactttgttttaatttaggaaatactttttagggaaaaaaatgagtgaagactatatatattggggatctaaaaaccaaaaatataacatgctcataatcaataatatttgacagaatgtctttaatttttgcctactatcaatgttttgtttgatttaccacatccataaaaaggggttctctacatagttaatgagtttcatcaagtgtccatcagcagatgaatggataaataaaatgtggtacatatacacaataaattgatttttttaaagggactgtttgtctactacttgctcttagtgtcagccatccgtatttcaagtaaagacgatactcgaaaggcattattcctaatgtatggcactctcctcttgacattttaaagcactgccccaaaaccctcactctaggga

SEQ ID NO: 76882 - DNA, 512 bp, Homo sapiens
tttgtttcattgtgaatattaagaatgttttggctgggactgaagtcctgggaaaactataattaatatgctacactattcatccaagtaaaacaaacacacttctatttagacttagtggacattgctagtcaccaacgtcttgtattaagtcacagttcacaaaacctggtgagctagaccctcttttccactttgcagttgaggaaggggaggcccagacagcagagcgaaaagggaactgataacactactggggtccattctagaacggcagagccagagaggagcttagggagcacccaaaccttcctctcagtggcgggggaacggggctcawacaggagatgtggttttgcgaggccgcatggccgaagggcaggagccagggcggccagacgttgcccacctccttgatgaccttgcccccgcggtggatggtgctgttgttgaccatgtccacaatggccacgcccaggttgcagcggataccgaaggagatgcagaagccc

SEQ ID NO: 76883 - DNA, 651 bp, Homo sapiens
  misc_feature (1)...(651): n = A,T,C or G
annnnnnnnnnnnnnnnnnnnnnnnnnnnnnnnnnnnnnnnnnnnnnnnnnnnnnnnnnnnnnnnnnnnnnnnnnnnnnnnnnnnnnnnnnnnnnnnnnnnttcagagttcagtatattctcagtgttaagaccagccttacacataagatggcatgagtgctacctatgtgtcagtctcttacacaattattatttcaaagtactgtagttatagcagtgactcccaaatatccattccctgccctgacatctttactaaatttgaccatgatttccagttgcctaacagatttccttgcttagttgtcccaaatgtacttcaaattcacaaagttcaaagaaaaatcataatttgtccctaaagtccacctctctccattcctttctccagtactttctcagtgttagtactgggaatacttctgcccagtcacccaaactagaaacttgtgagtcatctttgatgcctttccctcactgctcacatctggtrcatcacaaaggttctttaagagactatctcctgcttatctcttgtaacttcccctctttatacttgttgccacttcctttgttcagaccctcatcatttttaacctggaccaaactctactcttaccccctttctttcccacttgtcattcaggat

SEQ ID NO: 76884 - DNA, 701 bp, Homo sapiens
tttttatagtgtttccctaccagaataaactggaagtttcatgaaggagggtattccctctttcacatctcctaaaggtctccttcaacactctataccaggggttagtgctgtgcctgaccacaggaagtactccataaatattttttgagtataatcaatgaacacttttgaaaatctaattaggttaacttttactagtctcgccacaaatgcaagaaaatacacaaatacaccacaattttccagaaacttgatgtttcatccctttttattatgccctttgaaccactgtcccagaacttaatagttacttcaggatttatgaaaaaaaatgtactgaagccctactactaataggtactgtgctgctaggtactacagatatgacacggtcagggtagatacagtttcatctaaacaataaccattccttatataaaggaagatggaaagacaggattttttcctcgacctctttcgacactgagatgtacaaagacaaggctgagatttcaacaactggtgggtggcaagatccactttagagaacaatgagctgctattttcttcagatactctaaacagataaactaattattttagttttcgccatccttgtgagttaaattatgtcatttcctgttctgtagagtagcctctcctaaaatattgattaaacagcaaagcwttttccttct

SEQ ID NO: 76885 - DNA, 590 bp, Homo sapiens
ataacaaacagaaccaaaatagcaaaacagatgttttgatataatctaagaattgcatcctctcaactgggaactgtcatgaagaggaagaactcataaaatttgggaagtttcttgactgaattctgtggtgcagagtagcagtgttgactactagccaatgaggaagatttgaatattgaaattactggctgggcctggtgattcatgcctgtaatcccagcactttgggaggcctaggtgggcagattgcttaagctcaggagtttgagaccagcctaggcaacatggtgaaaccctgtctctacaaaaattagccgggcattggtggtgtgcacccgtaatcccagctactggggaggctgaggtggaaggatagcttgagcctgcgaggtggaggttgcattgagctgagacggcaccactggactccagcctaggcaatagagccagaccttgtctcaaaaaaaaaaaaaaaagaaagagagaaattatctatctcatgttcttctttgtgaaggtagatatctcaggctatggcctgggaaattttctgtcagacaargatgtggatttcccttcatgggatc

SEQ ID NO: 76886 - DNA, 1072 bp, Homo sapiens
caattcaaaaacaccacttgctctaggataatttccaaaatgtcccctctctactcccttcccacaaccacccaccaccaatccccactgagctagtgaatatctctttttgtcctcagagtgtcctgtacactcatatgactctatcgtgatcattcatgtaggtggtgggctcttcggtgtaatgattacttctttcaccttcatttgcggagaagcacacagagcaattataatagctaatggctaacaagcactgagtgcttaatatgtagctggcacagttctaagcacttttatgtattatcacatttaattctcacaaaaaccagcraggtggccattactgttgacccagtttgaagatgagaattcaagcacaaggaagtacactaacttgcacaggatcacagagctggtaagaagcggagcccagtgtgaatgaagacatcccactcttggtcactgcaccatacgtcctcacagttaggagacactagaggtgtttgggagtggaagaaaggcaaagaactggtagggaggatggccatttgcttggcaaataacatgacaaggatatcttttttattaggtgccttagagttgggatgagcctgaaagaagaaaaaagagtgttctatttagattcctgcatccattcccatttcctttatttctcccctctctaaacttaagctatctagggattatccaatcaattagaacacactttaattaatggcattgttcaggctggtctgtgttcattcaagccccaaaagacaactgcataaatgaagcgggggactgggggattccagtctccttcctgtcagtcaacttggatccttctgggaagcaaatgtgaagacaggttttcaaggccagattgagccccagagatcccctggtccagcagcagggaactcaaatgcctgtgaggaagagcacttaacagaaccaggtgaagcaggcagcagggaggcgttaagcagcttgtacaggactcaagcgtaacaatcactgcctatcaccttgctttgataattttgtgtggaacttctggttaagc

SEQ ID NO: 76887 - DNA, 640 bp, Homo sapiens
cgaggcaggcggatcacaaggtcgagagttcaagaccagcctggtcaatatggtaagaccctgtctctactaaaaatacaaaaattggccaggtgtggtggcatgcgcctgtagtcccagctactcaggaggctgaggcaggagaattgcttgaacctgggaggcagatgttgcagtgagccgagattgcgccactgcacttcagcctgggtaacagaaygggactgtctcaaaaaaaaaaaaaatgtaaaactatgcactgaattcagctgatgctatgggaaagaacttctgccaaggagaagcattgctgaggtgatgttcacaggaacaggaagcagacaggaagccaacaggagaaaatctctccatccttgctttctgcctttagtgcctcctattagcagagcctaacaagaagccagctgctaggtcagaagtgtgatgtacagtctcagccacagcatctcaaaacacagaagacttagcctaacaactggaataatcagagagcaaaggaaaccaagtagtagggtatttatagtattaaaatacatggctttacagcagttgaaatgctgacaataatattaaataaaaacaagttttacataacaacccaaattagaaatgagtcaag

SEQ ID NO: 76888 - DNA, 994 bp, Homo sapiens
gcagatttgtgacatgagcctccayggtgaggggctacctcctggctccccagttttcactctcagctccaagctgggagtgacctggccaggttccttcagaagctcccaggagaacaagcaggtgctgtgagggcaactagttccacagagggaagagaccctgtcccggccctgccgtcacagggtccctggggccaacctgctggcttcctggtcctccagccattgtgaccgcagtcccaagacattctgttacccttcgtggccctagattgcccctctccctcccggaggccagctgacccgatgctgctgtagccgatttcgccacctcctggaagcaaatgcactgggcatgggtggaaaccagtttggctgtgttggaactgttaaaaacaggaaattttaagcaggactatttcctctgggactagttaacccaaatagggttgtcttgggattacttcagattttgaagtcagcgttaccactgagatcaaagaaattgaagagaaaatatcttctcggttggctagaaaccacagggttggcctctgtgtatctacagaaggtggtcacctatctggtgtgattgaagtggcgctgaaaacctctcctcactcatctccaaaataagtcaccacctgccagcacagggtaattaaggtcactcgtaggatctttgagttgaggccatagctctcagcatgtggtcctatgagtagcagggtcagcgtcacctgggaactttttagaaaaacagattctcagttctactgaaccaggaacccagcaggggcccgtccagggccagcttcatgggcgtgcagcacaggcagtcttagagggcgccacacttagaaagttctcaggcttggtttaatttttccaatgagaggtctcacatttttattttgcactgggccacgcaaattatgtagcagtgctggtctcagaaatgtttctttcagcctggcctatagatgattct

SEQ ID NO: 76889 - DNA, 994 bp, Homo sapiens
gcagatttgtgacatgagcctccacggtgaggggctacctcctggctccccagttttcactctcagctccaagctgggagtgacctggccaggttccttcagaagctcccaggagaacaagcaggtgctgtgagggcaactagttccacagagggaagagaccctgtcccggccctgccgtcacagggtccctggggccaacctgctggcttcctggtcctccagccattgtgaccgcagtcccaagacattctgttacccttcgtggccctagattgcccctctccctcccggaggccagctgacccgatgctgctgtagccgatttcgccacctcctggaagcaaatgcactgggcatgggtggaaaccagtttggctgtgttggaactgttaaaaacaggaaattttaagcaggactatttcctctgggactagttaacccaaatagggttgtcttgggattacttcagattttgaagtcagcgttaccactgagatcaaagaaattgaagagaaaatatcttctcggttggctagaaaccacagggttggcctctgtgtatctacagaaggtggtcacctatctggtgtgattgaagtggcgctgaaaacctctcctcactcatctccaaaataagtcaccacctgccagcacagggtaattaaggtcactcgtaggatctttgagttgaggccatagctctcagcatgtggtcctatgagtagcagggtcagcrtcacctgggaactttttagaaaaacagattctcagttctactgaaccaggaacccagcaggggcccgtccagggccagcttcatgggcgtgcagcacaggcagtcttagagggcgccacacttagaaagttctcaggcttggtttaatttttccaatgagaggtctcacatttttattttgcactgggccacgcaaattatgtagcagtgctggtctcagaaatgtttctttcagcctggcctatagatgattct

SEQ ID NO: 76890 - DNA, 994 bp, Homo sapiens
gcagatttgtgacatgagcctccacggtgaggggctacctcctggctccccagttttcactctcagctccaagctgggagtgacctggccaggttccttcagaagctcccaggagaacaagcaggtgctgtgagggcaactagttccacagagggaagagaccctgtcccggccctgccgtcacagggtccctggggccaacctgctggcttcctggtcctccagccattgtgaccgcagtcccaagacattctgttacccttcgtggccctagattgcccctctccctcccggaggccagctgacccgatgctgctgtagccgatttcgccacctcctggaagcaaatgcactgggcatgggtggaaaccagtttggctgtgttggaactgttaaaaacaggaaattttaagcaggactatttcctctgggactagttaacccaaatagggttgtcttgggattacttcagattttgaagtcagcgttaccactgagatcaaagaaattgaagagaaaatatcttctcggttggctagaaaccacagggttggcctctgtgtatctacagaaggtggtcacctatctggtgtgattgaagtggcgctgaaaacctctcctcactcatctccaaaataagtcaccacctgccagcacagggtaattaaggtcactcgtaggatctttgagttgaggccatagctctcagcatgtggtcctatgagtagcagggtcagcgtcacctgggaactttttagaaaaacagatyctcagttctactgaaccaggaacccagcaggggcccgtccagggccagcttcatgggcgtgcagcacaggcagtcttagagggcgccacacttagaaagttctcaggcttggtttaatttttccaatgagaggtctcacatttttattttgcactgggccacgcaaattatgtagcagtgctggtctcagaaatgtttctttcagcctggcctatagatgattct

SEQ ID NO: 76891 - DNA, 616 bp, Homo sapiens
cgttaaatacttatcgttacatacatgtcgttacatatgataaatcaattccttatgagaccctagaaattgatagcccagatattccccctcttaatgagggtttatcattgaacacgaacaaagccttagtataagcaatgttgccctaatggtggaatcatgggctttacggaagcacgttggagaaaatattttgaatccaagaggccttttggagacagaggctcagtaagtaggtacccaktcatccatcacatccatgtttaggatctaaatgtccttaatttcatagtaatttattcatgccaggaatgagcagagaatcaggatgggggaagtatcagaggggccaagaaatcatagacaagggtgtccgggtaaagaagactttgttataggcagcagcacaacatagctcttctctgacatccccctcactctttcttcccatccctgttcctttgtcaccatggaaaccaatgatgctccctccttctcctcccctctctgctcactcgggtccccaggccccactgctctttgtctgactggcttcacaccgcggttgccagcctctttgcaaacactgagcctgggcatgcagcttcacctt

SEQ ID NO: 76892 - DNA, 597 bp, Homo sapiens
ctgcaacctctgcctcctgggtccaagcaattctcctgcctcagcctcctgaggagctgggattacaggcatgcgccaccacatctggctaatttttgtacttttagtagagacagggtttcaccatatttgccaggcttgtctcgaactcctgacctcaagtgatccaccctcctctgcctcccatagtgctgggattatagtcgtgagccaccacgccaggccaraaactcccgtttttaaaaccatcggatgttgtgagactcattcactatcatgagaagagcacagaaaagacccgcccccataattcaatcacctcccaccaggtttcgcctatgatacatgggaattgtgggggttacaattcaagatgagatttcggtggggacacagccaaaccttatcacttctctttatcttaagttcctaaaaatccaaatggcaacaaaatgccacaaaattaagtcataccttgcttctgtgaacacctctgatttttcccccagaaagtcagtgattgtccatcagagaaccccttggaggccaggcttctgattataaagttctccagatctctgattgctatggacgggt

SEQ ID NO: 76893 - DNA, 1503 bp, Homo sapiens
tgagccagccctggtcctgccatcagacagaccttggtcatcctccagctgggtgaccgtgagccagttaccaagcctcagtttcctcttctgtaatacaggttagtaacagtctccccctcacagagctcctgtgaagatgcggggagcgaggcatggccagggccggggagagaaagtgctcggtgagtgtgagtctggggtcttcaggctggttccagccgctcctacccttcacagcccagctgggaaatctgtcgcgtttacgatgctctgtttcatttaatcccaataagctctggctatgtagccactattattactcccagtttacagatgaggatgctggagtcccatgaggtagaagagccaggacagatccagcttcacactcagacttgggctgtttctcctgatgctctacagcctcctcccaaatgttagagctggtgggtctcagagatgggtaactcttcatttaatacatgaaataaagcccagagaggttgagggacttgcctaaggtcacacagctagttaggggcagagctggagcttgaccaagggtcctgactggcggtcttgctctctttcctgcatagcatacaagactcccctcccaggcagcccagcctgaccactgtgggggctctgtttcccttctctgtcttgtggcactgactgcccggggtggcggctgggtgcctctgggactccttggaggtcctcttctctcagctgagagtctgggggagtgctgcctgctaagggctttggggaacttcctgtcttctgcccatctcctccccccacgctccctccgcctctgcctctgcctctgcctctgcctctgcctgggtctctaccgcccctgctcatcagctgtcccttcccctttcccactccaaggctgtcagtgtttgggggagattatgcagtgttgacattggaatatgaattaggcgagagcggcagccaaatattggaattagggaaggcaggagcccaggcggggatccaagagtggctggaacatctgtgtcttggctgttccagatgcctgaccctgygcccacctgaaaacgatgggtccagagccacagacaagctctgatgcagccgaggcttggtccttgacttgccagctgagactacaactaacagtcccacagaacttggccccatcagctcgctgtattccgaagcccaggaaaaggcagatgcttctgctgtgagttgatagacagaggcaagatgctgccccaggatgtattcttcatctgattgtctgaaatcccatcttcagtgctctgtttctactgctcaggtcagcatttgcaagaatgtgttccacaaaacccaagttctgcaggctgttaagaagttgtgtgtaaaaggcggttccatggccatgtacttgggagagatgttgaacagagctaagcaggacttcccaggcagggccttgagtaatttaataggcacagcgattcatcagaagcg

SEQ ID NO: 76894 - DNA, 1503 bp, Homo sapiens
tgagccagccctggtcctgccatcagacagaccttggtcatcctccagctgggtgaccgtgagccagttaccaagcctcagtttcctcttctgtaatacaggttagtaacagtctccccctcacagagctcctgtgaagatgcggggagcgaggcatggccagggccggggagagaaagtgctcggtgagtgtgagtctggggtcttcaggctggttccagccgctcctacccttcacagcccagctgggaaatctgtcgcgtttacgatgctctgtttcatttaatcccaataagctctggctatgtagccactattattactcccagtttacagatgaggatgctggagtcccatgaggtagaagagccaggacagatccagcttcacactcagacttgggctgtttctcctgatgctctacagcctcctcccaaatgttagagctggtgggtctcagagatgggtaactcttcatttaatacatgaaataaagcccagagaggttgagggacttgcctaaggtcacacagctagttaggggcagagctggagcttgaccaagggtcctgactggcggtcttgctctctttcctgcatagcatacaagactcccctcccaggcagcccagcctgaccactgtgggggctctgtttcccttctctgtcttgtggcactgactgcccggggtggcggctgggtgcctctgggactccttggaggtcctcttctctcagctgagagtctgggggagtgctgcctgctaagggctttggggaacttcctgtcttctgcccatctcctccccccacgctccctccgcctctgcctctgcctctgcctctgcctctgcctgggtctctaccgcccctgctcatcagctgtcccttcccctttcccactccaaggctgtcagtgtttgggggagattatgcagtgttgacattggaatatgaattaggcgagagcggcagccaaatattggaattagggaaggcaggagcccaggcggggatccaagagtggctggaacatctgtgtcttggctgttccagatgcctgaccctgcgcccacctgaaaacgaygggtccagagccacagacaagctctgatgcagccgaggcttggtccttgacttgccagctgagactacaactaacagtcccacagaacttggccccatcagctcgctgtattccgaagcccaggaaaaggcagatgcttctgctgtgagttgatagacagaggcaagatgctgccccaggatgtattcttcatctgattgtctgaaatcccatcttcagtgctctgtttctactgctcaggtcagcatttgcaagaatgtgttccacaaaacccaagttctgcaggctgttaagaagttgtgtgtaaaaggcggttccatggccatgtacttgggagagatgttgaacagagctaagcaggacttcccaggcagggccttgagtaatttaataggcacagcgattcatcagaagcg

SEQ ID NO: 76895 - DNA, 701 bp, Homo sapiens
cctgagtggaaagttgatgaagttgaaggatgggtactgctatggtttgaatttgtctcccaaaacatatgctttggaaacttaatccccaatgccacagtattgggaggtggggcctaatgagaggagattaggccaaatcttgcatggtgaaaagtatgctgatctgtatactgtagatcagaatccacattcttcccccttttgagaactgaaatggtgtacatttatcttcagcaacacttcctactyttcctcctcaaggacagagagagtggctcagtgatcttccctccaacttgatctgtggatcacgagttctctgctcagtgtggagcacagaactcatttagagcagccaggtgagtgcagataacttttttcatacacctaaatgcttccatagcatatttgtatattccttgtcagtccaaagagaagtgacagaagcaaaataggagatgaagaattatgttctgtccaccactgaaaggcagtatgccgtcttctccaagttctgctgggcctaaagcataaatatatcaggaaaagaaacaaaaagaaagagaaaagcaacagaaagtataaaatgtgaggcaaaatgaattaaatagggcaaagaagagtcatttggtattgataaaagtaatgatcaataatgaagtcagggtccagttcatgaacattaatgggccagagaa

SEQ ID NO: 76896 - DNA, 701 bp, Homo sapiens
cctgagtggaaagttgatgaagttgaaggatgggtactgctatggtttgaatttgtctcccaaaacatatgctttggaaacttaatccccaatgccacagtattgggaggtggggcctaatgagaggagattaggccaaatcttgcatggtgaaaagtatgctgatctgtatactgtagatcagaatccacattcttcccccttttgagaactgaaatggtgtacatttatcttcagcaacacttcctacttttcctcctcaaggacagagmgagtggctcagtgatcttccctccaacttgatctgtggatcacgagttctctgctcagtgtggagcacagaactcatttagagcagccaggtgagtgcagataacttttttcatacacctaaatgcttccatagcatatttgtatattccttgtcagtccaaagagaagtgacagaagcaaaataggagatgaagaattatgttctgtccaccactgaaaggcagtatgccgtcttctccaagttctgctgggcctaaagcataaatatatcaggaaaagaaacaaaaagaaagagaaaagcaacagaaagtataaaatgtgaggcaaaatgaattaaatagggcaaagaagagtcatttggtattgataaaagtaatgatcaataatgaagtcagggtccagttcatgaacattaatgggccagagaa

SEQ ID NO: 76897 - DNA, 2096 bp, Homo sapiens
tcaataaagtattgtattccttgcccacagtgattagttcaggaatgaccatatgacccaacccagccaatgaaacatttgctgggaccactgggctcgatttcctactggacttgaacttggaaacatgttaagtctggaatagtggctgccatgtacgtggctatcataaaaggagttcctatgcaagttcataacaatggagccagcataggctcctatgctatgtcccatgacgtcatttgagctcctaaatcaagccacacctgaaataagacctacccctaggcttcaataaattacattttggtttaatccagatttcgaggggttgccacttgtaacaggaaaactcctagccacactggtatcttttctttccattttgagcctgtccctttaagcctgatgtctttagacgctattctctttttaatacatactcaattatttgggtttgaatgacccaaattgcattttttaaaactttccatccctttcttgagcagtctttccccctagagtgtcatgccatggatcatttgtatcattcaccaaatgtatctatcattcctgtcatttttcagaatgtttaaaatatttctcattctaactcaatgctttctgcctgtggattgactcaaatagattcttttgcagctactgtttctctgagagagggacagataaacagacaccaacagaaaggccaggatacaaatcgttgtcaagcctaccctgaggcagaaattctgccaggtatatatcttttcacgttttatcttcggtaaccccgtgagatcaattttaaaatgcccatcttagacatgaggtcagcaaatcacttccccaaattactataaagggagaagaagccagaggtcaaaagcaggtctgactgatctcaaagcctttccattcttcctgtgtcaccaaactgcccactctgggccattgtttcttcaggaatagaccctggggcgccctctggayaaaattctgggaagcagcccatgtgggcaagtggaagctcagggtaagggtgacaaggttgactcagtttccccagagaagaagcaagaagtttgggatccagatgcacccattaaaggcctctgggaatgtggccaggctgtcctgtcctgcccctatggagtcctccaaacacccaccagcgtcatacaggctgagaaggcaccaagccttctgtctggcaccttacaggaacagtgaggagaccagggaggaggtgtcacatgcagcctctgcccctgtgtgtcttcatgtcccagaaggccctccccaggacctgaccatgtaagaaactgcccactctggatggatgtcactcgcatgcctcctgcttccacccagggagctggagcccttggcaggatatctatccccagccgcaggacagaacccaccttcgggccagtgaccccaaacccaaagccctgctcttcactgttctctgtttgaataaggactctgggaaacgcacccaatgggagacacattggagagaggaacgtttccttgtggggagacggactgtctcgggatatttcatgtagtgacaattgaagttggagcttgacacatgagggtttgttctgttagtcccaaagatgccattgtcagcaaagagtgactctcccagaatcccccaggtagatcccaacccctgctccacctcccgaaagcatggcatccagacccccacccaaagaacccccacccaaagtgatcatgcttgctccagtgcctataagagtactgccttccactggacatctattagaccagatggtttacatgtattatctttaatgtgaacatcagcccctatgcaataggtattgctatctccatttcatgtatgaagaaactgaggctcagagaagtcgagaaatccataacctctctctctctctctctctctctctctctctcttagagctgggccactggaactagatatacacatgcagtggatggtggatggtccatgccccttcaagtccatttactcacctgacgggtcttatgtggatatttgtctaccccactagataggagcacctccaagagcc

SEQ ID NO: 76898 - DNA, 1265 bp, Homo sapiens
cagcaccttccagtgcgcattcctgtagccacagcacctgggatggcagagtcagtcctcagtcctgactccaaggctaccaagtctgtttctccacctgccttccccctccccacccccrcccagggagtggcagcgtactgagatgcctaacaagagtggtgctgaccttccaaaagctaagacttcatgtttccaaatcgtgactgtccctctataaaaaaccaagctctaatagccttgggctgagccatcagaaccttccttttcacccagagttaatccctccccaagttttcaggctgacgagaatagtcagggtttagagaaagctttctctatcttgcactaccagatccagcgcctcatttttcaaattctggtgtatttcgggtagagaggagggaaaagtacatctggctgacatgaaaagattggtgtggttgtaatgtaaagacagagtggaatttgggaaatttttgaagaacatttaaactctaaaaatagacaaaagacccgctctcagaaacactaggattctgtctcccatttcctggaatcccccacttgacaaacatgggtgttttaggagtgcctatggtgtggattgcactgtgacaggtgccgtggggaaaagggggagggggaaacagaagcaaagggcttgtgctcaaggagtttggatcctacacaatgaagcagcaaagaaaagtcactacaaatacaatcaaatacaaaaaaatttagccttggaagtcagagggaggtggacccttggagggccattcagggagggcttcttggaggaggagagagttgaactgaggcttaagagatggttggaatgtaaaaaggcagaagagcaggagagcctgtgaaaggaaacagcagctgggtgggctcatttatgggacaggagggagattaatattagtggctaatgtttgaggtctcaagatgggccaggcactgtgctgttggctttgtgtgaattattttatttaactctcaaaataaccccttgaagtaaccaatgtcattcccgttttacagatgaggaaactgagagctgaaaagtttaagcaactttcccaaatttacagagctggtgagcaacagcgcgccacagcagtctggcttccacatacctgggcactctgctctgccactctggccaggctgactctagtgggggcacctgcagggaggagctggaggtcaggcagtctagggaggccaatggcaggtggcagggccttcagaag

SEQ ID NO: 76899 - DNA, 1265 bp, Homo sapiens
cagcaccttccagtgcgcattcctgtagccacagcacctgggatggcagagtcagtcctcagtcctgactccaaggctaccaagtctgtttctccacctgccttccccctccccacccccacccagggagtggcagcgtactgagatgcctaacaagagtggtgctgaccttccaaaagctaagacttcatgtttccaaatcgtgactgtccctctataaaaaaccaagctctaatagccttgggctgagccatcagaaccttccttttcacccagagttaatccctccccaagttttcaggctgacgagaatagtcagggtttagagaaagctttctctatcttgcactaccagatccagcgcctcatttttcaaattctggtgtatttcgggtagagaggagggaaaagtacatctggctgacatgaaaagattggtgtggttgtaatgtaaagacagagtggaatttgggaaatttttgaagaacatttaaactctaaaaatagacaaaagacccgctctcagaaacactaggattctgtctcccatttcctggaatcccccacttgacaaacatgggtgttttaggagtgcctatggtgtggattgcactgtgacaggtgccgtggggaaaagggggagggggaaacagaagcaaagggcttgtgctcaaggagtttggatcctacacaatgaagcagcaaagaaaagtcactacaaatacaatcaaatacaaaaaaatttagccttggaagtcagagggaggtggacccttggagggccattcagggagggcttcttggaggaggagagagttgaactgaggcttaagagatggttggaatgtaaaaaggcagaagagcaggagagcctgtgaaaggaaacagcagctgggtgggctcatttatgggacaggagggagattaatattagtggctaatgtttgaggtctcaagatgggccaggcactgtgctgttggctttgtgtgaattattttatttaactctcaaaataaccccttgaagtaaccaatgtcattcccgttttacagatgaggaaactgagagctgaaaagtttaagcaactttcccaaatttacagagctggtgagcaacagcgcgccacagcagtctggcttccacrtacctgggcactctgctctgccactctggccaggctgactctagtgggggcacctgcagggaggagctggaggtcaggcagtctagggaggccaatggcaggtggcagggccttcagaag

SEQ ID NO: 76900 - DNA, 677 bp, Homo sapiens
catgggtggaaccagagaccccaaacagacacccagggccagttgacttgacctgggcctctcctccatgtatgtacaagctccacttcctcctccatgctccagcatcgcttggtcttgtgttgcttagcctactaagcttgtccaggtcactctgcccgacctcaccatgagccctccctactcttgtcccttctgcttaaggagccagagaaaacaactacagattcttgtgccctggggtgtaagggaaactgtggatgcccaggggagagaaggggagaagcctgggggtgacaggaagatgggtgttagtagcccccacttcaacataagagggcaaaaatccagactaacacagaaaacaaactagatcaatgtttcccactgagatcaatgtttcccgctgagatcaatatttcccactgtgtgttccacagaacaagtcaccaggaataaagggttctgtggtccaataagtttgggaaaagcagaggtaagcagatttccatagcagacttcccagggcctttaatgtgctaatacgcatggcgaatctccaagagggaggcagagcatgyggcgcagcccagccttatgtgaccaaggaaccctttcatcacagtggatttctcaggaccaaagtgctagggaacatgctttggaaaacagagaac

SEQ ID NO: 76901 - DNA, 710 bp, Homo sapiens
gagtcatgcacttcaaaatgcaattaaaaaaattgctaagccttatttgggaaggaaaaaataagtgcataaatgtatgcctttgaacttccaaaatgtcaaggtcatcacctttaacctttctgaataattaggcgccttaagttcttcttgattttcagctgccacccactctcacacatacatgctyacacatatagagagccacacacacatttatgaccacacaaaatcataccaggagctcaccataaatctaagaaaattcctaatttcaggatcaataaccttaatttccctgcaaacgtttgtgtaatgcaatagcagtcaacttctttttaaaaatactgattagattaaaatgccttctagctgctttcactacagctaggaaaggctgagaattctggcggggggtcttaaatagtggtcccctttgctttaatgaagaactacagttttaaaatcaagcctttgaaagaggaagttctgtgcagccttacaccttcattaaatttgaaagcaatttgccaccctgtgaaataaattattgcactttctacaataaggaacaaaaggaaatatagttataatgcttttaaaagcatcctttggtgaaagatgcaatggaaacaaagcctacaatcgaaaaatttcgttaagaaggggattcctttggtattctagacatcggttaaaatgtcagtgcc

SEQ ID NO: 76902 - DNA, 548 bp, Homo sapiens
tcaaacattccttcacaccacatatagaattctcaagaaagaagaattttaaagaaaatattgtcttcatcttatttatagtggtgctttcgggccccttggagattggcacactgggcactatttggcagtcctcacccttaatttgactctggacagtcagatgtgcaagatcctcactcagatgaatctctcatgaacacatttctttctttcttttttttttttttgagatggagttttgctcctgttgcccaggctggagtgcaatggcacaatcttggctcactgcaacctccacttcccaggttaaggcgattctcctgcctcagccttccaagtcgctgggatcacaggcatgagccagtgcacctggctaattttgtatttttagtagagatggggttttaccaygttggccaggctggtcttgaactcctgacctcaggtgatccacctgcctcagcctcccaaagtgctaggattacaggcgtgagccactgtgcccggccacgtttctcttttcttttcatttacttatttttatt

SEQ ID NO: 76903 - DNA, 653 bp, Homo sapiens
agatattaaaaagtaagaattgcatttattttcatatttcttgaaatatctttatttttatctacaataacaaaacaaggaaagatttttggtgcctgctaagtctttgtaaattaaatctctcctcctgtggaagcctagttcctacctcagaaattctaaagcaggtacacatatgctttttcctatatgcaaaacaaacagggcagatgatgcaagaaacttgtgtttaagctcttgaaatgcttcctacttccacatgctttattgtggtttagaaagcccagcatcatttggccactgttttctgttctgaccstcagccgttttgaactccatactccagagtaacagacttttgctttttcaagcctattgtgctttgtctcctggataggcctttgcacatgtgattttctctatctggaacactctccccaaccttttgaaacaccaatacttagtatttcacagggggcagttctatgcaaacctattccaaaatctgaggaagctgagaggttgaagaaaaaggctgacagatctagtttcttagaaagaaacatttaataggtgcttatgaaataaacatttaataggtgcttataaacagaagtctgtgtctctggtggtgttgagacaaaatggtggat

SEQ ID NO: 76904 - DNA, 1075 bp, Homo sapiens
catcctcattttctgttttccttggctgtctggagttacttccggctctgttctgcctctctgggttgtttcttcccatctgggggatttatcctgggtccaaacatcacccctgctctctgctcagtaggtgtgaggagggacaggggcctagtgggttcagctgttccaaatayaaagccttagtaattaacctgatgattgtccaaaagccccttctgctttctcgacttgttgagtctgagcttaaaatatttctggaatttctattacttctgctgtagctttctattgtctatgtttgggattatgtttttgttttttgtttttttttctcttctgcccttatgtttctgcaatctgatcccatctgcttcctatcttccaggaattttttcaaaatctgtctaaggatagttacctttcttgtttcatagggccatcatggattcctttacatcctcctcctttcatccatttatcttattaatcctcacaatgattcactgaaagaagtgtttattattaccttgtttttcaacaggaaaactgaggctcagagaggttagattaaattctctaagctgtcacagacagaacatggcagtgctggaactgacctctggtttatctgacttcaagtgggagtaaaactattccctccacttgtccatttgtcagggatcttccttatgtttgcctcttagttctttcctcctatggcctgagaactccttgagcacagaggttgtacaggagtcctctttgtatcccctgcagcaccttgcacagtgcagagaacccctaacacaggcagcatgagtccatggcaggttgtccaagatcacatggctagaaagtcagtatttgaactcaagaaatcttgccccagggactgtaccctaatgtcatgctgccactcagatcttaggtgccaccaattttctcccaagcaaccccttcctgggaagaaagcacatcactaggctaacagccaatctgtgcactgggaagactacctttgaggggcttccactgctgttttcttacaagtataatggcactatttgacttt

SEQ ID NO: 76905 - DNA, 1075 bp, Homo sapiens
catcctcattttctgttttccttggctgtctggagttacttccggctctgttctgcctctctgggttgtttcttcccatctgggggatttatcctgggtccaaacatcacccctgctctctgctcagtaggtgtgaggagggacaggggcctagtgggttcagctgttccaaatacaaagccttagtaattaacctgatgattgtccaaaagccccttctgctttctcgayttgttgagtctgagcttaaaatatttctggaatttctattacttctgctgtagctttctattgtctatgtttgggattatgtttttgttttttgtttttttttctcttctgcccttatgtttctgcaatctgatcccatctgcttcctatcttccaggaattttttcaaaatctgtctaaggatagttacctttcttgtttcatagggccatcatggattcctttacatcctcctcctttcatccatttatcttattaatcctcacaatgattcactgaaagaagtgtttattattaccttgtttttcaacaggaaaactgaggctcagagaggttagattaaattctctaagctgtcacagacagaacatggcagtgctggaactgacctctggtttatctgacttcaagtgggagtaaaactattccctccacttgtccatttgtcagggatcttccttatgtttgcctcttagttctttcctcctatggcctgagaactccttgagcacagaggttgtacaggagtcctctttgtatcccctgcagcaccttgcacagtgcagagaacccctaacacaggcagcatgagtccatggcaggttgtccaagatcacatggctagaaagtcagtatttgaactcaagaaatcttgccccagggactgtaccctaatgtcatgctgccactcagatcttaggtgccaccaattttctcccaagcaaccccttcctgggaagaaagcacatcactaggctaacagccaatctgtgcactgggaagactacctttgaggggcttccactgctgttttcttacaagtataatggcactatttgacttt

SEQ ID NO: 76906 - DNA, 1565 bp, Homo sapiens
cattatactacattcacctaaccacttaaacaatatttctagttactaagctgcccccatgtatattccaccctctaaccccttcacctccctctcaagcaggatctgtatttccagttttgcccaggacatctctgctttctcttattcttctttgcttttttttttgttttccagacacattggctttcttctgcctagcatttttgttactttcaatattcttctcattggaattcttattcatctcttctctcatccttaatggaataaagttaggttttgatcagtcccaaccaaaataatatttaaatattcatagcatcttatagatcatagaactcatatagtccgcccacttcttgcccctgtgaccattttatggtgagaaaacaaactcatagacttgcctgaaataatgcagttacttacttgtaaaactgggacgccaacttcctaattactaatcaagctatgcttttactacactaatgcaggttctcatttgctcagtaagcaattgttgaatgcacggcaatatactaggttgttgaaggaaagagaaaagcagtgaaaacatgaaaaggaatctgagatgtagaaaatagatcttgcagaaagtcttgctggaggactaaaacatacatgtatgagctttagagaaaaatttctgaggaatttgggactaaatacaccctgtaatatcttcgcgttattaaagttaagatgaaatgtggagccaagaaatagtggaaatggctgaaattttccatgaaattctgtagagggggcattattttaaaccttgaaggacaaatggtgggcatgtatttgtgaagagaagggggatgcattctagtggatgaaggggcacaagtagacatcaaggtgagcatgaacattagctgcaatcacccaccactcaattttttcctgcttcagacataattttccactctcctgcactgttgttgagcagcaacagatcctcagaggtaggcttgcacatrgcttttaggggcaaatagtttggcatagaattaatctgtcaataagccctgtagcatgaaacagtagaaataaacacaagattgagagttagaggatctaaggtctaggccttccaccaggttaatactggtgtgatcttcagcaaattaacctcttagaacctatgtttcttcatctgtaaaattgggctaatataatctcacatgataataataaaatattatcatgtttggggaagtccttagagatcatattgcaaatgctagttaatgccactagtgatgaatgagaacagatttggaccttgtctatcccttaaaccagtgtaaagtacagctgacccttgcacaacatgggggttagggatgccaactctctgtgcagtctaaaattagcataaaacgtttgattccccaaaaatcttaactactaatagcctattgttgaccagaagccttactgattacataaacagtcaatcaacacatattttgtatgttatgtgtatttatactgtattcttaagactaagctagagaaaaaaatttatgaaa

SEQ ID NO: 76907 - DNA, 940 bp, Homo sapiens
ggaagttcattagtgattctagttttgccctgaccttgtgatctcgccctaacctcctgtcttgtgatcttttgttgcccttaaagcaagtgatctctgtgacccacaccctattcgtacactccctccccttttgaaaatcactaataaaaacttgctggttttgtggcttgggggacatcatggaacctgctgacatgtgatgtctcccccggacacccagctttaaaatttctctctttgtactctttccctttatttctcagactggctgacacttaggtaaatagaaaagaacccacgaagaattatcaggggtgggttcccccaataaagagccagtgggcaccagcaatgatgcactgatcgccaayccacagaatacaacagagtaatcccaaatgcttgtagatataggaaaatgctgagaatgtcataaattcagtataacttcaaagtatacatttaaaaatagcacaactgtagctagtcagggatttacagattagaagtacatttgatcacatctgtcatatttgacctcatttcattttgtaaagctttcatattacccaccccctatcccaccaccccccaaaaaatctgctaaaatctagtaaacaggcaactatttttagacaagctcattttctttagtggctgtggaatgctgattatcctgcaggggaaggtttacaaagaggtacagtcaactgaagaggcctaaagttactgtcattacagcaaaaagaaaaatttaatacatttaattgtactctgagccctagaccttcttgcattttatttgcaaatgcaattatatcaggctcataacactttcaggtgtgattttaaaatgcaaggcctacagacaaatttggcttagtttatctctatttacaggggccaatacttctcacaagctgattctcgagtacaa

SEQ ID NO: 76908 - DNA, 940 bp, Homo sapiens
ggaagttcattagtgattctagttttgccctgaccttgtgatctcgccctaacctcctgtcttgtgatcttttgttgcccttaaagcaagtgatctctgtgacccacaccctattcgtacactccctccccttttgaaaatcactaataaaaacttgctggttttgtggcttgggggacatcatggaacctgctgacatgtgatgtctcccccggacacccagctttaaaatttctctctttgtactctttccctttatttctcagactggctgacacttaggtaaatagaaaagaacccacgaagaattatcaggggtgggttcccccaataaagagccagtgggcaccagcaatgatgcactgatcgccaacccacagaatacaacagagtaatcccaaatgcttgtagatataggaaaatgctgagaatgtcataaattcagtataacttcaaagtatacatttaaaaatagcacaactgtagctagtcagggatttacagattagaagtacatttgatcacatctgtcatatttgacctcatttcattttgtaaagctttcatattacccaccccctatcccaccaccccccaaaaaatctgctaaaatctagtaaacaggcaactatttttagacaagctcattttctttagtggctgtggaatgctgattatcctgcaggggaaggtttacaaagaggtacagtcaactgaagaggcctaaagttactgtcattacagcaaaaagaaaaatttaatacatttaattgtactctgagccctagaccttcttgcattttatttgcaaatgcaattatatcaggctcataacactttcaggtgtgattttaaaaygcaaggcctacagacaaatttggcttagtttatctctatttacaggggccaatacttctcacaagctgattctcgagtacaa

SEQ ID NO: 76909 - DNA, 1703 bp, Homo sapiens
gaaaattagctgctgttagtatttcactcactcccaaaattacttttagtattttgtcaaagaaaataagttctatcccaaaacatgtaacaagagcaagcctggcctgatcaggggattgagcttctgatttgataaaagcttcctcaccccttcagttgaaagtggtttccttcagatagcttcctggaaacttctgggctgtgcacattagtccctttcaattcaggcactgaaatgctagcaaaatgaaggtatgttttctggaaaccagctatcaatctagcacaagcgactattaggaaaatcaaggaggtgctgcggggatgtggaataggacacctgggttttgatttaaagtaacttaaaggaattgcttatagcagagagttaacattcatatgggaaattttgagcaacctgtttgactcaggtcccggtgagagggcagtcttacataggagatgtacagaaagttttagtctccattcctaatcctaggcacacgcacacacacacacacacacacacacacacacacacacacacamaattctgaaaccctaatactgtcaaatccccagtgagtttcaattttcaatgacaactatggataaaaatggtcatatttaggagagtaggggggaaaaaagctttaataaagtggcagcagaataaaatgattatcagttttttaaaagcactagtgtaaagaatacctctcagtttaattttccttttaatttattataaattataggtttgcttaggagaaaaataaaaaatcaaactgccattttctttgaaaacacaaatcagacaaattgttacacagcaggatcctttgctaattttgacagccacttattcatttactagcctttgtccgacacaatacctgtgtggcttttatttttccagactttccactgacacattttcacaatttgggtgtttttgtccaaaacgtgtcatgtattttgtcatatatatgacaaatataaattggaatttttaaacttcaaataaaataccacattaaactagtgattttaaactgaagatgatagaatttttaaaatacagacttggagaccacattcaaaacacttcatagcaaatgagaggccctcagttatctggtcttacctcagctttctagtcgtctttgtcactttttcagcccctggggtactactcagtgctgtctgccagcctgctaagttcactttttcctgcttagcacttgttattcctctttttccactaaatgcctttagttattaaattattgtttcctacagaaatttaacttcatcatttttgttgtctggagaaagctttgttgtcatcactcagtggtgagaaggttgactttctcatgaaagctccaaccctaggtcttaggtttgatgtaagtcatgtgctgctgtggaaactgtctagtgcctgtacagtgtgatccgaagttactggactgtgagggggcagtctatcaagtatggacagctatcaagtatgttgtacagtttgatctttaacaatttaaaatcaatattgggttccttggtcacacaaatagcctagttcttcaagtaagcagttctttctgcctgaaacctcatgtcccactgttctacttgagcacccttccaggtatcaagggcttaattatagggtatacatagtcccctgcaagcccc

SEQ ID NO: 76910 - DNA, 828 bp, Homo sapiens
gtgtctcaaccttcccatcagtagcaccttatgtatggctattcttgctcttgagtcaagtatatatttcacagaaaaggtttcttctgtgcacatctgggcttattcatactgattagatgcccctgggatggaagtaagtggagtgctgatgtgtgtctccattggcaggacttctcactgattatcctgatttgtgaatactgctttgtaggatgcgcatgtatcagtctgtgtgcagatgcaccgcaaaatctttcaaaggaaacaaaagtgtgtttaaataatgcaggaaataatggaagggactagaggacagtatgtgagtggctaagagtggccttaacttttcaaaaggcaaccttggtgtactaatacgaagggatgttctgagcacatagtagatccctgataaatgtttattgtccttgaggggctactactaaggtcagcaccagcatcgtggtcaatgttaaatatttccatatgggagaggaagcaggagatcatatctagaaaaagggaaacacattaaacmgaaagtgtttgaggaagaagaccagtgtctgcataggaggggaatcaggcagccatgtcctggggaaaaggaatgtcgagagacagtagaggtgaactcttatggactgttcacctccaggtagtaagatatcatgaagatagttgtcaattctttccagtttccacctgctagtaaagagaagggtactggtagccttccggtcttgtctctagttgattttaatgctggacagacgtatgcctgtgtccagagaacattatagctgtatatggtagggctgcagcagg

SEQ ID NO: 76911 - DNA, 828 bp, Homo sapiens
gtgtctcaaccttcccatcagtagcaccttatgtatggctattcttgctcttgagtcaagtatatatttcacagaaaaggtttcttctgtgcacatctgggcttattcatactgattagatgcccctgggatggaagtaagtggagtgctgatgtgtgtctccattggcaggacttctcactgattatcctgatttgtgaatactgctttgtaggatgcgcatgtatcagtctgtgtgcagatgcaccgcaaaatctttcaaaggaaacaaaagtgtgtttaaataatgcaggaaataatggaagggactagaggacagtatgtgagtggctaagagtggccttaacttttcaaaaggcaaccttggtgtactaatacgaagggatgttctgagcacatagtagatccctgataaatgtttattgtccttgaggggctactactaaggtcagcaccagcatcgtggtcaatgttaaatatttccatatgggagaggaagcaggagatcatatctagaaaaagggaaacacattaaacagaaagtgtttgaggaagaagaccagtgtctgcataggaggggaatcaggcagccatgtcctggggaaaaggaatgtcgagagacagtagaggtgaactcttatggactgttcacctccaggtagtaagatatcatgaagatagttgtcaattctttccagtttccacctgctagtaaagagaagggtactggtagccttccggtcttgtctctagttgattttaatgctggacagacgtatgcctgtgtccagagaacattatakctgtatatggtagggctgcagcagg

SEQ ID NO: 76912 - DNA, 767 bp, Homo sapiens
attattcatgatctaagatcccagaaaccctttaaaatccttgggatcaattaaatctcacaatcaggttttttttttcagatttctcaaagataatgtcatacatatattataccttggaaaacaaccccaatgaggaccgggaggacagtccataatcgagcacattactgcctaggycaccaaatgctcttgccccaagttgtatacttgaagagtataaatagtcctcattggttcaggccagattttattacccaaagagtttgccacagaccttagatttcagagttttttggcatttaggaattgcaggtgaagtgctgtaaacctataactatcaatcaaagttgttcataaacttctagacaatgcaataggacaaaaaaaaaagcttaaaaacattggaaagaaaagagacaaaattgtcattatattaattgtccatttctagaaaataagaaagtacagaaaactaggttttagagtgttttttaattcaatattttctatatacatacatataacatacgtgtgtgacatgtgtgtatgtgcatgtatgtaagaatgggtaacacccttcttttcacccagatggagattgaggagagagagtaactgttcttggcaaataatttaatccagtcttttctagactgtgcatttctaaggctctaattgtgttgctaagggagaggtgtttatagcaggtttgtggctgctttcttaccctgctaagcctgaaagggaagcagaaaaagaacaaa

SEQ ID NO: 76913 - DNA, 767 bp, Homo sapiens
attattcatgatctaagatcccagaaaccctttaaaatccttgggatcaattaaatctcacaatcaggttttttttttcagatttctcaaagataatgtcatacatatattataccttggaaaacaaccccaatgaggaccgggaggacagtccataatcgagcacattactgcctaggtcaccaaatgctcttgccccaagttgtatacttgaagagtataaatagtcctcattggttcaggycagattttattacccaaagagtttgccacagaccttagatttcagagttttttggcatttaggaattgcaggtgaagtgctgtaaacctataactatcaatcaaagttgttcataaacttctagacaatgcaataggacaaaaaaaaaagcttaaaaacattggaaagaaaagagacaaaattgtcattatattaattgtccatttctagaaaataagaaagtacagaaaactaggttttagagtgttttttaattcaatattttctatatacatacatataacatacgtgtgtgacatgtgtgtatgtgcatgtatgtaagaatgggtaacacccttcttttcacccagatggagattgaggagagagagtaactgttcttggcaaataatttaatccagtcttttctagactgtgcatttctaaggctctaattgtgttgctaagggagaggtgtttatagcaggtttgtggctgctttcttaccctgctaagcctgaaagggaagcagaaaaagaacaaa

SEQ ID NO: 76914 - DNA, 767 bp, Homo sapiens
attattcatgatctaagatcccagaaaccctttaaaatccttgggatcaattaaatctcacaatcaggttttttttttcagatttctcaaagataatgtcatacatatattataccttggaaaacaaccccaatgaggaccgggaggacagtccataatcgagcacattactgcctaggtcaccaaatgctcttgccccaagttgtatacttgaagagtataaatagtcctcattggttcaggccagattttattacccaaagagtttgccacagaccttagatttcagagttttttggcatttaggaattgcargtgaagtgctgtaaacctataactatcaatcaaagttgttcataaacttctagacaatgcaataggacaaaaaaaaaagcttaaaaacattggaaagaaaagagacaaaattgtcattatattaattgtccatttctagaaaataagaaagtacagaaaactaggttttagagtgttttttaattcaatattttctatatacatacatataacatacgtgtgtgacatgtgtgtatgtgcatgtatgtaagaatgggtaacacccttcttttcacccagatggagattgaggagagagagtaactgttcttggcaaataatttaatccagtcttttctagactgtgcatttctaaggctctaattgtgttgctaagggagaggtgtttatagcaggtttgtggctgctttcttaccctgctaagcctgaaagggaagcagaaaaagaacaaa

SEQ ID NO: 76915 - DNA, 767 bp, Homo sapiens
attattcatgatctaagatcccagaaaccctttaaaatccttgggatcaattaaatctcacaatcaggttttttttttcagatttctcaaagataatgtcatacatatattataccttggaaaacaaccccaatgaggaccgggaggacagtccataatcgagcacattactgcctaggtcaccaaatgctcttgccccaagttgtatacttgaagagtataaatagtcctcattggttcaggccagattttattacccaaagagtttgccacagaccttagatttcagagttttttggcatttaggaattgcaggtgaagtgctgtaaacctataactatcaatcaaagttgttcataaacttctagacaatgcaataggacaaaaaaaaaagcttaaaaacattggaaagaaaagagacaaaattgtcattatattaattgtccatttctagaaaataagaaagtacagaaaactaggttttagagtgttttttaattcaatattttctatatacatacatataacataygtgtgtgacatgtgtgtatgtgcatgtatgtaagaatgggtaacacccttcttttcacccagatggagattgaggagagagagtaactgttcttggcaaataatttaatccagtcttttctagactgtgcatttctaaggctctaattgtgttgctaagggagaggtgtttatagcaggtttgtggctgctttcttaccctgctaagcctgaaagggaagcagaaaaagaacaaa

SEQ ID NO: 76916 - DNA, 767 bp, Homo sapiens
attattcatgatctaagatcccagaaaccctttaaaatccttgggatcaattaaatctcacaatcaggttttttttttcagatttctcaaagataatgtcatacatatattataccttggaaaacaaccccaatgaggaccgggaggacagtccataatcgagcacattactgcctaggtcaccaaatgctcttgccccaagttgtatacttgaagagtataaatagtcctcattggttcaggccagattttattacccaaagagtttgccacagaccttagatttcagagttttttggcatttaggaattgcaggtgaagtgctgtaaacctataactatcaatcaaagttgttcataaacttctagacaatgcaataggacaaaaaaaaaagcttaaaaacattggaaagaaaagagacaaaattgtcattatattaattgtccatttctagaaaataagaaagtacagaaaactaggttttagagtgttttttaattcaatattttctatatacatacatataacatacgtgtgtgacatgtgtgtatgtgcatgtatgtaagaatgggtaacacccttcttttcacccagatggagattgaggaragagagtaactgttcttggcaaataatttaatccagtcttttctagactgtgcatttctaaggctctaattgtgttgctaagggagaggtgtttatagcaggtttgtggctgctttcttaccctgctaagcctgaaagggaagcagaaaaagaacaaa

SEQ ID NO: 76917 - DNA, 626 bp, Homo sapiens
ggggtgggacaggctgtcacggggtcctgggtgggtgtagggcaggtgaggaccggaccaggccttggggtgcgtgtgggcttccatggtgcctgggtgccagaggggagcagtgtgggaaccggctggcaggctttggtcccacacttgcctctggggcccgagctgccctgtctccaaggctgagtttgctctgggcctgtggtctccactttccctgtccaccctccccctaggggatgagaggggcaccctcataactcccaggctgcccacagctgcacatccgtcagaatcaagggagggcaacccgacctcggcatgctcaggctgaagccagtctgtgtaaacgcgtcagcccccacgttgctccctagtcagcccttctgtgayggggatggggccacctctccatctctggagatgccaggctcaggagcatgcccccaccatcctggactgaacagttggtttattggtgctggaaagacagatggactttctcctggttcaagctttccgaagacaggaagggcagcctcttgggccatgacccctttgctgtctgcagcaagtgggtgaatgcctctgcaggataatttcggaggaataggataaagtagtgg

SEQ ID NO: 76918 - DNA, 551 bp, Homo sapiens
ctgtgacactgtcttctgcctgcttttctgggggctcctgcagttattctgggctcatgggcactatgtccccaccttagggtcaacagggacagtcaacacctcayaggagggagtgtcaccatatcttcaggctcccgccatcagttgtggaacttgggggccatttgtagaggctccctggggaggtccacctctgcaggactcatggcgtctctgccagatcagatctgggctccatggttcctcctctccaccagggcatgacagcgacaagggaggtgggctgcctggtgcccgcccctactccgcagctgtgtagcttctggctgcagctggaccccccaaggcctgggccttctacatgtgctcaactgcttagagctgtggggagggggacacccggccctgcccccaccctcaccctttcttgctcgaatgtcaaagctagaggctttgctggtaccaggaccagcttccacccaagggctctgcctgccaggctcagagtggagcaaacaccttgcccctctggctgcccccctgcctgt

SEQ ID NO: 76919 - DNA, 778 bp, Homo sapiens
atgagaaaaatatatgaccccgaaaagggggtgtgtggcactttttctgtgttccttaaggggtcttagagctgctagaagtcctgtctagatttctttatgtggaattgaagatggcaaaaaagaaggaggagtagaagtgaaagaaaatgaaataacaagtcttagatgtaccaatttggatattttaagctttccagaagggccaatgaagwtttacatttttcttagcaaaaatcatgtgaaaaagataaaaaggaaacagaataaccaatcacataattaaaagggggtttcagttgactgaaaagtaaatcccactagcagaatccaaaagagaaaaagtagaaggaacttttattttttaaaaaagtattatagtctgaatatcagcttttaattaagctgacttctgaccatagagctttttttaaaaaaaaaaaaaaaattttaaatctctcatgatgaaattttagctgggacaaacagccaatatttttggctttcaaacttcccccccgaagttatctttcaaataactcaccaaaaccaaaaccccttaactaaggttatgacttaaataagaatgcgtgagacatctccaaagaggtgcaaagcagtcctcacaagatccagaggcatctcaaaggcagctaaataaaattttgccagccacaaataaagtacaacccatatttctttcctgccaaattctctaggatctcagcttctcagcagaccatctacacacaaaagtcaaccatcccttgtgccccat

SEQ ID NO: 76920 - DNA, 778 bp, Homo sapiens
atgagaaaaatatatgaccccgaaaagggggtgtgtggcactttttctgtgttccttaaggggtcttagagctgctagaagtcctgtctagatttctttatgtggaattgaagatggcaaaaaagaaggaggagtagaagtgaaagaaaatgaaataacaagtcttagatgtaccaatttggatattttaagctttccagaagggccaatgaagatttacatttttcttagcaaaaatcatgtgaaaaagataaaaaggaaacagaataaccaatcacataattaaaagggggtttcagttgactgaaaagtaaatcccactagcagaatccaaaagagaaaaagtagaaggaacttttattttttaaaaaagtattatagtctgaatatcagcttttaattaagctgacttctgaccatagagcttttttwaaaaaaaaaaaaaaaattttaaatctctcatgatgaaattttagctgggacaaacagccaatatttttggctttcaaacttcccccccgaagttatctttcaaataactcaccaaaaccaaaaccccttaactaaggttatgacttaaataagaatgcgtgagacatctccaaagaggtgcaaagcagtcctcacaagatccagaggcatctcaaaggcagctaaataaaattttgccagccacaaataaagtacaacccatatttctttcctgccaaattctctaggatctcagcttctcagcagaccatctacacacaaaagtcaaccatcccttgtgccccat

SEQ ID NO: 76921 - DNA, 1269 bp, Homo sapiens
tccaattcaggcattcagtatgagcctctccacctgatgttatctgtgcactgtattgactgagacataagattttcatctaaacagtgaataaaagcactagccaaagaattgaagtcaactcttagttagattttgccactgaaagcttgctccaggttgacaatcatctgaacatcagggtaaagtcgtatcaacctccataagaataattgattttgcatctagccatatttctttatctygtccacacaggtatgctgagagatcttgttgaaatccagttagacaacagcctgttaggaaatgaggtgtgtctgttatgacactcttcgtgagcccatactggggcctagggatcttcactttcacatttaggtgattttctcagtattctggaattgtctccagtccagaagacaggatttccttcaaagaaagtgtttcttatcatcaatcacctcttccctcttggacttccatttcctcttactgatgttcactttacccttttatattgaaaacatcattttttgacagaatatagaaacaaaacgggaggttttatgtaccatagtgttaccatgtgcatgctctagaatcacactgatcagattcaaattccagttctaccatttactagttgtgccttaatttctccctctgtaaaatggtgataataacagtacatgtttcatagagttgttggttgatttgacatttacaactggaatgcctctcttgggataggcagttcaaaaagaacaagttaataatatatgttgcacaactgaggtttgggaggcttatgattttttaaaattttccttccctctgcaatgcatgatgtttgtgtgaaggtggcgctaaaataatgccgtgagagctatcggctctggagccccagacctgtttttttttttttttttttaagccattttctagctcttgccactaaaaatcaggatattaagtaaaacaataataattataattttcaatgcaaactcaaataataatgcatttaactaccctcctcttttagtctcccttaatcttaacgtagacaaggcagatgccatacaggctggattttgatttggagcctgattctgccaaataataataataataaattaaaggatggtttccgagaattagtaacagttatggaagccactgcaaggggccaaattaggtgattaagaacaaggccgagcacggtggctcatgcctgtaatcccaacactttggaaggccgaggcaggc

SEQ ID NO: 76922 - DNA, 1269 bp, Homo sapiens
tccaattcaggcattcagtatgagcctctccacctgatgttatctgtgcactgtattgactgagacataagattttcatctaaacagtgaataaaagcactagccaaagaattgaagtcaactcttagttagattttgccactgaaagcttgctccaggttgacaatcatctgaacatcagggtaaagtcgtatcaacctccataagaataattgattttgcatctagccatatttctttatcttgtccacacaggtatgctgagagatcttgttgaaatccagttagacaacagcctgttaggaaatgaggtgtgtctgttatgacactcttcgtgagcccatactggggcctagggatcttcactttcacatttaggtgattttctcagtattctggaattgtctccagtccagaagacaggatttccttcaaagaaagtgtttcttatcatcaatcacctcttccctcttggacttccatttcctcttactgatgttcactttacccttttatattgaaaacatcattttttgacagaatatagaaacaaaacgggaggttttatgtaccatagtgttaccatgtgcatgctctagaatcacactgatcagattcaaattccagttctaccatttactagttgtgccttaatttctccctctgtaaaatggtgataataacagtacatgtttcatagagttgttggttgatttgacatttacaactggaatgcctctcttgggataggcagttcaaaaagaacaagttaataatatatgttgcacaactgaggtttgggaggcttatgattttttaaaattttccttccctctgcaatgcatgatgtttgtgtgaaggtggcgctaaaataatgccgtgagagctatcggctctggagccccagacctgtttttttttttttttttttaagccattttctagctcttgccactaaaaatcaggatattaagtaaaacaataataattataattttcaatgcaaactcaaataataatgcatttaactaccctcctcttttagtctcccttaatcttaacgtagacaaggcagatgccatacaggctggattttgatttggagcctgattctgccaaataataataataataaattaaaggatggtttccgagaattagtaacagttatggaagccactgcaaggggccaaattaggtgattaagaacaaggcygagcacggtggctcatgcctgtaatcccaacactttggaaggccgaggcaggc

SEQ ID NO: 76923 - DNA, 564 bp, Homo sapiens
tcagctcattgcaacctctgcctcctaagttcaagggattctcctgcctcaggctcctgagtagctgggattacaggcacccaccaccaygcccgcctaatttttatatttttagtagagacagggttttgctatgttggccaggctggtcttgaactcctgacctcaggtgatctgcctgccttggcctcccaaagtgctgggattacaggtgtgagccaccttgcccagccccaagacactattgatgtgatatttgaaggcactgaacttgaaactctagggaagaactcaaaccagctcatctgagcatgtatgtgcatacagagaatttgatcaaggaaggtaatgcaaaactgagctgtcacaaactatcacagtacgtggtttctaaaatttatttctatggtggcctttgaagcacaaaccttaggaattttcaagcccagacttttatcagcatggctcacttctgagaggaactggctgagctgagaagtagccataggctaccagccctgagtgtggtgtctctggaattctggtgatatgaatcccacatga

SEQ ID NO: 76924 - DNA, 575 bp, Homo sapiens
ccgccacaggtcctgtgaggaaggagcagccccrtccacacccgcccgccaggacacagggaagcgtggcagcaagaacaagaggcacatcttgctgttccctgcacacctgaaagagacccccaagtatgaaggggctcagagagaacaaagatccacaacggtttctgtaacagactgggctgggcgggaacctgcaagctctgacgtgacacctgagtcctctcctataagggacagtcggccagagctcctaggctgggggctgcacactcctatccgggccatcctgaacatcatttctttgggaagaaatctgtaagccaattctctccccagcatcatctccagttcatgaggatgctggggagagaaaaaggccctgccaagaggaacccagaggacactcaggccacacagccttccctcccttcctcctggtcacacgcacgcatggatcgtgacatcccctctttggccatgaaaaccagaattcatgtggaaatctgattaggtaaacaagtaacacaggagaaatgcccagactttcagtgatggagccactaagctaggag

SEQ ID NO: 76925 - DNA, 679 bp, Homo sapiens
ttgtcgttacgttgggcctatctggataatccaggcttctctccccatctcaagatgcttgacttaatcacatctgcaaagttccttttgccacatagagtagcatattcaccagttctggagattaggatatggacatctttcaggggctactaccaagtctaataggcaggccactggacccctaagccttggtttcatcaagcaagtagggaagaaaaacaatgcccacccctagactctttaatgggtckaactcaatggtgccctggaatgtcaatggctaggaatggaggccgagctatgagtatcaggcctcattccctagccaagtcaaagagatgtgtctgggaggtggtagagtgagggagtggggcttggacttaattgttttactggacatggcttcttcaggtgtactgggggagtggtttgcacaaacactgccaggttggtcataagtctgtccccctggctcattgccatgctggctttggctccattgcctctggtctcttcatcccccaccccacatacctatcttcctgtgctgtcattccaaagcacacatataaccacgtctctcccttttgtggctccccctcatccttgggtggaggttcaagctctttaccttgagttacacagtctctgccattccccacaagcgccagacaga

SEQ ID NO: 76926 - DNA, 1087 bp, Homo sapiens
catgcccttggacccacggggccaatatcattgctgtccactgaaatagcagtaatagttttactgcacttgagtgatgtgaccagtgctttgctaactcactttatgtaatttatatatatatatataaattagaaattatctgacacaattatggaggctgagaactcccacaatctgatatctacatgctggagacccaggaaagcagatgatgtagttctagtctgagttcaaaggcctgagagccaggagggccagtgttgtaagttccattcagaatgtaggagaagactgaggtccagcttggaaacaggcagaaagtaaattcttccttactcttccttttcatcctgttcaagcttcctcaggttggatggtgaccatgtcactggggacagcaatctgcttcactttgcctgctgattcaaatgttaatctcatccagaaacaccctcatcgacatagccagaataatatttgactaaatatctgaataccccataatacagtcaagttgacacacaaaattaacaatcacaaagaataaacgggatgatagaggaaattttatcttcgtagaaccaggcatgggaaagcagtgcagcaggacctgcaccctgcatcttagtctgaaagccatgctccctccccccatgctgcattgcctgatctcagacaaggcttcaatgcagtgctttgagtgggaactgcaggttatcagggttggcatccaggataaattatgtcgtccacctctgaaccttatgattgccaattctgtatttacaaaaacaaaatagtattgccctggggaaaaggaaaatgtaagggtggctggtaaagaaaggtcagataatgatagactgtaaacaacacacagaagaatttggactgacggctgcagartatggtgaccaacttgtcctggtttgcttaagactctcagttttaaaagtgaaagtcctgtgtccttgaaactccctcaggtccaggcaaacaaattgggcaccttacaatacagaagtgatgctcaaattgtctcttgtgaaaactgatttttgtttcctaacccactgaagactaa

SEQ ID NO: 76927 - DNA, 702 bp, Homo sapiens
caggatcaaggtgatcacagccaagcacaataaaaccacagcccagattctgatccacttcccccaggcagaggaacttggaggtgatccccaagtctgtgacaccagaatgcattgctgagaactttaaggtctttgactttgaactaagcagccaggatatgaccaccttactcagctacaacaggaactggagggtctgtgccttggtgagctgttcctcccacaaggactaccccttccatgaagttttgaagctgcgggtgcctgctcatccccaagtgacatatacctgtgtttccaatctcatttttttcttgcaaatgtagtatggcctggcctgtgtcactgagcagttggacagcaacctgtagagtggccagyaagggcttgtctaggttgatgttggatctgaagagcagtgtcagtagagtagaagtctcttctagtttgctttgttctttttgccccactggggaaagtataacctgaatacccttttctgaccaaagggaagcaaaatataccaggtcaaaatagtgccactaacagttaaggtttttttttttttttttttttttgagacggagtctcgttctgttgcccaggctggagggcagtggtgcaatcttggctcactgcaagctctgcctcccaggttcatgccattctcctgcctcagcctcctgagtagctaggact

SEQ ID NO: 76928 - DNA, 731 bp, Homo sapiens
cttgtaataacttcctcatttgtaaaatgaaagtaatcatggtaacttccttctaagttcttgagattatcaaatgagataacacctgtccagagctcagaactgtgcctggtgcataacaagtgctcagactgtccgaggctggatccgctgtgtgctgagccacagcagcctcaagctgtctgtgaaagggatggtgagtcccagagtgggctggggccaagtggacaccagcaccctctatggcagcggggagagggctttcaacaatktgaaatagcaccaagctgtggaagtcacgatactgcaagttatggagaaaatacattagaccagtggttctcaaacttgtgcatggaaattggcatttctaatgagttgtcaggtaatatcaatactgctggtctggggatcactttgttagacgaggtcaaagaaaacaagactctgagggaaaatcatttgaggttggtgtcttttttaaatataaaatttattttattaaaaattgttactatggaagatgcaagaggacataaaagtagagaggaatatactgagccctcatgcacccatcactcagcttcaacatgtgctaattcatgtcccatcttgtgtccactggtgctttttgaatgtgctccctctctctccccacaaccaacagcacaggccccggccccacctcaggcctgctcccagggctcagaaagaggcacattgctggggtc

SEQ ID NO: 76929 - DNA, 1064 bp, Homo sapiens
  misc_feature (1)...(1064): n = A,T,C or G
tggggtaatgcctgcgcacttgcacatgcagggatggtgttgatgccagaagggttgtgcagccaggaaaggttttttttttttgtttttttttgttttttcctctctctagactgggttgggaggcagataggcccrgggtctcacagtgcattgcacattgtgatatcagtgcaatctcctaagattctcagagcaatgcggngctaggtcttcctttaaagagggctttggccccaaaggggtcctggtactggtatgttataggagcctcatggggaagggtagaaggaagctcacaattgatgcacttcaaatttcccctttacaaaaatttctgtttactagcccactgatcacaccagaaccctttgttcaagatctctctttccatgactagatacaaccccacaaatttatcatcatctttatatttaattaaattgttgtctcctatttaatattttcaattaagctcctaaaaccagatcttacttatagatctaagttttcccttgtaggttctttcaaagacttttttttttatcactattaatcccctataataaataacatcaactccaataatgctacaccagatactttccccgactcctgtctccctgcacatttattattgactcaatttatgttcctttaaatcagtttcagtctgggtggcaatactctcatttactgactgatcaatttgaatttgttttataagattccattaattactctgtccgattctcttgcagtgcctggaaacagtgcatctcttagaattccctgtaggccctgtggctgtatattttcatggaaatggtctttaggttagggctagtgagtcctcagatgctcatattgtcaagtgttttcagtcttattctcagcaaggaacagagggctgaattgctctgtggtctggctctttctgacatcatagtcctgtaggtatgaccccttccccagtgaatcccctggatgttttgcagggaagaggaagtaaagtttgagagggggtggtcaatctgtatatggtggatatttggcggctcatg

SEQ ID NO: 76930 - DNA, 1064 bp, Homo sapiens
  misc_feature (1)...(1064): n = A,T,C or G
tggggtaatgcctgcgcacttgcacatgcagggatggtgttgatgccagaagggttgtgcagccaggaaaggttttttttttttgtttttttttgttttttcctctctctagactgggttgggaggcagataggcccggggtctcacagtgcattgcacattgtgatatcagtgcaatctcctaagattctcagagcaatgcrgngctaggtcttcctttaaagagggctttggccccaaaggggtcctggtactggtatgttataggagcctcatggggaagggtagaaggaagctcacaattgatgcacttcaaatttcccctttacaaaaatttctgtttactagcccactgatcacaccagaaccctttgttcaagatctctctttccatgactagatacaaccccacaaatttatcatcatctttatatttaattaaattgttgtctcctatttaatattttcaattaagctcctaaaaccagatcttacttatagatctaagttttcccttgtaggttctttcaaagacttttttttttatcactattaatcccctataataaataacatcaactccaataatgctacaccagatactttccccgactcctgtctccctgcacatttattattgactcaatttatgttcctttaaatcagtttcagtctgggtggcaatactctcatttactgactgatcaatttgaatttgttttataagattccattaattactctgtccgattctcttgcagtgcctggaaacagtgcatctcttagaattccctgtaggccctgtggctgtatattttcatggaaatggtctttaggttagggctagtgagtcctcagatgctcatattgtcaagtgttttcagtcttattctcagcaaggaacagagggctgaattgctctgtggtctggctctttctgacatcatagtcctgtaggtatgaccccttccccagtgaatcccctggatgttttgcagggaagaggaagtaaagtttgagagggggtggtcaatctgtatatggtggatatttggcggctcatg

SEQ ID NO: 76931 - DNA, 1064 bp, Homo sapiens
  misc_feature (1)...(1064): n = A,T,C or G
tggggtaatgcctgcgcacttgcacatgcagggatggtgttgatgccagaagggttgtgcagccaggaaaggttttttttttttgtttttttttgttttttcctctctctagactgggttgggaggcagataggcccggggtctcacagtgcattgcacattgtgatatcagtgcaatctcctaagattctcagagcaatgcggngctaggtcttcctttaaagagggctttggccccaaaggggtcctggtactggtatgttataggagcctcatggggaagggtagaaggaagctcacaaytgatgcacttcaaatttcccctttacaaaaatttctgtttactagcccactgatcacaccagaaccctttgttcaagatctctctttccatgactagatacaaccccacaaatttatcatcatctttatatttaattaaattgttgtctcctatttaatattttcaattaagctcctaaaaccagatcttacttatagatctaagttttcccttgtaggttctttcaaagacttttttttttatcactattaatcccctataataaataacatcaactccaataatgctacaccagatactttccccgactcctgtctccctgcacatttattattgactcaatttatgttcctttaaatcagtttcagtctgggtggcaatactctcatttactgactgatcaatttgaatttgttttataagattccattaattactctgtccgattctcttgcagtgcctggaaacagtgcatctcttagaattccctgtaggccctgtggctgtatattttcatggaaatggtctttaggttagggctagtgagtcctcagatgctcatattgtcaagtgttttcagtcttattctcagcaaggaacagagggctgaattgctctgtggtctggctctttctgacatcatagtcctgtaggtatgaccccttccccagtgaatcccctggatgttttgcagggaagaggaagtaaagtttgagagggggtggtcaatctgtatatggtggatatttggcggctcatg

SEQ ID NO: 76932 - DNA, 1533 bp, Homo sapiens
ccaacattgcaaaaccctgtctctaccaaaaaatgacaaaaattacttgagcgtggtggcaggctcctgtagtcacagctatttgggaggctgaggtgagagaattgcttgaactcaggaggcagaggttgcagtgagccgagctcatgccactgtactccagcctgggtgacagaacaagaccctgtctcaaataataataataataataataataaataaggtcctttacattatttacaaaccatagtttgtgaagctctgtttttggactccaccattgatgtgactcaattgccttctggaagtccttcaattctcatcttgctacctgctgacatctgtattcagctacgtacatttttttctgtctcatagtttttttttcttttctcctagtttaggcttcctcatcattttggctatggcacagaaaagaggccacaagaagtcatcataagccgaagagaaagcactgtgttagatgctttatgaaaatgagagagagagagggagagagagagaaaatgaggccaacaggagattcaagagctggggactacagaggaatcatttcatacacaagctggagataactgtgttgtgcccaamcatcactaaacaccttttattgttttggtgaacaaaaccacacctatatgaaatcaatggctcaatgctcatcattagaagagatcaccagggtctccaagccagaagctaaccccagccccaggagctaacccttggtggaagaagacctttgtcatgaggatccagatgctggggaggtttccatgaaggctgagacttcagctgcagaggagagcatccagtggccagggaccctgacatttgtggaagccaaaatgatggtctcagccatttgccttgccatcctggtgcttggtggggaagtgggtggaggagtctctgaggttcctgtcttgtgcagaaacccttcttcccacttttgctcctgatggaacagcacccagattatctcagttccctgtgatcaacttggtgcacctgtcaaataaggcaccacagcagggacaacacacgagtctactctgactcgccactgcaaattcaaagcttttaaaaaatagcttcattgagctacagtttatgtaccataaagttcacttgttttaaacaggcaattcaatgatttttagtaaatttatggcactgtacaaccgtcaccacaatctaatcttagaatatttctctcaccccaaaaagtagctttgtgtccatttgcaggtactgcctatgctcaaggcaaccactaatctactttctgtctctacagatttgtcttttctgggcatttcatgtagatggaatcgtacaatatacataatgtcttaaaattccatccatattatagtatgttgatccatacttcattcctctttgttgcaaaatagtaatctattgtatggatataccacattctgtttctacattcaccaggtgacgggcatttggattgctttcaccttgtggcgatcatgaataata

SEQ ID NO: 76933 - DNA, 1533 bp, Homo sapiens
ccaacattgcaaaaccctgtctctaccaaaaaatgacaaaaattacttgagcgtggtggcaggctcctgtagtcacagctatttgggaggctgaggtgagagaattgcttgaactcaggaggcagaggttgcagtgagccgagctcatgccactgtactccagcctgggtgacagaacaagaccctgtctcaaataataataataataataataataaataaggtcctttacattatttacaaaccatagtttgtgaagctctgtttttggactccaccattgatgtgactcaattgccttctggaagtccttcaattctcatcttgctacctgctgacatctgtattcagctacgtacatttttttctgtctcatagtttttttttcttttctcctagtttaggcttcctcatcattttggctatggcacagaaaagaggccacaagaagtcatcataagccgaagagaaagcactgtgttagatgctttatgaaaatgagagagagagagggagagagagagaaaatgaggccaacaggagattcaagagctggggactacagaggaatcatttcatacacaagctggagataactgtgttgtgcccaaccatcactaaacaccttttattgttttggtgaacaaaaccacacctatatgaaatcaatggctcaatgctcatcattagaagagatcaccagggtctccaagccagaagctaaccccagccccaggagctaacccttggtggaagaagacctttgtcatgaggatccagatgctggggaggtttccatgaaggctgagacttcagctgcagaggagagcatccagtggccagggaccctgacatttgtggaagccaaaatgatggtctcagccatttgccttgycatcctggtgcttggtggggaagtgggtggaggagtctctgaggttcctgtcttgtgcagaaacccttcttcccacttttgctcctgatggaacagcacccagattatctcagttccctgtgatcaacttggtgcacctgtcaaataaggcaccacagcagggacaacacacgagtctactctgactcgccactgcaaattcaaagcttttaaaaaatagcttcattgagctacagtttatgtaccataaagttcacttgttttaaacaggcaattcaatgatttttagtaaatttatggcactgtacaaccgtcaccacaatctaatcttagaatatttctctcaccccaaaaagtagctttgtgtccatttgcaggtactgcctatgctcaaggcaaccactaatctactttctgtctctacagatttgtcttttctgggcatttcatgtagatggaatcgtacaatatacataatgtcttaaaattccatccatattatagtatgttgatccatacttcattcctctttgttgcaaaatagtaatctattgtatggatataccacattctgtttctacattcaccaggtgacgggcatttggattgctttcaccttgtggcgatcatgaataata

SEQ ID NO: 76934 - DNA, 2329 bp, Homo sapiens
cttgctgagtatcagaaaatgtgtgttctaatgtgtattgagaatttctccatgatgcatttttcctggtgaccaaagttggtacaatgaaagcacagagagctgtgtgatctggagtgagctgcttgacctctctgagctatagcttgtaggaccattgtgggtcttgtagatgaagtgagcaccagcatggttgactacctttcccagcattgtcattgtgctaargtttactgaaagaaaatgaaataaaatagtactctcccagtattttgctctgggggaaggcccttcagactctgcatggaggagggagttttctgcatcatggtgcagaaaacaaacttccatgctagatgtatttagtgcaagtcatattgtacatgctgtgtgcagtcaggcaagttatcccatctctttgggcctcagtttctccgtccctaaaatggtgtcaatgatattgctttactccatagagtgtttgtgaggctcacatgagactacaaacaaagcactaagcaccgttgctggtactcaagaagcacccattagcattcactgtgtttgtagttgcagttacttgcgtctttgtgacctttccctgagttgggagcagcccttcttaccactgctgatgtggagctgacttggggatgagtcaagcttatgtccgctgtggacagtggaggatcaggataaaataagcaaagcttcaaggcccagagcaacacccacttcccctgcaaggcttctgactgtgggatcctggctactgcccctggctagaagactcttggccagtacctcagcctgctgaccctagcccaggtcagaagtgtgcttggtcacctgagctctccagcccctcccggcccagaaaaacaggtgtgcatgctcagtaacttgagcctaccttctgaaggcctgggaaattgagagaggacagataactctttctctggacaaccacaaggccaataaacaagtcttcagggagaccatggccagctgtaggttgtgcagggccggctgtcagtttgggggattatctaggacttttgcttttcatagcagcagcagcagccgccaccaccatttgttgatcacccagtgccaggtactgtgccaggttctttccatgctctttcccacttcttcccttgtgcagccctgtgaggagaggagttgcttacagcacagacatcggagtcagacagaccagggcttggaccccagccctgccacaggctgattgacttggagcaagtcagtgtttgagaattagaagaggaaatgtaggtaacattggtagcccagagcctggcatggagtaggccctaaacacgtggcagacaaattctgggagaggtgcccccactttatacaggagggcactgaagcccatttggccagacccaaaagtggatctgacgagctcctgttctcatcctttgtgtacacgacatcaccttgggttgtgttcccagccctggtaactgttctgatggagagactagacagaggggaattcctgggttcagtagttaaagttagagtttctccatacattttccagagaatcacataaatcaccagccagaagaaggtgaaaagcaccagctaagaaaagggtggcatcatctgtggcttcttattgcccaagctcttctgtccccaaaccaggacattcttcagaaagggataaagatgggcacacagagatgaaaccgcaagttgttttgttccaaccactgactataacccatacacacagagctaccagccacatgtttatgcccagactctagaacaaaaggcaaaggataaaaacacataagaatcccatacaaggggtgagatgggcatccccagagagaaggcttcagtatgtttgtgttcacgttgcacttacctggatgctacgggtcaacagagtgctgcccaaagctctgcaaggggtctaggtggtcagagttcccccaaagtcttaattattttcatcattgcttcatctcaacgtagtttaaattggtataaatacacttatgaataagatgtttggcatgaagatatgcattttctccacacaaacaattttatacatgatgtttaggttataagtttaatccataaagctctgtttaaaccataaattcagaaatactgtcttttaatgaaaaaaatatttatgttagaacatatgaaacacgtgcagcctaactaaacacactataatgtctacccagcatccatgtaatccttcttccttcctccaatcaggccatgtgaccctagggaccctggattctccctagccccagcgaggatc

SEQ ID NO: 76935 - DNA, 2329 bp, Homo sapiens
cttgctgagtatcagaaaatgtgtgttctaatgtgtattgagaatttctccatgatgcatttttcctggtgaccaaagttggtacaatgaaagcacagagagctgtgtgatctggagtgagctgcttgacctctctgagctatagcttgtaggaccattgtgggtcttgtagatgaagtgagcaccagcatggttgactacctttcccagcattgtcattgtgctaaagtttactgaaagaaaatgaaataaaatagtactctcccagtattttgctctgggggaaggcccttcagactctgcatggaggagggagttttctgcatcatggtgcagaaaacaaacttccatgctagatgtatttagtgcaagtcatattgtacatgctgtgtgcagtcaggcaagttatcccatctctttgggcctcagtttctccgtccctaaaatggtgtcaatgatattgctttactccatagagtgtttgtgaggctcacatgagactacaaacaaagcactaagcaccgttkctggtactcaagaagcacccattagcattcactgtgtttgtagttgcagttacttgcgtctttgtgacctttccctgagttgggagcagcccttcttaccactgctgatgtggagctgacttggggatgagtcaagcttatgtccgctgtggacagtggaggatcaggataaaataagcaaagcttcaaggcccagagcaacacccacttcccctgcaaggcttctgactgtgggatcctggctactgcccctggctagaagactcttggccagtacctcagcctgctgaccctagcccaggtcagaagtgtgcttggtcacctgagctctccagcccctcccggcccagaaaaacaggtgtgcatgctcagtaacttgagcctaccttctgaaggcctgggaaattgagagaggacagataactctttctctggacaaccacaaggccaataaacaagtcttcagggagaccatggccagctgtaggttgtgcagggccggctgtcagtttgggggattatctaggacttttgcttttcatagcagcagcagcagccgccaccaccatttgttgatcacccagtgccaggtactgtgccaggttctttccatgctctttcccacttcttcccttgtgcagccctgtgaggagaggagttgcttacagcacagacatcggagtcagacagaccagggcttggaccccagccctgccacaggctgattgacttggagcaagtcagtgtttgagaattagaagaggaaatgtaggtaacattggtagcccagagcctggcatggagtaggccctaaacacgtggcagacaaattctgggagaggtgcccccactttatacaggagggcactgaagcccatttggccagacccaaaagtggatctgacgagctcctgttctcatcctttgtgtacacgacatcaccttgggttgtgttcccagccctggtaactgttctgatggagagactagacagaggggaattcctgggttcagtagttaaagttagagtttctccatacattttccagagaatcacataaatcaccagccagaagaaggtgaaaagcaccagctaagaaaagggtggcatcatctgtggcttcttattgcccaagctcttctgtccccaaaccaggacattcttcagaaagggataaagatgggcacacagagatgaaaccgcaagttgttttgttccaaccactgactataacccatacacacagagctaccagccacatgtttatgcccagactctagaacaaaaggcaaaggataaaaacacataagaatcccatacaaggggtgagatgggcatccccagagagaaggcttcagtatgtttgtgttcacgttgcacttacctggatgctacgggtcaacagagtgctgcccaaagctctgcaaggggtctaggtggtcagagttcccccaaagtcttaattattttcatcattgcttcatctcaacgtagtttaaattggtataaatacacttatgaataagatgtttggcatgaagatatgcattttctccacacaaacaattttatacatgatgtttaggttataagtttaatccataaagctctgtttaaaccataaattcagaaatactgtcttttaatgaaaaaaatatttatgttagaacatatgaaacacgtgcagcctaactaaacacactataatgtctacccagcatccatgtaatccttcttccttcctccaatcaggccatgtgaccctagggaccctggattctccctagccccagcgaggatc

SEQ ID NO: 76936 - DNA, 2257 bp, Homo sapiens
ttgcttttaccttttttgtctgaatagtcatgctttctggaggaccttatagtctaaactcaatgaaaatataaatactaatatagcctaatcagaatcaattgcaacctcataatcaattttgaataatttcactgttgaaaatagcataattgatagcccaggtggcccctccactcctttctctcatcaagctgtttgcttactttgtactagcttcagtatgactaaacagcaattcaccagaataaataaaaattacagagaagtaagtagtgtttcaataaaacaaatattataaagagcctttaaaataagggcacagcttttattccaattataacactagtgcatgttattgtaagtaatttaaacaatagctaaatacatttgtaaatacaatatctattcaacagcttggaaaccctctctctctctctctctctctctctctctctctctctctmtctatatatatatatatatatatatatgaatatatatgtgtatatatatatctatatatgtatacatatatacatatatacacacacacgcagatataagaaaatacattatagtgatgaaaattaattataaaaatgatagatgatcatcaaaaaagaagtttgaaaaactgggcctctttctacactctgacccatttttctgaaactctgaatggcagctgccattttgacatgtttttcattttcttttggcaacaaaacatcaattttgttggccttaatatttttatttcttggcaggtgcccatcaaaacctccccccaaaatttcctacaacatctctaactgctttaagcttgtcgagacatttctgcttagtctagctttctttgaaattccattttgataacccatctcattaaaaagtactacagaggcctcatgtttatttatgatttaaacatggctcatgaagccatcattcaaatctctgaatgcactttctaatatattttataacaaataaatatccatatgcttttttatattctgataatgtttccatgtgctcagccatctatatttaatgaaaagctattttttttttcctggcaaatttcaaacatctatggagctaactaatgtgcaggcacggacttcctgtgtgaccttggacaatcttgttacatctccgtagattatttaaatctatggaatggaacattgtaatgaagatcacttttcaaaaatattgtaataattagaaactgtgaagtggttcagatttattagcctaagtttttaccatttagagatgtcaatcatgcataggaggtacattaacccttttaagccataaggtaatcactcaacaggtacttcaggctctttctgaagcaggacatatccttcctaatgtctcttctgctcttgccttccccagcttcctgcagctgtatgggtaaagtcatacccttgaggcagggaagcccttagacagctgctctcccaacaggtgggtttgctttgggtctctcttcctgttgggctgctctgagagatacttctgagcaaaccacagagttcctgcatttttgcctgagtcattcttgctgagttgaccttctctccattcacagccaataataattaaacaccgttttttctggaattgcactttatggatcagctgggatgaaagcatcttccttccttctttccccatcctctgcgataattttgttctaacaaaggaatgctagcaccaaaatttccagtcctgaaaccctttctctttccaatgtcctctgtaagctcgagttgtgggcatctactttgcccatattccaaggtcttgcttaggtaacctctgtagtcctttcttgagcctaggacttctacttttcttaccagttaccctctttcaggaccaaagctcaactcctcaaggccataactaggccctctcctctcaaactgatttatcaggtgcccgaatcttcctgaatgtctgggattcaacttttcagcagtcttcctccctacgttccatctaattctaagatgaaaccttctgattctttgttgtcctctgatccctacatgaacctgaggctgctgttccctgaagtcttgttctgtcagcatccagggctgcttcataaaacctgtcactctgctaatggttagcggctgaacaaagagtcctctggccaaattaagtttagaaaaactctgataaaaatattatttggggtttcttttcgcaggacttacctaagctttta

SEQ ID NO: 76937 - DNA, 963 bp, Homo sapiens
tgcaaaggtggctagaaaaagaaatacttggccaagagaagtgaaagttatattattggtttaaccaatattttatccttcaggactggacacatcaataccctgaatgacatcaagattctgttaacagtgagaaaggggaaatgggccaccaagtgagcagctaattatattggacaaagctacaatatctacttttgcttctgctatagctaacctctctgacctccatcttcactctctggcttttctttctcagagtgccctctaatgaacagctatttctcctactgacactttgagaattaaacccaaggatctccattaaaacaacatttgttcctcaatgaccaggattgaggtaaaagaagaggaatagaaagcaaaagagggagctgactcagactcagagctagacccagtagcaggcgcattgttcattatagctcctccatgggccaggcactgtgctatgcactggggagtcaatggtgtgcaagttaggcaaagttttctctttcatggactacatgttccaatgcaagagatagttaatacactcataaatagaatatgaagtcaacactgagaagcatcatgaaaaaaaaaacagggcaagagttagaggtgatgcgaaaggttttctgaaaaaaattgagcactgaccttttgtgtgagaactgtgtaactatctgggagacaggacgtagraaggcctcaaggtgggagggtggctatgacagagaatacctagaatgcagatatggccagggtgaacaagggttacaaatgaagttagagatatagccagtgaccagggaatgcaggatttagttggccttgagattttattttttcatgttgtggaagtcactagacttgaacaggaaggtgacattatctgctttctattctaaaagactcactgcagcagctataaataagagtatacctattattata

SEQ ID NO: 76938 - DNA, 963 bp, Homo sapiens
tgcaaaggtggctagaaaaagaaatacttggccaagagaagtgaaagttatattattggtttaaccaatattttatccttcaggactggacacatcaataccctgaatgacatcaagattctgttaacagtgagaaaggggaaatgggccaccaagtgagcagctaattatattggacaaagctacaatatctacttttgcttctgctatagctaacctctctgacctccatcttcactctctggcttttctttctcagagtgccctctaatgaacagctatttctcctactgacactttgagaattaaacccaaggatctccattaaaacaacatttgttcctcaatgaccaggattgaggtaaaagaagaggaatagaaagcaaaagagggagctgactcagactcagagctagacccagtagcaggcgcattgttcattatagctcctccatgggccaggcactgtgctatgcactggggagtcaatggtgtgcaagttaggcaaagttttctctttcatggactacatgttccaatgcaagagatagttaatacactcataaatagaatatgaagtcaacactgagaagcatcatgaaaaaaaaaacagggcaagagttagaggtgatgcgaaaggttttctgaaaaaaattgagcactgaccttttgtgtgagaactgtgtaactatctgggagacaggacgtaggaaggcctcaaggtgggagggtggctatgacagagaatacctagaatgcagatatggccagggtgaacaagggttacaaatgaagttagagatatagccagtgaccagggaatgcaggatttagttggccttgagattttattttttcatgttgtggaagtcactagacttgaacaggaaggtgacattatctgctttctattctaaaagactcactgcagcagctataaataagagtatasctattattata

SEQ ID NO: 76939 - DNA, 689 bp, Homo sapiens
gcttcagataagaagggtagagtatgtggcattcctgccggggactactttatttcttatttcccttcccttaagcttagtatccaaagtggttctaccagggtggggtggggcacagatactagaagcttagccataactgggaaaaaatatttgcaaatcatggtatgcaaaggatttgtattcaaaatatgtaaygaatacttacaatcaaataataagaaagcaagcaacccaatttaaaaacaggtaaaaatttgaattagatgttttaccaaggagatatacaaatggctaatatgcgcatgataaggtgctcagcatcattagtcattagggaaatgaagttttaagccacaataagatatcattacacacctgctaggatggctataatcaaaatggcaaaaatcaaggcaatcctaagcaaaaagaacaaagcaggaggcatcgtgctgcctgacttcaaactgtactgcagggctacagtaactaaaacagcatggtactggtacaagaacagacacaccgaccaatgaaacagaatagagagctcagaaattagactgcacacctacaactgtctgatatttgacaaacctgacaaaacaagcaatggggaaaggatgccctattcaataaaaatggtactgggataactggctagccatatgcagaaaactgaaact

SEQ ID NO: 76940 - DNA, 561 bp, Homo sapiens
ccccgtcttagtgtcacccaaaccttctgaaaggaatgaaggacaaatggtagactgacaagctgtggcattgctgttttccagccaatggccttctcagcctccttatgcaatggctgccatttccatttgtacaggactggctttgcttcctaggcaggctctctagtgtttccttgtaacactcaatttgcagcttgtgaataccaggtaggagctagttaatccagctgatgttaaccgggtaactaattagaagagccctatcctttgccaagtgctcctacccacactacatatatacaccccaattcttcactttcctgtaatggtatcatatattcttactgtcactatggcctcatgttgggcaaagaatacttccctaaccattgactctgggctrgactgtgtgacttgctttggtgaatgggatgttagcagacttggtgcaaacacaggatggcaatgtgcatgaatggttggttttgactccctgtgcttttgccatcaccataggaaaaacacactccggatggcccactggtccaaggaggatga

SEQ ID NO: 76941 - DNA, 1106 bp, Homo sapiens
gttgctatatcccacatcagccaaacaccatggattcccaatcagctcacatcctctttcaatcaggataggctacgttatgttgcagtaacaaaaagccttcaaatcccagtagccaagcaagtgcttatttcccactcacactatattaagtcacaggacatctgtgggaaaagagggtcctttgctctatgttttcttcatttgggaccttgactgaggaaacgtctctgtccttctgcaattataaattatattcattttcatcagcatcattatttatatctataatataaaaatgaactgcactttcagtcaaaagactttaccttagtcctggcttcaccactcaataactatgtaattttgtgycaatcactttccctgcctgggcctctgtttccttgtaaaatgaggggataaggtcacaaataatctctaaggccacttaaatttcaaaaattctatgtttcttctacactggaaaggatagggaactaatgtttattgagtatcctcataagtactctgtaaagcataaagattctcactatatggattagaaaacagaggcttagagaaattagtaacttgctcaagatcacacagataataagtaacaggtgtgggatttgaacccatgactgtcatacttcaaaggatttttctttttgttgcatttcattccatacatgatctgacattacacatacagagaaggaggatgaagaaacgggtgcaatgaaatgagtgaaacacctcgcctcaggggctagccttgatgggtaagtgacccatggtatttttatttctttgtataattcaattcaatttaacttagtaacaacagtatttaatacttattaactgccagctcctggatgaaatgctggatacacaaacactaattatgcctgagaaagtaggaagcacacatatccgttagggaaatacaaactactctgcatatttcaagagggaggaatttatctcaagaaattcaaaactcataaaactggtgggagagctggggaagcaatgggaatggaaagccgatgctggctttcaggaaatcagcaagtggggaaaaaaaagaaaaacatcaa

SEQ ID NO: 76942 - DNA, 752 bp, Homo sapiens
cagctcttgtctgtgctctgggagttagcaggcccagcacacggagctatttatgctgatgggtggtcagatgtcctcactccatgcttttccagcaaagacacctcctcccttaccatggggtcctaggtcctctgggtaatagaagcaagttccacagaacagacattgcccactgcccagatctgcccagtccccttggaatctgaaacctcagatgtgagttggctttccattaggattcagcatcaggtatactctcattttcaatgcctttttttgtgttgygggaagtcagggaacccgaacagaaggacctgctgaagctgtgacagaagaatataaattgtgaagatttcatggacatttgttatttctccaaattaataattttataatttcttacacctgtctttactacaatctctgaacataaattgtgaagatttcatggacatttatcacttccccagtcaaaactcttataatttcctatgcctgtctttactttaatctcctaatccgtcattataatttcctacacctgtctttactttaatctcttaatccgtcatcttcataagctgaggatgtatgtcgcctcagaaccctgtgatgattgcattaactgcacaaattgttcataaagcatgtgtgtttgaacactatgaaatctgggcaccttggaaaaggaacaggataacagcgatgttcagggaacaagggagataaccattaggtctgactgcctg

SEQ ID NO: 76943 - DNA, 752 bp, Homo sapiens
cagctcttgtctgtgctctgggagttagcaggcccagcacacggagctatttatgctgatgggtggtcagatgtcctcactccatgcttttccagcaaagacacctcctcccttaccatggggtcctaggtcctctgggtaatagaagcaagttccacagaacagacattgcccactgcccagatctgcccagtccccttggaatctgaaacctcagatgtgagttggctttccattaggattcagcatcaggtatactctcattttcaatgcctttttttgtgttgtgggaagtcagggaacccgaacagaaggacctgctgaagctgtgacagaagaatataaattgtgaagatttcatggacatttgttatttctccaaattaataattttataatttcttacacctgtctttactacaatctctgaacataaattgtgaagatttcatggacatttatcacttccccagtcaaaactcttataatttcctatgcctgtctttactttaatctcctaatccgtcattataatttcctacacctgtctttactttaatctcttaatccgtcatcttcataagctgaggatgtatgtcgcctcagaaccctgtgatgattgcattaactgcacaaattgttcataaagcatgtgtgtttgaacactatgaaatctgggcaccttgraaaaggaacaggataacagcgatgttcagggaacaagggagataaccattaggtctgactgcctg

SEQ ID NO: 76944 - DNA, 752 bp, Homo sapiens
cagctcttgtctgtgctctgggagttagcaggcccagcacacggagctatttatgctgatgggtggtcagatgtcctcactccatgcttttccagcaaagacacctcctcccttaccatggggtcctaggtcctctgggtaatagaagcaagttccacagaacagacattgcccactgcccagatctgcccagtccccttggaatctgaaacctcagatgtgagttggctttccattaggattcagcatcaggtatactctcattttcaatgcctttttttgtgttgtgggaagtcagggaacccgaacagaaggacctgctgaagctgtgacagaagaatataaattgtgaagatttcatggacatttgttatttctccaaattaataattttataatttcttacacctgtctttactacaatctctgaacataaattgtgaagatttcatggacatttatcacttccccagtcaaaactcttataatttcctatgcctgtctttactttaatctcctaatccgtcattataatttcctacacctgtctttactttaatctcttaatccgtcatcttcataagctgaggatgtatgtcgcctcagaaccctgtgatgattgcattaactgcacaaattgttcataaagcatgtgtgtttgaacactatgaaatctgggcaccttggaaaargaacaggataacagcgatgttcagggaacaagggagataaccattaggtctgactgcctg

SEQ ID NO: 76945 - DNA, 668 bp, Homo sapiens
ccctggtgtagaatccctctcctatcagattaaaactgccatcttgcatttagattgatactgccaatcttagaaagtaaaattttggagccaattaatcctccaatataaatggrgagtgttcagcatgctagtgattctcattacgggaatttcaggaagtgtgaagaggtaaagtgtggaatctgaagtcctgggaaaaacaaagtattcaaggttttggatgcctttccagagttccagaagcttttagttatgctgtctgttcataaggccaaccttggaagaatgcacagccagtactgtcagcatcactcaagttgtactctcttgttatacttctgtggtgagctttgcattgaatgacaggttctttctggcaaagacattgtaaacttgagggaagaagtgtagctaatacatctttgtttttgcaatgttgtagctgtgcacagtgcctgactgttgtgggtgtttggtaaattgattctgataatagacaaggagagagaaatagagcaagagtgagagtgagagcgagagcgagagcgagagagagagaaaacagagagacggaatgacagaaacagaacagggatgggaaagatataagaaatgttaaaataggggccaggctcagtggctcatgatgtaatcttagcactttg

SEQ ID NO: 76946 - DNA, 791 bp, Homo sapiens
cctgtgttcctcctgctcctactataactcatgtctgatcctatctgctcatcaggatagactcaccttcaaggtcttcttccccagaccatggttctccttccctcctctgaaccttttatcactttagccttagcttgcttactgaattgtcattttttcacttagtagtcagttatttgcacatgcttgttatccctcctcccaagctgtgagtcctggaggacagaagccacatcttctgaaccccttagcacctagcaggactgggtaatgggtacatggaatggagatgggaacagaaaatacagaaggcagaatagcccaaatgtgttgtctctsaaattagtcacataagaatattctgagaatcatcttctaaggttttaatgatgtgtacgtggaatttaggacctagatgaaataaaggagagagctttacaaactggtcagtgaatagagactggggatacaggttgagagaaggatggcagtgagaaaggaatgcttatatccagtgagtattaaacatagttttctgatggaagaaggtgggatacccagagaggaaagaaaggtgaggagctaactcatagcattccagtgttcacacatcccagagatggtggtgcaggctggccagttcttcaaaggaggttgtcatttgaggtacatggtgcctttagtgaatgtgaccgagtctcgcactgccttcattgctcctctcattcttctcccctgggtgtgctttaggtaagtcagagagtggcccaagtggtgctctgtggaaa

SEQ ID NO: 76947 - DNA, 685 bp, Homo sapiens
aatttaatggcttctgtacaatatggaacaagtcattttaactctgagcctcagattcctaacttgcaaaattaactaatggatatagaattcagaactatagtgacagatcacaaagtttatattgattccagaaccaattgatatwcaatatttgaactgtagttcaagtgacaaagggccaaggtgaagttgggctaatgccagaagaggctgaagggatgaatactgaggagcatttctctgctaatgccatgactgtccagaatgtcccagtgttgatcagaaagtaatgtagataacagttataatttgaatttctgattgtgtcttattgctgtctatcctgctaaactgtgtgccccatgagggcagggatctttgtttgttcactgatataatttgtgcctttagcatggagcctgacacataataggggatcaataagaagcaccttgtacaaaagttaactcaagatggattaaagacttaaacataagacctaaaaccataaaaaccctagaagaaaacctaggcagtaccattcaggacataggcatgggcaaagacttcatgactaaaacaccaaaagtaatggcaacaaaagccaaaattgacaaatgggatctaattaaattaaagagcttctgaacagcaaaagaaaccatcatcaggtgaacaggca

SEQ ID NO: 76948 - DNA, 685 bp, Homo sapiens
aatttaatggcttctgtacaatatggaacaagtcattttaactctgagcctcagattcctaacttgcaaaattaactaatggatatagaattcagaactatagtgacagatcacaaagtttatattgattccagaaccaattgatattcaatatttgaactgtagttcaagtgacaaaggrccaaggtgaagttgggctaatgccagaagaggctgaagggatgaatactgaggagcatttctctgctaatgccatgactgtccagaatgtcccagtgttgatcagaaagtaatgtagataacagttataatttgaatttctgattgtgtcttattgctgtctatcctgctaaactgtgtgccccatgagggcagggatctttgtttgttcactgatataatttgtgcctttagcatggagcctgacacataataggggatcaataagaagcaccttgtacaaaagttaactcaagatggattaaagacttaaacataagacctaaaaccataaaaaccctagaagaaaacctaggcagtaccattcaggacataggcatgggcaaagacttcatgactaaaacaccaaaagtaatggcaacaaaagccaaaattgacaaatgggatctaattaaattaaagagcttctgaacagcaaaagaaaccatcatcaggtgaacaggca

SEQ ID NO: 76949 - DNA, 563 bp, Homo sapiens
  misc_feature (1)...(563): n = A,T,C or G
caagaaagtcttaagaggatgtcttactgcaccaatagctttcacttcattactgccctgcagttattttacattatttaatcccaaatcccatcttttggattctaccttcctcttgcattttaaatctttaatgggagcctctggcggtccatgggtacaatgattagatacctgcagagagaaactgaaaaattaatcrtggtttccattttatatttttgtattacactaaaaattacttacttgtagagctaacttctacactcctgcaatatgttccttaacattgcaaatgctgagaatgatttcagataaagcatgtccaaactgagccagtaaacagccttaagttattctttgagatttgtatgctgggttttcatccaaatttcatttcaaataattttaattaagacgcatttattgatagaggtttgttacatgtgggctaaaaccagggcaagagtacccaggctaatcataggaatgacgttaaaattgtttattatccttttatgaattttcctgcttanattaccgaatttcgcaactctatgcaa

SEQ ID NO: 76950 - DNA, 645 bp, Homo sapiens
tgcattgcagcacagtggtgctttgtgatcaactggcataggtgtgttgggtggacaatatcaagcagatgggaaattcagagaaaaatgtaggaaagacatctattttaactgggagaaaaataaaagagaagcaaattaatatatacagaaagggttatgtagctcttatagagaagtaaaaagaaagcaatcaaaactatggactgcattgcattgctctaaggattttaaagtgcagaattaaagttttggaaaactgcacagagtccattcccaggtgctcttgcaatgagagcactcctcatggtaatagcattacaagtctggagatgacttggggaagaatttgtgccatgaaaataaagagacaatgaaatttaaaattatatataaaaagtactgcattaaaatgtcaggtcagtgcaggtaataaagccgtagttgcttatccatatgayatcacctgttccactaattgatatttcttcctagaagcaaatctcaggagccaaaggtgcacaggtgccccatgtcactgggcctcgaataggaggaattactatagtatctacttatattgctcatccttcccttaccagcatcccaccgcttttggccaaagacttgggaagagtatagtaa

SEQ ID NO: 76951 - DNA, 967 bp, Homo sapiens
attgtaggcaaccagtgatgagttgactctcagtcagtaacgcttgttggggttatcagtgaggcatagtagttagaagctgaggctgtgggcacccagtgcaaatcccagctctgctacttattagctggttgttcttgattaaattacataagcattctctgccttaattcctcatctataaagtggggataataattgtatctacgtcatagaattgttgtgcagattaatccacataaagcatttaggacatgcctggcgtagactatttccctacattccatggaagaaagtgcttgggaaaccatttcttggtgtagtgaattcaaccaggccatgttcccaggtcactatttgcttatttggttggtgttttcaacaaagacttttaaaactctaggagagcttacctttctcatcttctttctccttcgtgtctttttctttttgtgaatgatgagaatgtggrtgagatctttccaatagacattttgctttcattcattttccactcatttcctctccacattttaccccaaaataaaagtgactcttttgaccttgactcacaatacattcacaaatatcaggggatcttctgcagctaccagctatggctctcaagtacttgcttgcctgatttcatgtgcgggggtggggagataaataaataagaaaatatttgtttttattgctatgattcttagagctcaaaacagcctgttttataaatcatctttcttttaaattttgatataataaatactattaaaagcagtacctggtattgacacatttaaaaattctcttcttagtaatttcaagctatatattcccattgcaattcttactttgaaagtatgggtttaattagaattacaataatcctgtaaacatgttgtgacatctttccctgtaggctaatcaagtaatactcatctgaaaggcgcaatgctataatgca

SEQ ID NO: 76952 - DNA, 576 bp, Homo sapiens
aaattaagttaaaccaaaggaattacttataataaattatcgtgtgaagcttattatttattcttgacttgcactaacaaatctttgaattttgggtctattttcattttcaccttgctaaaaaaaaacgatcctattggtcctagaaacttataatgatgaaagaaaatccttcttctccacaatctgaacttttttaaatctgaaaatgaggccagtgatagttgacgcataattgttttgagcgtttttaaaagttaacatttcttgatttctatttactatgaatgacattgttttcaacattttaaaacatatgaatggttctgaaagttgaagcatagaagcgtatttaaatcctgtacctgcctttccttgccagtaaaatgtccacaagactcctgtgaaaatggacttgttcgtgtattgctaaccagttaaaaatgcgaactctyagagttcacccaacccaccactgcctggccagaaactctgagggtggggctcagccctctgtggtttaacactctcctgatgtttccgatctcaatgaagtatgagaatccctgtgataag

SEQ ID NO: 76953 - DNA, 1442 bp, Homo sapiens
atatctactcctggagataattactgttaacagtgttctccctgacatttgctgtgatatgtgtatataatttatttttcttaagaaaaggctgttctgttcatggtctttggcaagttccctttttcttcaaatatctctccacattatgtccatagatgtagctcattctttcaaacaagttatacaatatgttttcatatgaatctaccaaaaattgtttcactagcctctctgtgtggatatctagggtaatttcattttcatgtgtgtgattataaaccatgctaaaataaaatgcgagtgttcacgtttttctaattctttacgtaaattttctgggtctcctggtatgcatatttcaagctttgctaaatatacccaagttcttgcatgaagaatgaaggcataattgcctctgctactccactgcctgttttccacacccatgataataatgagcattagcaagcattttaatatatggtgggctgatacacaatttcattgcttatgagcagaaaatagaacttttagtgtgttcaaaaagttcagagagatttactgtaaccacccccatctaatctatcattatgaacatgataaataccctcacatttacatgaaacagaaagctcttaaggaaagaaatgtacagactaattctgtacaaataaatctgaagatcacagatttattttgataattttaaatgttccaggatccatagtgatgaatgattttaacattttcatttcacataagtgtaataaaatctaaggtttcaagaatcctggctaatatcagaccactaattagtaaaaagtagagcccaatatctagtgtttctttagtcagaaatatctcgctcagatcataacactccactgaaactctaagttcacaatgaccttctggtcattaaaactactgatttgtttaaaattgttataaaaaccgggtagcatgtgacatatgatttatcgtctccttgacagtcatcttcccttagcttccctgattccacgctattcgatatctcttctgccacactgtctgctccttccttgtcttcctctgcccatccttaaaatgttkctccttctcaatgcagttttgacccctttctcactctaattacaatccctgaaagactgtttccaaaccagttcttcatatatgtttatatgttgatgtcccaaatctatattttaatctcagctttctctcaaggtctagagttgacactatgtcctgctcactttcacatcctatctctcctattgaattcatcagccgtctaccccaccacttgcttacccatccattcaccaaacttgctattcagggcgtctggaatgatctttctcaaatcaagttttctcttactaatatcctttgatggcctcctattgctcttaaaataaagtccaaagttattt

SEQ ID NO: 76954 - DNA, 733 bp, Homo sapiens
cttattgttctaaacctggcttacttaccctgtggatctagtcaaaactggactggaaaaaagcaatagctccattggagcccagaactatccaatggctatcagtagttgaccaacagttgatatttactgagtgcttattagaatctttattttttatttttgggggcagggtctcgctttgttgcccgggcttgagttcagaggcatgatcaagctcactgcagcctcgatctcctgggctcaagcaatcctcccacctcagcctcctaagtagctaggactacaggcatgccccactatgcccagctaattattatcattatttttaattttattagagacaatgtctccctatgttgcccaggctggtcttgaactcctgagttcaagcaatcttccggccttggcctctcaaagtgctgggattacaggtgtgagccactgcacctggctgcttattggaatctcaatgctgttctgggtcctttaataagcataaaagaaatacaaccaagtgaaagtgttcgcagaatggggtggctataatggtagttggaaaggacttgggaatagagctggattctcaaggatggttctacttttgagttgastatgttacctagatataatgactcatacatcacaaggcccattttgaggattatacaacttaacaaaggtacattttattaaaatattactgaatcacaagtattcaacaaatacctcc

SEQ ID NO: 76955 - DNA, 548 bp, Homo sapiens
aatcccctaatccacaagactggatattctaaaaatcaaggaaaattttaaaataaaaattggtgagcattagaggttaaaactgtcaacacaaaaatgtgaagacaaagatttataacagctttattttaattgccccaaattaggaacagctcaaatgtcctttagaaggtggataaactgcagtacatccatagagtggaatattgctcagcagtaaaaaggagtgaattactaatcgacacaatagtttggatgggtctcaagggaattattctgagtgaaagaagccaatctcaagwcattgcagactgtatgatcccatttatatcacatgtcaaaatgataaaactatcatgacaaagggcagattggtgactgctaggagatatgacaaagggaggggtgtcactgtaaaggggtcgtatgaggaagttaaaaaactggaactgttctgtagcctgatagtgatggtggttatataaatttatacaagtgttaaaattaataaaaccatacagcccctaaaaaagtcaaatttactgtat

SEQ ID NO: 76956 - DNA, 1031 bp, Homo sapiens
tataatgaaattttgcaatggtattgatgcagtatcactccaaaatactgcactttggaagtcagtaagtcttgaagatcacctgcagtacttttattctcaaagaagaagaagaagaagaagaagaagaagaagaagaagaagaagaagaggaagaggaagaggaagaggaagraggaggaggaggaggaggagaaggagaagaagaaaagaagaagaagaagaagaagaagaagaagaagaagaagaagaagaagaagaagaagaagaagaagaagaagaagaagaagaaggagaagaagaagaaagaagaaagtcataaagtaagtgagaacacaaatttccctctcaggaaattcacaatgtccctccctcagaaatttcttgctactattcatggtaaagtatcatctctgactttgttcttatccattttgggggaagagtattcctaaatatagaagtgtaaatttttggaagtgtatattttttaataaattaaaataaaatggaaacctaaaaaacagagcatttttagtatttggatgggcagcatttcttttcagttttgcagcatcaccttaagtgtggcatcttggtgagcctagtggattgccagtagagcaaatagccaatgtagtccactggctggcatgctatcttctccttgctcctgctggagtctctgaagtgtagagcaatcatggcctaatctggaattggcatctgggagtatgcccaagccccatatgagtggtcaggccacagagttgccagcagagagctagtgctcccaaaactgaaaacgaagtctaccaggatatgaggatagttttgaaccacacaggattttagatacctgggatctgccgtttttacatttgcaaattgccaagattcaaattacacaaattatctatgcacacacataaatatttaaaattatgatactaataatgccttgtgagactgactaaaagtagtcatttatgtaaatatgcttagacttctttggtacttggagattcaag

SEQ ID NO: 76957 - DNA, 1031 bp, Homo sapiens
tataatgaaattttgcaatggtattgatgcagtatcactccaaaatactgcactttggaagtcagtaagtcttgaagatcacctgcagtacttttattctcaaagaagaagaagaagaagaagaagaagaagaagaagaagaagaagaagaggaagaggaagaggaagaggaaggrggaggaggaggaggaggagaaggagaagaagaaaagaagaagaagaagaagaagaagaagaagaagaagaagaagaagaagaagaagaagaagaagaagaagaagaagaagaagaaggagaagaagaagaaagaagaaagtcataaagtaagtgagaacacaaatttccctctcaggaaattcacaatgtccctccctcagaaatttcttgctactattcatggtaaagtatcatctctgactttgttcttatccattttgggggaagagtattcctaaatatagaagtgtaaatttttggaagtgtatattttttaataaattaaaataaaatggaaacctaaaaaacagagcatttttagtatttggatgggcagcatttcttttcagttttgcagcatcaccttaagtgtggcatcttggtgagcctagtggattgccagtagagcaaatagccaatgtagtccactggctggcatgctatcttctccttgctcctgctggagtctctgaagtgtagagcaatcatggcctaatctggaattggcatctgggagtatgcccaagccccatatgagtggtcaggccacagagttgccagcagagagctagtgctcccaaaactgaaaacgaagtctaccaggatatgaggatagttttgaaccacacaggattttagatacctgggatctgccgtttttacatttgcaaattgccaagattcaaattacacaaattatctatgcacacacataaatatttaaaattatgatactaataatgccttgtgagactgactaaaagtagtcatttatgtaaatatgcttagacttctttggtacttggagattcaag

SEQ ID NO: 76958 - DNA, 1031 bp, Homo sapiens
tataatgaaattttgcaatggtattgatgcagtatcactccaaaatactgcactttggaagtcagtaagtcttgaagatcacctgcagtacttttattctcaaagaagaagaagaagaagaagaagaagaagaagaagaagaagaagaagaggaagaggaagaggaagaggaaggagraggaggaggaggaggagaaggagaagaagaaaagaagaagaagaagaagaagaagaagaagaagaagaagaagaagaagaagaagaagaagaagaagaagaagaagaagaagaaggagaagaagaagaaagaagaaagtcataaagtaagtgagaacacaaatttccctctcaggaaattcacaatgtccctccctcagaaatttcttgctactattcatggtaaagtatcatctctgactttgttcttatccattttgggggaagagtattcctaaatatagaagtgtaaatttttggaagtgtatattttttaataaattaaaataaaatggaaacctaaaaaacagagcatttttagtatttggatgggcagcatttcttttcagttttgcagcatcaccttaagtgtggcatcttggtgagcctagtggattgccagtagagcaaatagccaatgtagtccactggctggcatgctatcttctccttgctcctgctggagtctctgaagtgtagagcaatcatggcctaatctggaattggcatctgggagtatgcccaagccccatatgagtggtcaggccacagagttgccagcagagagctagtgctcccaaaactgaaaacgaagtctaccaggatatgaggatagttttgaaccacacaggattttagatacctgggatctgccgtttttacatttgcaaattgccaagattcaaattacacaaattatctatgcacacacataaatatttaaaattatgatactaataatgccttgtgagactgactaaaagtagtcatttatgtaaatatgcttagacttctttggtacttggagattcaag

SEQ ID NO: 76959 - DNA, 1031 bp, Homo sapiens
tataatgaaattttgcaatggtattgatgcagtatcactccaaaatactgcactttggaagtcagtaagtcttgaagatcacctgcagtacttttattctcaaagaagaagaagaagaagaagaagaagaagaagaagaagaagaagaagaggaagaggaagaggaagaggaaggaggaggaggaggaggaggagraggagaagaagaaaagaagaagaagaagaagaagaagaagaagaagaagaagaagaagaagaagaagaagaagaagaagaagaagaagaagaagaaggagaagaagaagaaagaagaaagtcataaagtaagtgagaacacaaatttccctctcaggaaattcacaatgtccctccctcagaaatttcttgctactattcatggtaaagtatcatctctgactttgttcttatccattttgggggaagagtattcctaaatatagaagtgtaaatttttggaagtgtatattttttaataaattaaaataaaatggaaacctaaaaaacagagcatttttagtatttggatgggcagcatttcttttcagttttgcagcatcaccttaagtgtggcatcttggtgagcctagtggattgccagtagagcaaatagccaatgtagtccactggctggcatgctatcttctccttgctcctgctggagtctctgaagtgtagagcaatcatggcctaatctggaattggcatctgggagtatgcccaagccccatatgagtggtcaggccacagagttgccagcagagagctagtgctcccaaaactgaaaacgaagtctaccaggatatgaggatagttttgaaccacacaggattttagatacctgggatctgccgtttttacatttgcaaattgccaagattcaaattacacaaattatctatgcacacacataaatatttaaaattatgatactaataatgccttgtgagactgactaaaagtagtcatttatgtaaatatgcttagacttctttggtacttggagattcaag

SEQ ID NO: 76960 - DNA, 1031 bp, Homo sapiens
tataatgaaattttgcaatggtattgatgcagtatcactccaaaatactgcactttggaagtcagtaagtcttgaagatcacctgcagtacttttattctcaaagaagaagaagaagaagaagaagaagaagaagaagaagaagaagaagaggaagaggaagaggaagaggaaggaggaggaggaggaggaggagaaggagaagragaaaagaagaagaagaagaagaagaagaagaagaagaagaagaagaagaagaagaagaagaagaagaagaagaagaagaagaagaaggagaagaagaagaaagaagaaagtcataaagtaagtgagaacacaaatttccctctcaggaaattcacaatgtccctccctcagaaatttcttgctactattcatggtaaagtatcatctctgactttgttcttatccattttgggggaagagtattcctaaatatagaagtgtaaatttttggaagtgtatattttttaataaattaaaataaaatggaaacctaaaaaacagagcatttttagtatttggatgggcagcatttcttttcagttttgcagcatcaccttaagtgtggcatcttggtgagcctagtggattgccagtagagcaaatagccaatgtagtccactggctggcatgctatcttctccttgctcctgctggagtctctgaagtgtagagcaatcatggcctaatctggaattggcatctgggagtatgcccaagccccatatgagtggtcaggccacagagttgccagcagagagctagtgctcccaaaactgaaaacgaagtctaccaggatatgaggatagttttgaaccacacaggattttagatacctgggatctgccgtttttacatttgcaaattgccaagattcaaattacacaaattatctatgcacacacataaatatttaaaattatgatactaataatgccttgtgagactgactaaaagtagtcatttatgtaaatatgcttagacttctttggtacttggagattcaag

SEQ ID NO: 76961 - DNA, 662 bp, Homo sapiens
ctatagtctgagagaaatgcagaaaaatgtggattgagggtatttttgtttactaagaggtagagggaaaaaaaacttccttttatattgttcttcttcagtgacacttcaatactactctgacatcattgtttaaataattgtaactatttcagctccttattggctagaatttatttccyagaatcctgattttctagatgataggcaggttaagtaactatagaatgtgacttgagaaggttgggtttttcatggagaagaaagaatttcacataaagttcaaaatattcagatcataacaatacattctgtgaggattacatatgtgtgtgtactgcactgacctctggtatttttaataatatacccagatataatctatctgctcttttatgatgaaaacaacttgtctcaggatatacttctgtttgttagatatcatcccttacttataataacattgcctacagctaattcatttcgccaagcactttacatcttgtaataatatacattttcatgaggtaaatgtatattattacatttaatacaaaaaaaccttaccatataaataattaaagcttcattttgcagaagaagaaaattaggcacaaactgagttttagtttggggcttacagggaagcaatggttagcatg

SEQ ID NO: 76962 - DNA, 1048 bp, Homo sapiens
atatttgtcatggttatcattaaacctctgaagaaagggaatcagaaatacttttaactctcagccattctaaatctcaaaagttctcaaatatcaatttcattttttaaaaaatctttgaacacttccagtcccttgccttttagtagcatttgtgttttatcacaaactttagcaacactggctgtgtgtggaatatggctctccctggccttggtgattgatgtttacatgctggtcaaagccagtcagaagggccagttagtaaatcctggccatatgttgattgctgagccatccttttgaagaggtttgactttattttcatctttgcatgtgcagagaatttaagccaaatttaggtttccttccttcctttaacctgtggaatcaaatcatttacattgtcttctcatttctcctattgatgctgcttttyttttccctcaggtaagggaagggtataatgttgtaaatcagtgattaatggccatccttctaaaaccaaaattaaattactctttggattggattgtgacacttcagtctgtctgcatcaacccatccctcctaacacacacactcatgccatcactggcttatagctcaaatctgagttaggacgtgctcccttggccccaactctttttcagtgcctagcccctcagtctggagatgagctgaatcatgtttgcataacattaaataccttggtacaggaggttttgttgttgaattgtttacattgttgctgttgactctagtgtcaaatgtgtaacgtagcatcaaattatacacagcaggtccataaacacacactacagtctgcattgggaatatgaccacagagtcataatttcagtgatatagtctcaaaactattattagcattttcaatattctttttacattttttattttttctccccatgccttattcgtagccccatgagcattctaaaccacttagatggagcatcctgaattgacataaaactatcactattaataatcaagtcatggggaaagcaagagaagatgcccaact

SEQ ID NO: 76963 - DNA, 515 bp, Homo sapiens
tagattacaacaatagtctcctgttctagcccttcaccaagtcatccttcactgagctgccagaacaactttaactacaagttacctctgaccagtcaggtcttccttggaatactcctaggcaaaaggctgsggaggtgctccccgagagctgtataaatacttctacagagttttacacactataggctgcttttttgtttgctcgtctgtttttctctactgagctgttagttacagatattagagactgtctttaactccctgcccctttgtgtagtggctagaaaacatatcagtaagtgctgaatgtaattatcctcctatggaaaaaattccaatacctcctgcttgcttatcaaagtaaaaccttatcctgacattcaagaatctctaacacctttacccaacctaatacttttgtcttattatttattcattgttcagtgattcagttgtcagttactaaattcctactatgtattaaatagtgttacatattaaaaatagaaaga

SEQ ID NO: 76964 - DNA, 515 bp, Homo sapiens
tagattacaacaatagtctcctgttctagcccttcaccaagtcatccttcactgagctgccagaacaactttaactacaagttacctctgaccagtcaggtcttccttggaatactcctaggcaaaaggctgcggaggtgctccccgagagctgtataaatacttctacagagttttacacactataggctgcttttttgtttgctcgtctgtttttctctactgagctgttagttacagatattagagactgtctttaactccctgcccctttgtgtagtggctagaaaacatatcagtaagtgctgaatgtaattatcctcctatggaaaaaattccaatacctcctgcttgcttatcaaagtaaaaccttatcctgacattcaagartctctaacacctttacccaacctaatacttttgtcttattatttattcattgttcagtgattcagttgtcagttactaaattcctactatgtattaaatagtgttacatattaaaaatagaaaga

SEQ ID NO: 76965 - DNA, 1296 bp, Homo sapiens
tttccagtgacattttcatagtctcaaaaaaagtactcacatatttgacatcttttttcttttcttttcttttctttttttttttttttttgagacagagtctcactgtgttgcccaggctggaatrtagtggcacgatcttggctcactgcaatctccacctcctgggttcaagcaattctcctgcctcaaccttctgagtagcagggattataggtgcctgccactatgcctggctaatttttgtatttttagtagagacagggtctcaccatgttggccatcctggactcgaactcctgacctaaggtgatccaccctcctcggcctcccaaagtgctgggattacaggtgtgagccaccacgcctggcctacatcttttttcattctaattcaaatatcaggaacacattccgtacagctgtttggaacaggaggctggaagaaggcatcaatgaagtttaagtttggcattctattatggcacattaattacattcttctgccaaacttaaaaaaaagactgattcctccaaaatatgctaatctgtatcatttcacaagcgtagacttgttttaatcatttatcaaggtcattctcccaaatttggttctttcaaaacagagaaggactttaaaaaaatggactgtagatactgcactagaacgtgggagctttcattcctcaggcacccaggatccatgaacttaaagccttctgcctctcttcatcatgtctgtatctcttgttccaacccaaaagggcaccagaaaagatctgagcctgagtgtaacggcttagctgatgaaataaattggagcccagggaaatgagcttctcaactactgcttggtcaaatcagaaagaaaattagtctagatgctaatgatgatgtgtgctcagcatgccacatggcacatgatcaaccctcactgagatgagagaaaggaaggagctattaacaattttaaagccaaactggggaaactgcaacccagaaaagttagccacacgactgataattaaatactctgccaagtccttctcccccaaccaaggttaatttttaaatcattactgaaactaagaaaagacatatttttatcttggtgtaattacataaattattttgtaagattttcccaattagtacttctttcagcttgtttcctttttctttatacttaccaagcatttggggaagaaatgtttaatcgttgtttcctttcaatactgtattcatgctacatttggacattctatttgctactctttacacaaacaggcaagcggc

SEQ ID NO: 76966 - DNA, 502 bp, Homo sapiens
tggtggcaggcaaagaggaaacgagaaccaagtgaaaggggttccccttataaaaccatcaattctcatgagacttaytcactaccacaagaacagtatggggaaaccgcccccgtgattaaatcatgtcccaccaggtccctcccacaacatgtgggaattatggaagctacaatttaagatgagatttgggtggggacacagccaaaccatatcaacaacaaataaataagtaaaagtaagaagttctgatttttgagaagtactcagaaggagatagacagggtgatacaatagagagtaattactttaggaggaagggtttctaggatagggtgcatcagaaaagcctcttagaagtggtgtcatttgaattacgaaaaaaaaatgagatgggattaacctgtcattaatctgatcactgtatctttattgctctaatttgtctactcataattatgttctctttctttgaattcctaaaataattactatccacata

SEQ ID NO: 76967 - DNA, 502 bp, Homo sapiens
tggtggcaggcaaagaggaaacgagaaccaagtgaaaggggttccccttataaaaccatcaattctcatgagacttattcactaccacaagaacagtatggggaaaccgcccccgtgattaaatcatgtcccaccaggtccctcccamaacatgtgggaattatggaagctacaatttaagatgagatttgggtggggacacagccaaaccatatcaacaacaaataaataagtaaaagtaagaagttctgatttttgagaagtactcagaaggagatagacagggtgatacaatagagagtaattactttaggaggaagggtttctaggatagggtgcatcagaaaagcctcttagaagtggtgtcatttgaattacgaaaaaaaaatgagatgggattaacctgtcattaatctgatcactgtatctttattgctctaatttgtctactcataattatgttctctttctttgaattcctaaaataattactatccacata

SEQ ID NO: 76968 - DNA, 1205 bp, Homo sapiens
gggacgctgccaaatcatgatcagtagctctaacattggcctggaagactcaggattatttgctcaacactagtggaatttgggtgcttctagccctgtgtctcaaaggcagaaaggatcattatgcagagcacaagggggtttggaacccagaactcccgcttgccatcctctgccgcctccagagcccagcatcctggagtccatgctgcagaggggcatccttccagctccctgtgctgttgctcatgccggtgtcacagtcaattacagacagccaattacatctgattcctctctgggggtcgctgggtagggccgccatggggagcagaggaggcccgagaggtttctaaatgaagtagcctgttgggaaatcctattatgaagctcatgttacagggctgcggtgttaatgaccctggcctcccctggccctgaacacagccggtctccctggagcttgagaggaggctatctgggctgtggtttccctctcaccagccaatagctgatgggactgagagagcagagagggctccttggtgcccttgaatgtggcttccagcactgaggcctcacacacacacacacacacacacacacacacacwcactcccttgtgttcctcaccttctctttcagcagctcaggatgaggaggcagggggaacccagagctgggaccagcaaccctaagggagatggaagcaggccccgaaaacctctttttccaagaagagctaaattagatgtattttttccactttcaaatcctgcaaatttttcatctcaactcccccaggcttataaagtggctcatctcagctgctcaagctgacaaaggtgcagaaactgttgaaaggttcaaaatgtcccctgggtttccaggcatgaaggaatttacatgtaggttttctttactaaagaaaaaagtccccacttggagagggcggaggaatgaagaagcagccaggaaggagaggacagcaagcgtctgacaagaggagagcctaaggcagtgctggtgggatcaccagccataacttgcagagagacaccaaatgggaagacaggcacatcgagagctgttctgttcttctgttagagttgtaaaggccctgccaatgtccagagttagaatggtcataggtgatctgagagccttctggaaaacctacacagattcccagttaaagtcatgca

SEQ ID NO: 76969 - DNA, 1205 bp, Homo sapiens
gggacgctgccaaatcatgatcagtagctctaacattggcctggaagactcaggattatttgctcaacactagtggaatttgggtgcttctagccctgtgtctcaaaggcagaaaggatcattatgcagagcacaagggggtttggaacccagaactcccgcttgccatcctctgccgcctccagagcccagcatcctggagtccatgctgcagaggggcatccttccagctccctgtgctgttgctcatgccggtgtcacagtcaattacagacagccaattacatctgattcctctctgggggtcgctgggtagggccgccatggggagcagaggaggcccgagaggtttctaaatgaagtagcctgttgggaaatcctattatgaagctcatgttacagggctgcggtgttaatgaccctggcctcccctggccctgaacacagccggtctccctggagcttgagaggaggctatctgggctgtggtttccctctcaccagccaatagctgatgggactgagagagcagagagggctccttggtgcccttgaatgtggcttccagcactgaggcctcacacacacacacacacacacacacacacacacacactcccttgtgttcctcaccttctctttcagcagctcaggatgaggaggcagggggaacccagagctgggaccagcaaccctaagggagatggaagcaggccccgaaaacctctttttccaagaagagctaaattagaygtattttttccactttcaaatcctgcaaatttttcatctcaactcccccaggcttataaagtggctcatctcagctgctcaagctgacaaaggtgcagaaactgttgaaaggttcaaaatgtcccctgggtttccaggcatgaaggaatttacatgtaggttttctttactaaagaaaaaagtccccacttggagagggcggaggaatgaagaagcagccaggaaggagaggacagcaagcgtctgacaagaggagagcctaaggcagtgctggtgggatcaccagccataacttgcagagagacaccaaatgggaagacaggcacatcgagagctgttctgttcttctgttagagttgtaaaggccctgccaatgtccagagttagaatggtcataggtgatctgagagccttctggaaaacctacacagattcccagttaaagtcatgca

SEQ ID NO: 76970 - DNA, 1205 bp, Homo sapiens
gggacgctgccaaatcatgatcagtagctctaacattggcctggaagactcaggattatttgctcaacactagtggaatttgggtgcttctagccctgtgtctcaaaggcagaaaggatcattatgcagagcacaagggggtttggaacccagaactcccgcttgccatcctctgccgcctccagagcccagcatcctggagtccatgctgcagaggggcatccttccagctccctgtgctgttgctcatgccggtgtcacagtcaattacagacagccaattacatctgattcctctctgggggtcgctgggtagggccgccatggggagcagaggaggcccgagaggtttctaaatgaagtagcctgttgggaaatcctattatgaagctcatgttacagggctgcggtgttaatgaccctggcctcccctggccctgaacacagccggtctccctggagcttgagaggaggctatctgggctgtggtttccctctcaccagccaatagctgatgggactgagagagcagagagggctccttggtgcccttgaatgtggcttccagcactgaggcctcacacacacacacacacacacacacacacacacacactcccttgtgttcctcaccttctctttcagcagctcaggatgaggaggcagggggaacccagagctgggaccagcaaccctaagggagatggaagcaggccccgaaaacctctttttccaagaagagctaaattagatgtattttttccactttcaaatcctgcaaatttttcatctcaactcccccaggcttataaagtggctcatctcagctgctcaagctgacaaaggtgcagaaactgttgaaaggttcaaaatgtcccytgggtttccaggcatgaaggaatttacatgtaggttttctttactaaagaaaaaagtccccacttggagagggcggaggaatgaagaagcagccaggaaggagaggacagcaagcgtctgacaagaggagagcctaaggcagtgctggtgggatcaccagccataacttgcagagagacaccaaatgggaagacaggcacatcgagagctgttctgttcttctgttagagttgtaaaggccctgccaatgtccagagttagaatggtcataggtgatctgagagccttctggaaaacctacacagattcccagttaaagtcatgca

SEQ ID NO: 76971 - DNA, 712 bp, Homo sapiens
ctgggtgggatggctgtggggggcttggggacgtgccagtgaggggcaaccagtcagggaaggaaagagtgggggcaggcccagaaggctctcaagttctcctggacacatcccagaccagactggtgctgctgaggctccaaaggctgcatcaccatgcagctaccctccaggaggctgacaccagctgctgccatcctcttccaagtattcgccattcttagtgttgccatgcagmggctgctgccccatgggtaccactcccctcacatacagtcttcatggcctacttcactgccacctctccagttcaagacctcagccacccctcttcagagagccaggctggcctactgcagcccccagacttctacccaggagtcttccctgactgaagctgaccacatcataccctgactccaccccaccaaatccctccagccctctaaaacctcaccatcatccctctcggcccctctgggaagtttgcctaactgcccagccttggccctcctccccggaagatgtagcccaccttgcacaaacagccctagcccaacttttcatggcttgcattctgtgctgccttttctgtggtttcctgctccatttccctgcaggctctgagagaatagtgccaggatcttcactctcacccatgggctgccacaccttgcagagtaccttgcactcagagatgccctgtccactg

SEQ ID NO: 76972 - DNA, 1150 bp, Homo sapiens
ttttcaggacgaaatttgttgttacaggtggaagcagaaatgaaaacactgaacatttactttaaaaaaaataggtgagatttttactggatgtgtgttctacctcactaaattttggagctcattttgacaggtggtcattttcaagttaggccatatgtttgttacgagttttattaacattctaagaaagaggattttcttttagagttgattacaatcagagtctgaccacagattcatgggtttatatatttttttaaaatagtattttctgaaacatgaataaaaaaagagttgtcttaaggaaaaataaaatgattacgagaacttcaggcttccagccataggtctcaatttgaattaggcttcaacctcttaaactttctgaacctcagtttacttaatttgctcacataatacccatatctcaagggcacagaaacaatcaagtgactgatataagtgaaagcattttgctggctttagagatgcacaatgataaaacataattgttaaggaagcaacaggctaaaaaagaagacggcttatatgtggccctaaaatcagcattctagttaaactgtttaagtgtgatgcttcatatttaccttttccattttcaaaacaaaacaacataacaactcaatataaagcaaaaattcaaagtgaattttctttgatgggtttagctgctaagggtctgatctggttttagcagacttctgaaattctagtttgtcgaagcactcttttcaatctctgtggaaaaatgcttaatgggcaaagagtatgtaattctttttgtccttgaacaaaacaaagacaaaaagtaaagctagaataatcatttttcggtaagtgacttattgctatttttctttgtggaacagcaggtttcttatcatttttgcccacactcattctaaaagcagccattttagaaagcagttgttgctaactattgtttcaagtttagcctggtgagaagggggacagcgaatggtctctacagtagttatgtctkgtgcctttggtcattaatcctgccaaccactgggaaacttcctcagctggcccaaaacctaatcacatggtggggaattatttctcccttcaaccccaacacttctgtaaagcaaatgctaac

SEQ ID NO: 76973 - DNA, 1255 bp, Homo sapiens
tattcaatccactgttgatgggcacctaggttgattccatgtctttgctattatgaatagtgctgcaataaatatataratgcttgtggggttttttggtaaaacgatttattttcttttgggtatatacacggtaattggattgctgggtcaaatggtagttctgttttaagttctttgagaaatctccaaactgctttccccaatgtctgaactagttatgttctcaccagcagtgtgtaagctttttcttttttccacagcatcatcagcgtgtgttattttttgactttttaatagtaaccattctgactggtgtgagatggtatctcattgtggttttgatttgcagttctctgatgatttgaataaacaggtttttttcttttaactaaagcaggagatcacttttacattttatttagcttccatgttgtcttctgtgtaatgaatgtctctaatgtgaagtaaaattttgtcatatgctataactaaatatttgctgaatatgaaattatttttgtccaaattatgtacttatgtgtcttactgttttaagttagcatttaaaaattaaactattttcttgcagagaagaagtacacatagaatgagaaaagtgacacattcagagtcagggttttaattctggtttttctatttattgataacatgactttgaacaggtcattttatttgcctaagtgtcagttttctcatctataaaataacaatttctaattccaaataaggttttgcagatactatgaacaatgtgtgcaataattttttttaactggaggtaacatacaatttttttctcaatgaccaatcgaaataatatacaatataggtatcttttattaacttggaatcatggcttcacatatatattgatccagaaaagactttttagaccattaactttatctcccctcttgtagctcttgaaaaaactcagctatagggcaatgtagagacttctgaaagtcagacaacaagaatgaatagctaaacagtggtcaagaattcaatgtttttagatgaattggaaatggctgcaaaatacagtatttaaatgtttctatcttacagctaagcatgtcatgcagttcataggctaactgtagaaaagattatttttattagacatcaaatacatcaccagtaacttttctgaggccattatcaaaataattgtttttctcacatttttactggcaaagttaaacagaaagtgtttatctgcatgcat

SEQ ID NO: 76974 - DNA, 1255 bp, Homo sapiens
tattcaatccactgttgatgggcacctaggttgattccatgtctttgctattatgaatagtgctgcaataaatatatagatgcttgtggggttttttggtaaaacgatttattttcttttgggtatatacacggtaattggattgctgggtcaaatggtagttctgttttaagttctttgagaaatctccaaactgctttccccaatgtctgaactakttatgttctcaccagcagtgtgtaagctttttcttttttccacagcatcatcagcgtgtgttattttttgactttttaatagtaaccattctgactggtgtgagatggtatctcattgtggttttgatttgcagttctctgatgatttgaataaacaggtttttttcttttaactaaagcaggagatcacttttacattttatttagcttccatgttgtcttctgtgtaatgaatgtctctaatgtgaagtaaaattttgtcatatgctataactaaatatttgctgaatatgaaattatttttgtccaaattatgtacttatgtgtcttactgttttaagttagcatttaaaaattaaactattttcttgcagagaagaagtacacatagaatgagaaaagtgacacattcagagtcagggttttaattctggtttttctatttattgataacatgactttgaacaggtcattttatttgcctaagtgtcagttttctcatctataaaataacaatttctaattccaaataaggttttgcagatactatgaacaatgtgtgcaataattttttttaactggaggtaacatacaatttttttctcaatgaccaatcgaaataatatacaatataggtatcttttattaacttggaatcatggcttcacatatatattgatccagaaaagactttttagaccattaactttatctcccctcttgtagctcttgaaaaaactcagctatagggcaatgtagagacttctgaaagtcagacaacaagaatgaatagctaaacagtggtcaagaattcaatgtttttagatgaattggaaatggctgcaaaatacagtatttaaatgtttctatcttacagctaagcatgtcatgcagttcataggctaactgtagaaaagattatttttattagacatcaaatacatcaccagtaacttttctgaggccattatcaaaataattgtttttctcacatttttactggcaaagttaaacagaaagtgtttatctgcatgcat

SEQ ID NO: 76975 - DNA, 1255 bp, Homo sapiens
tattcaatccactgttgatgggcacctaggttgattccatgtctttgctattatgaatagtgctgcaataaatatatagatgcttgtggggttttttggtaaaacgatttattttcttttgggtatatacacggtaattggattgctgggtcaaatggtagttctgttttaagttctttgagaaatctccaaactgctttccccaatgtctgaactagttatgttctcaccagcagtgtgtaagctttttcttttttccacagcatcatcagcgtgtgttattttttgactttttaatagtaaccattctgactggtgtgagatggtatctcattgtggttttgatttgcagttctctgatgatttgaataaacaggtttttttcttttaactaaagcaggagatcacttttacattttatttagcttccatgttgtcttctgtgtaatgaatgtctctaatgtgaagtaaaattttgtcatatgctataactaaatatttgctgaatatgaaattatttttgtccaaattatgtacttatgtgtcttactgttttaagttagcatttaaaaattaaactattttcttgcagagaagaagtacacatagaatgagaaaagtgacacattcagagtcagggttttaattctggtttttctatttattgataacatgactttgaacaggtcattttatttgcctaagtgtcagttttctcatctataaaataacaatttctaattccaaataaggttttgcagatactatgaacaatgtgtgcaataattttttttaactggaggtaacatacaatttttttctcaatgaccaatcgaaataatatacaatataggtatcttttattaacttggaatcatggcttcacatatatattgatccagaaaagactttttagaccattaactttatctcccctcttgtagctcttgaaaaaactcagctatagggcaatgtagagacttctgaaagtcagacaacaagaatraatagctaaacagtggtcaagaattcaatgtttttagatgaattggaaatggctgcaaaatacagtatttaaatgtttctatcttacagctaagcatgtcatgcagttcataggctaactgtagaaaagattatttttattagacatcaaatacatcaccagtaacttttctgaggccattatcaaaataattgtttttctcacatttttactggcaaagttaaacagaaagtgtttatctgcatgcat

SEQ ID NO: 76976 - DNA, 1116 bp, Homo sapiens
ttaaactttagatagatgtaatatctcaaatagactttgagaaagaacgttacattttgatgaactgcaaaatcttacaaatacatgaacaatgtaagttaattaaagtttcaaataattttttctttacatcgaagctttcattagaaagacagaaaacaagataattctaatttgtcactgcttaccatgagtcatgagtaactgtccttatatggcccagtttttaatgttagtaatacttaaaagcaaagaaaaattgataaaaataaaaatttataatttagaagaaagttttaccaaagacagtcagctctgctgggtcactgtccctttctcccaccatattggtaccaacacaagtatacatccctgcatcacttttcctggtattggagatcatcagttttccaccacggatctgttaaaatcaaacaaaaagaaaagagaagggaagaaaaaggaacagaatagaaaataaaggtcattaataaatagttttgagtatttgagcatatttgtttcccaaaggaaaaaactctcccattattttggcatttgcaggtatgttttcttttcttaaattcaccctcaatgtaagtttccatactttcttcatagaaaatattttttaaggcagctgtcctctctttcctgatcgcattttgagtcttgtgactgacctccctaaatcccagtagttagtcttcacactgaaattcatttgaataaattgctattgtcatttgtcatcagaaagaaatactagatattcattttaaataatctaataaaatcctgctgaatcagagggattcagaaagtatatatatccatacttactaggcatattctggacacttargagacagtggtaaatcaaacggtaaaaatctttgcctccctagaattcacatttcaactgttaatattaatcatctttgtttcatcttaattgtatttaagagataattcttggagaaaatggcaggttggataaaaacaaacacagtttataaaatggtaatatgtattagtataaaccattagcatctaataggttccccttcaagatttcttaaatgagaagcatttattggctgataaaaacaaatg

SEQ ID NO: 76977 - DNA, 1116 bp, Homo sapiens
ttaaactttagatagatgtaatatctcaaatagactttgagaaagaacgttacattttgatgaactgcaaaatcttacaaatacatgaacaatgtaagttaattaaagtttcaaataattttttctttacatcgaagctttcattagaaagacagaaaacaagataattctaatttgtcactgcttaccatgagtcatgagtaactgtccttatatggcccagtttttaatgttagtaatacttaaaagcaaagaaaaattgataaaaataaaaatttataatttagaagaaagttttaccaaagacagtcagctctgctgggtcactgtccctttctcccaccatattggtaccaacacaagtatacatccctgcatcacttttcctggtattggagatcatcagttttccaccacggatctgttaaaatcaaacaaaaagaaaagagaagggaagaaaaaggaacagaatagaaaataaaggtcattaataaatagttttgagtatttgagcatatttgtttcccaaaggaaaaaactctcccattattttggcatttgcaggtatgttttcttttcttaaattcaccctcaatgtaagtttccatactttcttcatagaaaatattttttaaggcagctgtcctctctttcctgatcgcattttgagtcttgtgactgacctccctaaatcccagtagttagtcttcacactgaaattcatttgaataaattgctattgtcatttgtcatcagaaagaaatactagatattcattttaaataatctaataaaatcctgctgaatcagagggattcagaaagtatatatatccatacttactaggcatattctggacacttaagagacagtggtaaatcaaacggtaaaaatctttgcctccctagaattcacatttcaactgttaatattaatcatctttgtttcatcttaattgtatttaagagataattcttggagaaaatggcaggttggataaaaacaaacacagtttataaaatggtaatatgtattagtataaaccattagcatctaataggttccccttcaagatttcttaaatgagaagsatttattggctgataaaaacaaatg

SEQ ID NO: 76978 - DNA, 676 bp, Homo sapiens
tgagccgacatccagcaatgctgagtgtgcgcctgtgtgagtcaccagccctgatgagcctcaggttattgtgttcgtaaaatgaaggggcttaggcttgctgcgattttttaaaaaccatttttaacagtaaaaatttttttcttgctacataaaaatgtacaagaaaaactcagacattaccaatgataaattataattttattaatataaatatttttgtgagctcaatttatatgacttagttattataaaagaaataagcaatatgaggtggccattaccatcctgtcccgttttattttgttcatatgctattgataaatcttgatgtatacagaaaagtagtttcaaagaataataatttttaaaaaggacttgtaatttcaagagacttttaaaaaaatctgcaattgctttttaaaggttctaaaacagttktctatgccttaaagctaaataactacaaagagctcactcttctcacattctgtattataaatatgtaagtcagagaaacaacagacaaaatcataaaaacacatgcatgaacaaatgggccttggtttacatttaattggatcttgcaatacacatgggttatagtagtatttctgtgtgtaattttacatgagtggattgctatcaaaataaaaattgtctacaatctcttttc

SEQ ID NO: 76979 - DNA, 1014 bp, Homo sapiens
ggtggcaaggaggtgaaatggactctgtgaaggttcttagttttggtggtttaatgctctatttttgtgctggttggcatcctgctaggaggtggcactctccagacagcatcagctgtggtagtatagagaggaactagtgatgggcaaggcccacaactaaaactcccaagattacatgccctctgttttcagctaccagcatgaatatgaaaggcccatcaggtggggcagggctaggcatgtccatgctcagaccctccttgggcaggtcttgctgtggctgctgtggggtatgggggtgatgctcccaggtcaatggaattgtgtacctaggaggattatggcttcctctgctaattcatgcaggttgtcagggaagtgggggaaagtgaacagtcacgggcctcacccagctcccttgcaaatcgaagggccggtctcactaccactatgctcccctaacagccctaagtctgtttccaggcagtgggtgagcagggcttgagaacttgccccaggctacctgcctcctacctgcaaaaaaaaagtgcttggtgtttcccctgcctgtggagtctgcacaccagatttacgccctcccttgagttctggccgggaggcttctttcccagttcaaattgttaactaagttcaactggagactaccatctccctatggtgttttcccctgctcctctggctgtaatggcctgcttggggtccgagtgagctcccagggcctttcctgctgcttcctctacccctgtatttcactcggctctctgaattgactcaratccaggtaaggtgggaaacttctcccttcagtttctctagtcaagctgtgtgtttgggagaggaggatgtctctcttcctcacttctgcagttggggaactcacagtatttggggtgtcccccaggtcctgaaagagcagtttgtttccttcggagggtctgtggatcctcttgggattgctggtttgttcttgccagaaagttgatattttta

SEQ ID NO: 76980 - DNA, 1014 bp, Homo sapiens
ggtggcaaggaggtgaaatggactctgtgaaggttcttagttttggtggtttaatgctctatttttgtgctggttggcatcctgctaggaggtggcactctccagacagcatcagctgtggtagtatagagaggaactagtgatgggcaaggcccacaactaaaactcccaagattacatgccctctgttttcagctaccagcatgaatatgaaaggcccatcaggtggggcagggctaggcatgtccatgctcagaccctccttgggcaggtcttgctgtggctgctgtggggtatgggggtgatgctcccaggtcaatggaattgtgtacctaggaggattatggcttcctctgctaattcatgcaggttgtcagggaagtgggggaaagtgaacagtcacgggcctcacccagctcccttgcaaatcgaagggccggtctcactaccactatgctcccctaacagccctaagtctgtttccaggcagtgggtgagcagggcttgagaacttgccccaggctacctgcctcctacctgcaaaaaaaaagtgcttggtgtttcccctgcctgtggagtctgcacaccagatttacgccctcccttgagttctggccgggaggcttctttcccagttcaaattgttaactaagttcaactggagactaccatctccctatggtgttttcccctgctcctctggctgtaatggcctgcttggggtccgagtgagctcccagggcctttcctgctgcttcctctacccctgtatttcactcggctctctgaattgactcaamtccaggtaaggtgggaaacttctcccttcagtttctctagtcaagctgtgtgtttgggagaggaggatgtctctcttcctcacttctgcagttggggaactcacagtatttggggtgtcccccaggtcctgaaagagcagtttgtttccttcggagggtctgtggatcctcttgggattgctggtttgttcttgccagaaagttgatattttta

SEQ ID NO: 76981 - DNA, 1014 bp, Homo sapiens
ggtggcaaggaggtgaaatggactctgtgaaggttcttagttttggtggtttaatgctctatttttgtgctggttggcatcctgctaggaggtggcactctccagacagcatcagctgtggtagtatagagaggaactagtgatgggcaaggcccacaactaaaactcccaagattacatgccctctgttttcagctaccagcatgaatatgaaaggcccatcaggtggggcagggctaggcatgtccatgctcagaccctccttgggcaggtcttgctgtggctgctgtggggtatgggggtgatgctcccaggtcaatggaattgtgtacctaggaggattatggcttcctctgctaattcatgcaggttgtcagggaagtgggggaaagtgaacagtcacgggcctcacccagctcccttgcaaatcgaagggccggtctcactaccactatgctcccctaacagccctaagtctgtttccaggcagtgggtgagcagggcttgagaacttgccccaggctacctgcctcctacctgcaaaaaaaaagtgcttggtgtttcccctgcctgtggagtctgcacaccagatttacgccctcccttgagttctggccgggaggcttctttcccagttcaaattgttaactaagttcaactggagactaccatctccctatggtgttttcccctgctcctctggctgtaatggcctgcttggggtccgagtgagctcccagggcctttcctgctgcttcctctacccctgtatttcactcggctctctgaattgactcaaatccaggtaaggtgggaaacttctcccttcagtttctctagtcaagctgtgtgtttgggagaggaggatgtctctcttcctcacttctgcagttggggaactcacagtatttggggtgtcccccaggtcctgaaagagcagtttgtttccttcggagggtctgtggatcctcttgggattgctggtttgttcttgccaraaagttgatattttta

SEQ ID NO: 76982 - DNA, 2438 bp, Homo sapiens
tttattccagctgagatcaggaaattcaattccatggcaacatcctttgccaccatctcctgctggcaaagaacagctgcaacacagttttataagaatgctcaagtctccttactgttgcatctgtaatgcctgggtataggggacgtcctccaggctcttccagggatgactgtctttcagagtggcagggcaggctgttcgtaacagattcatgcatcattcttgtttccctgggcctttagactccttcctctacttgtatacartgttcataacagcattattcataatagtcaaaaagtggaaacaacccaacatgtgttcattggcaccatcctaaggcttagtgttcatctgccctttatttaagatgaagaggttttccttgcacatccatttattcaccctgttaccgaaatgccaggggttctgtctaggtactgctgcttgatcactgagacaatgggtattgccagggaagaaggctttagttgggtgctgcagctgaggagatgggagatgagttctagatcagtcccaaatccatctccctgactgattaaaattaagggtttgtataacagaaaagaaatgtaaccatttttgggaaaacaagaattagggaggggtaaaggggaggagttggtcaacaagaagcaggtggttgcttaggcaatcacgatgggtgaggggtctggctcctcattgtccagatgcagtgatctggtaagtttcagttccttgataatatctgggaggcctgatggttggcttcatgaggaaggaactcagattaagacaaatgtaactttctcaagttttaagactgggagggtcagttttctttcagtttctttcttttattcaaaagaaaccacaaataccagttctatcagacagttgggccattttcaactcaaggcatctgagttcctcctcatcaaggtagggtgactttaaatgtctacaaaggtgggatgtggattgtcctcagattctgtgtttgtttatagggttgtgtgaaaaatttcccctatcattcagccttcatgatggaagatctttttctcctttcttcttcctttaagtctctatttcctttcactttcccctgcaatcaagctgcttgttcttctatctccttcctattcccagctgtgattttatctagtctttgtgaattaagaaactggtttaagaaactggtttgtaagcatgcattttaatcatttcaagtcacagtcaagttagcaattcttgaactttttttctgcaacattgtggcctggggaaggcgggaaaggagcttttgggggatcattaagagagcacagcacaaaggtatacagcaaatataagcaaatgtatacttcaggacctaaccatgccacgttataacagaaacacttttctccaggactcttgttggcatcaccccttaggatccagatatgctggagaagatacaaatcattctgacttaaagaatcttcaaatcagtaaatattttttgaggatcattgccataccatgtaccatgcaaaatgccaggaatacaacagttaaacacaaacacacatggttcctgaatttgtggaccatgtttttatgaacctcatagtaccggctagaattgtgaaatcattgtaggcaccatctctactgcagagaagaaaacttttgcatatattggagaactgagcctctagtcatatttcaatattgtctccaagtcccttttaattcaaggccttcttcattacaatccacatcctggaatagaaacttagactagttgatagcgtacaagagttgacaaggcagaggagatgctcagagatagaaaaggaggcttgtcagagtttccaagctaactacattgtatatctcagatgagagaaaaagggtttctctcgttaattaagaaattcctttggagattaatgaggacagaatgcaggatgtacaagagaatattctcaaaccaaacagcttttaacctgggagaataaagagacccaaagggttagtctttgtctagagcagagaaaacacagaagaaaatttaaaaatattcctccattccaatatttgtataatcttgaggaaaaggcctttttaagcaaaagacaaaatctttaatccagaggatatagaagaagaaaaagatttatgtttggctacataaaaattaaaaacagcatagtaaaacatgtgactaaaatgttaaaaagcaaagagcattctggggaaaaatatttgcaacacttaagattggcacatatatttcttacaagtaataagtccaacaacttaataggaaaattggcattctactgacactcgtttgaatttgggaaaaaagtttttttaaaaagaaaattggcaaaagatataaacctactgttaaaataaaaataaatattaaatagcat

SEQ ID NO: 76983 - DNA, 2438 bp, Homo sapiens
tttattccagctgagatcaggaaattcaattccatggcaacatcctttgccaccatctcctgctggcaaagaacagctgcaacacagttttataagaatgctcaagtctccttactgttgcatctgtaatgcctgggtataggggacgtcctccaggctcttccagggatgactgtctttcagagtggcagggcaggctgttcgtaacagattcatgcatcattcttgtttccctgggcctttagactccttcctctacttgtatacagtgttcataacagcattattcataatagtcaaaaagtggaaacaacccaacatgtgttcattggcaccatcctaaggcttagtgttcatctgccctttatttaagatgaagaggttttccttgcacatccatttattcaccctgttaccgaaatgccaggggttctgtctaggtactgctgcttgatcactgagacaatgggtattgccagggaagaaggctttagttgggtgctgcagctgaggagatgggagatgagttctagatcagtcccaaatccatctccctgactgattaaaattaagggtttgtataacagaaaagaaatgtaaccatttttgggaaaacaagaattagggaggggtaaaggggaggagttggtcaacaagaagcaggtggttgcttaggcaatcacgatgggtgaggggtctggctcctcattgtccagatgcagtgatctggtaagtttcagttccttgataatatctgggaggcctgatggttggcttcatgaggaaggaactcagattaagacaaatgtaactttctcaagttttaagactgggagggtcagttttctttcagtttctttcttttattcaaaagaaaccacaaataccagttctatcagacagttgggccattttcaactcaaggcatctgagttcctcctcatcaaggtagggtgactttaaatgtctacaaaggtgggatgtggattgtcctcagattctgtgtttgtttatagggktgtgtgaaaaatttcccctatcattcagccttcatgatggaagatctttttctcctttcttcttcctttaagtctctatttcctttcactttcccctgcaatcaagctgcttgttcttctatctccttcctattcccagctgtgattttatctagtctttgtgaattaagaaactggtttaagaaactggtttgtaagcatgcattttaatcatttcaagtcacagtcaagttagcaattcttgaactttttttctgcaacattgtggcctggggaaggcgggaaaggagcttttgggggatcattaagagagcacagcacaaaggtatacagcaaatataagcaaatgtatacttcaggacctaaccatgccacgttataacagaaacacttttctccaggactcttgttggcatcaccccttaggatccagatatgctggagaagatacaaatcattctgacttaaagaatcttcaaatcagtaaatattttttgaggatcattgccataccatgtaccatgcaaaatgccaggaatacaacagttaaacacaaacacacatggttcctgaatttgtggaccatgtttttatgaacctcatagtaccggctagaattgtgaaatcattgtaggcaccatctctactgcagagaagaaaacttttgcatatattggagaactgagcctctagtcatatttcaatattgtctccaagtcccttttaattcaaggccttcttcattacaatccacatcctggaatagaaacttagactagttgatagcgtacaagagttgacaaggcagaggagatgctcagagatagaaaaggaggcttgtcagagtttccaagctaactacattgtatatctcagatgagagaaaaagggtttctctcgttaattaagaaattcctttggagattaatgaggacagaatgcaggatgtacaagagaatattctcaaaccaaacagcttttaacctgggagaataaagagacccaaagggttagtctttgtctagagcagagaaaacacagaagaaaatttaaaaatattcctccattccaatatttgtataatcttgaggaaaaggcctttttaagcaaaagacaaaatctttaatccagaggatatagaagaagaaaaagatttatgtttggctacataaaaattaaaaacagcatagtaaaacatgtgactaaaatgttaaaaagcaaagagcattctggggaaaaatatttgcaacacttaagattggcacatatatttcttacaagtaataagtccaacaacttaataggaaaattggcattctactgacactcgtttgaatttgggaaaaaagtttttttaaaaagaaaattggcaaaagatataaacctactgttaaaataaaaataaatattaaatagcat

SEQ ID NO: 76984 - DNA, 980 bp, Homo sapiens
caatcctcccaagacattgtgttttgcaagatcctctggatgtggtatggctaaagggttggggagctgatcaagtgcagagggcaggagcctagggtggtggtggtggagatacaggcacatgactggctttgagaagtacagtacttagtaagtacagtccaatatagtccaatacagtagagttgaatttgtccattcaacagtgttaaacaccatgactctaaggaccagagagccaggctgggttctgcctttaggcagctctcagtcttctgggagtgcaagttggaggcagattggccaggctgaaaatgcaaagtgctcagggatgttcaaatagcaagcatgcctcctggagtgcatgcccagaggaagaaggagcaccttcagtgggtgctttcctgcaaatactgtttgagttccaggcaraagagaaaacagggtgctgggagaggattcattagggtctccttcctgactcctcaccatcatttataggacttttggctacagggatcttccctgcatttcaccggggcctatagtagggctgagagtgtgagagggaacaggggtctccccaagtgcctggggcagcgagccttgtaggtcaggtgagggtggcatccagactgggctctcactctcctcttcctgcctctgactcattttccttggaagtgcattcctctgtaaacctgattactcatggagtctccgccctccacctgcaggcctgtgcccttccctgaggtgtctcagtgagcaagcctgagcccccacccctatccctgcatccccatccccaagtagggcctgggtctcccccttggagtgggagctccctgagggcagggcaggtatgtttctttgcttggcgattagggctcctccaaggccttgaggagggtttctcacccacaggcttgttgccaaccaccctcccgccacccctctgcccctcaaagggctctgag

SEQ ID NO: 76985 - DNA, 528 bp, Homo sapiens
tttgggcttaaaataaataggccatggggactaacaagcataatagttgtggttaggagttactagacagtccctgtactaggcattttatcatgctcacaactacactatatggaaagaattgtcatcatccctacttcattgacaagcagattgaggctcaaagaagacaatgctgtctgacttcagatcctgagttcaacaatgctgtccatgttaagagagtaggaggtataaaaaatggaagaggtatatctggtaatcacaaaaagctagtaataattagcttttagaaatgaggaggtgaaacctcttatgtgaccagggatgacttgtgtaactttgcttgttaggtcacagccaacttttagtatgcagtctctctgtttcatcccatcagcgtrtcataaactgtcaagagtgtgaaaaataccatccaaatctcaacttttcactaacagagcaaggagaggcctcctccgaacggctgcttctgtcatcccaaggctctgttggaggttgatgcca

SEQ ID NO: 76986 - DNA, 750 bp, Homo sapiens
ccgcagaggcttttaaagcacatgccataaaactcttctacagcctactcctctgtatttattgaagacgttccccccagcgccctgtctttatactcatcattctcagtaaaaacatccacagagaatactcatacctggtctatcaggtccctgagtttctcacttgcaaatatctctccctacctcatagtcataccccaggccaatggttcacaatctaggaagtaccactctcctagggagtaattgcaaatgtaaggagtgctactggtatttagagggcagaagttaaggatgctaaatgtcattcagtacatgagactgttatgcacgatgaagaattgttttccccaaatgccaatartgcccttgttatgaaatgccatgctaaccttcaaagtatgtttcacagcatcccactctctgaccaccacttcctatcttttcagggctgctgcctcaggtgacattagcatctctactccaacagttctttgatcctgtggggcctccaatctgttgacttacaggatttatgtacaatccgtcatcctcctgtatcctcactttcctccttgctcagctcagatgctatggttcttctcttctttacatgcacactgaactcctttgctcatctttctctgtcattcttatctggcaaaactatgaccctcattcagctttccacctactttgggcctgagtgtggatggatggaggacacacaactatgctgactgcagt

SEQ ID NO: 76987 - DNA, 750 bp, Homo sapiens
ccgcagaggcttttaaagcacatgccataaaactcttctacagcctactcctctgtatttattgaagacgttccccccagcgccctgtctttatactcatcattctcagtaaaaacatccacagagaatactcatacctggtctatcaggtccctgagtttctcacttgcaaatatctctccctacctcatagtcataccccaggccaatggttcacaatctaggaagtaccactctcctagggagtaattgcaaatgtaaggagtgctactggtatttagagggcagaagttaaggatgctaaatgtcattcagtacatgagactgttatgcacgatgaagaattgttttccccaaatgccaatagtgcccttgttatgaaatgccatgctaaccttcaaagtatgtttcacagcrtcccactctctgaccaccacttcctatcttttcagggctgctgcctcaggtgacattagcatctctactccaacagttctttgatcctgtggggcctccaatctgttgacttacaggatttatgtacaatccgtcatcctcctgtatcctcactttcctccttgctcagctcagatgctatggttcttctcttctttacatgcacactgaactcctttgctcatctttctctgtcattcttatctggcaaaactatgaccctcattcagctttccacctactttgggcctgagtgtggatggatggaggacacacaactatgctgactgcagt

SEQ ID NO: 76988 - DNA, 804 bp, Homo sapiens
gaataacttctgctaagctaggcaaccacatctctccaagccatccttaatgcctaatgactgccactgcacctgacctagctccagggctgaccctttcatgtttaccccaaggccatgcccatctgggaaaccacctgggcaggtaccttccaaccaaattaaagtcaaggattccatccactatcactaaactagcacaaaccaagagagagaaatcaaggcaccacataggggttaggacaagtaatcaaagtcaggtagaaatcccagaagggtggtatacaatttatatttccctagtgaggcccattctagaataatgggaaaggttcactgttgtcagaatgccaagaatgaattctctgaatctggcctyccctgaaatcaacacttaggttctgacaacctctaaattcatcctcactaactacatcaaacatttagcatgctttttattgtggggatgggggttgcttttgtttgatttggtttatctggcatctgaaacaaaagatgggaaaggatgacattcattcttaacctcgtgtatagttaaccacatcaaaaaaggctattgttagatacaaataaacgttaacatacattagttccaaaaggctaaagcctttcaggtgaacattattggacactttctcccctgtgccagacaaaactatgcatggcttattcccagagtcaccccgtcctttccaaggcattctatgctgcctcagggatgcaaacaattatggtacttccaggagagaaggagcacataaattctgtcaccccttgacccca

SEQ ID NO: 76989 - DNA, 802 bp, Homo sapiens
aaggctggcatctggcagaatccaccttaccaacattgtagttacctatgggctgttaggtcctttgrgccttctgcctgacttgccagtgcttagagttcagaagcaaggttaatatataagacccccttagggatgaatgggcctgtaagacctgcaggctaggaaggacacctagcacctggtctaagtgaggacaattaaggaaaagattttgcctcaaggatgcagagaaattgactggagaatccactagggaatctgagcaattatagtgttgtgctgagtaaccctacagaggctttatcttaattatatattttagggtttattaaactaggaactctgtcccctctatgggctaaagagtattttgatattttgattgaaataaaatgggaactagagacactaagaaacagaaactaaccagaaatgctttacttttcctttatttccaatcaaatgcaatgtcaagaaatatctagatgttatctggacttcgcctatcccctgcctgaagttggaattcttctgttgagtaaatagtccttgggtcccagactggcattgttcactaggttggtgggtgcagatggacagttgttgcttgtaactttgcagccaaacttctgaagacatgatcacaagaccattctggatgtctgtgtgtgtggttgggtgggcatgtgggtacaggttatgaccttttcaaaaataattttgttaagccgcaaattgtagacttgtgaatgcaaccaattagaatacttttacttcatttgggataccaaagaacaaa

SEQ ID NO: 76990 - DNA, 802 bp, Homo sapiens
aaggctggcatctggcagaatccaccttaccaacattgtagttacctatgggctgttaggtcctttgggccttctgcctgacttgccagtgcttagagttcagaagcaaggttaatatataagacccccttagggatgaatgggcctgtaagacctgcaggctaggaaggacacctagcacctggtctaagtgaggacamttaaggaaaagattttgcctcaaggatgcagagaaattgactggagaatccactagggaatctgagcaattatagtgttgtgctgagtaaccctacagaggctttatcttaattatatattttagggtttattaaactaggaactctgtcccctctatgggctaaagagtattttgatattttgattgaaataaaatgggaactagagacactaagaaacagaaactaaccagaaatgctttacttttcctttatttccaatcaaatgcaatgtcaagaaatatctagatgttatctggacttcgcctatcccctgcctgaagttggaattcttctgttgagtaaatagtccttgggtcccagactggcattgttcactaggttggtgggtgcagatggacagttgttgcttgtaactttgcagccaaacttctgaagacatgatcacaagaccattctggatgtctgtgtgtgtggttgggtgggcatgtgggtacaggttatgaccttttcaaaaataattttgttaagccgcaaattgtagacttgtgaatgcaaccaattagaatacttttacttcatttgggataccaaagaacaaa

SEQ ID NO: 76991 - DNA, 802 bp, Homo sapiens
aaggctggcatctggcagaatccaccttaccaacattgtagttacctatgggctgttaggtcctttgggccttctgcctgacttgccagtgcttagagttcagaagcaaggttaatatataagacccccttagggatgaatgggcctgtaagacctgcaggctaggaaggacacctagcacctggtctaagtgaggacaattaaggaaaagattttgcctcaaggatgcagagaaattgactggagaatccaytagggaatctgagcaattatagtgttgtgctgagtaaccctacagaggctttatcttaattatatattttagggtttattaaactaggaactctgtcccctctatgggctaaagagtattttgatattttgattgaaataaaatgggaactagagacactaagaaacagaaactaaccagaaatgctttacttttcctttatttccaatcaaatgcaatgtcaagaaatatctagatgttatctggacttcgcctatcccctgcctgaagttggaattcttctgttgagtaaatagtccttgggtcccagactggcattgttcactaggttggtgggtgcagatggacagttgttgcttgtaactttgcagccaaacttctgaagacatgatcacaagaccattctggatgtctgtgtgtgtggttgggtgggcatgtgggtacaggttatgaccttttcaaaaataattttgttaagccgcaaattgtagacttgtgaatgcaaccaattagaatacttttacttcatttgggataccaaagaacaaa

SEQ ID NO: 76992 - DNA, 802 bp, Homo sapiens
aaggctggcatctggcagaatccaccttaccaacattgtagttacctatgggctgttaggtcctttgggccttctgcctgacttgccagtgcttagagttcagaagcaaggttaatatataagacccccttagggatgaatgggcctgtaagacctgcaggctaggaaggacacctagcacctggtctaagtgaggacaattaaggaaaagattttgcctcaaggatgcagagaaattgactggagaatccactagggaatctgagcaattatagtgttgtkctgagtaaccctacagaggctttatcttaattatatattttagggtttattaaactaggaactctgtcccctctatgggctaaagagtattttgatattttgattgaaataaaatgggaactagagacactaagaaacagaaactaaccagaaatgctttacttttcctttatttccaatcaaatgcaatgtcaagaaatatctagatgttatctggacttcgcctatcccctgcctgaagttggaattcttctgttgagtaaatagtccttgggtcccagactggcattgttcactaggttggtgggtgcagatggacagttgttgcttgtaactttgcagccaaacttctgaagacatgatcacaagaccattctggatgtctgtgtgtgtggttgggtgggcatgtgggtacaggttatgaccttttcaaaaataattttgttaagccgcaaattgtagacttgtgaatgcaaccaattagaatacttttacttcatttgggataccaaagaacaaa

SEQ ID NO: 76993 - DNA, 809 bp, Homo sapiens
gttgcatttgtttccttttgactatttcaaaggctgcaggtggtgagtctccatccaggatagcagcaagtagactgttcttttcacagaaatccttatccctacactaaagaaacatccgtccctatctctaccagtagtatattttgcaatgaatgataaacctcaaaagtgaaaggttcagtcagaaacccaagccactccactttgatctgatctgtcccactgtgtctctcatttagcttaagaacatgccttccccatcacagagtcttgtcctaagctagcctgttcatccttcagccacagctaaaaggagatgctcttactgttggctcccatgccatcaggaatggttgtaggagtgagggcgttgcgctgctgagggttgataagctggctcacagaaggcagcttgttcatgctgttcattttgttcagaggtggggagctgttaccatatgaagatggagactgtattgaggtcctaggaagacaaacatggaaataatggtgagcamgggacactgaagagtggggactattgattttcaacaggtctctgtttaaaacatggcctcaaaccaaacatttgaaaacattcttctaggattaatggtaagaagttaattttgtttccatctgagaatatttcctgaatagggagaaactgactgcgaggctatcatcaaatcatatttttcctgaatgtgcagagtgcaaggtttagtatttcctttgagaaagagaaaattcttgcctcctcttttcccttcagttgttttctccattcccttctcctcttttcc

SEQ ID NO: 76994 - DNA, 990 bp, Homo sapiens
  misc_feature (1)...(990): n = A,T,C or G
cacagctttgagtatacgacgccaatcttacaactttgattctcattaataaaaaagaattttgaaccaccactacacagacactgccaactgtctcctaaaccacttaatacaatgatctccatgtaacaagcaatgatatatttttaaaaaatgtaattaatttacccatntaacacatttttaaaattatttttgagacggagtcttgctctgttgccaggctggagtgcaatggcgcgatcttggctcactgcaatctctgcctccagggttcaagcgattctcctgcctcagcctccgaagtagctgggactatgggcacacaccaccatgcccggctaatttttgtatttttagtagagatggggtttcaccatgttggccaggatggtctcgatctcctgaccttgtgatccgcccacttcacatatttacatatgctttagtcatggagaatttcaatagagagatccatttacctcacatcagaaaaataaaaattcacattagttatcgttttcatggtggaatctaaaatatgctcaatccattttagtgtgaagaaatgaaaactaattgttgctgaacaatataaaatcacagaatggcatgtaagattcaactgtatctgcttttgaccattttgccactcaattattaaaaactagaagtagtagactcacaagtgcccagtccctgcagtcttgtgaaatataatcaactcttaacacaaaaacataaactgccctgttttaagacctaacatcccataatagtaaagctttcccttttcaaatgtaattgcacatttttagctactgtctttccttccattaaatcttgcctgaaatgagctcttcctgccacttttacctttgtcctcaattctgtgcactcagaattattttgactgtcaaaatcactaattttggatttcatctttctcaactttaatcttctcaatctcttacatatcaatamagataa

SEQ ID NO: 76995 - DNA, 758 bp, Homo sapiens
agaggccaacgaatgctggaaggagcctcctgcttacacatttcgagactataggtatagctagaacctgcttcaaaacaaagcttttacctaacagttttcaagcagtgaaaactggaaaggtgctctgttttgcttgacgtcgtgttcatatctccaaggcagaaattctcaaataatcttctgaagtagctgccataaccaataagtggcattatcatctcacttttatcttaaaaattgtgcacagtttgcatcccatttcacaaaatgtccattttgttttaatatgaaaagtaaattttatgttcttttaaaaaaattcctgttctccctggaacatattccttgtggtatatgtatttcagtcagaatacaagggcatggagtcttggcctacataaggactttatcacatcaattatctttattcatacccaagaagaactatgtctgcattttataaataagacactagaaactcaggagaaaagaatgtccttacctattgagagagatttcagtgtgtaaggaatcaggagttatagtcaccatgtgttcatccttactacactgtactcgattccaaaacatttattaagcacccgctatctgcaaggcgtggctaggccacaaggaactcttcagcaagttaaagagaaaaacaacaacaagaacaaagcaaacaaacaaacaaaaatcctttagagttatwtaagggaaaaagagagttgtaattagggtgggcacgttcaaag

SEQ ID NO: 76996 - DNA, 892 bp, Homo sapiens
gcatacatatacatcatggccccttgttacaggattccttcagtaccgtttgaccagccagaaatctctgtggccgtcacctctgtctgggcctcacttgggcccactggacttgctctgcccacttgacccagcaggctgtgcttggcttgtgccctggtctggatcccatacccactgtggctccacgctcagcccattgttggacctggcatgctgtgagcggcttcagcatcgggcgctgacgtccagatgaggggaacgctgtggcacccaaaaactcagaaaggccagcaattgcggagccccaaggggtgttacagctcttgcttggggattctcgaggtctgagctccccaaaaatgtcacagctcttcactcctaaagctcagttagtgggagtgtgttacaagcccttttattcccaccactcgcagcttggygagcagaagtgtgtggcactaagaggcttttttgactctcacagtttagcaagcaagagcgtggtacagcatttttacttctgccaccagcagcttgctgggttctgggtttgtaaccttcaaccaagaggaataaggtgcgtggacaccagagagtgagtaaggcagaaaagaattttaccgagtgacagaaagaaagctctcagtggagagaggactccagaactagtagccaactgtgcggctgagtccatagtttttatgggcttagaatgaggtaatgctggcgggcacctgtagtaccagctactcgggaggttgaggcaggagaatggcgtgaacccaggaggcggaccttgcagtgagcggagatcatgccactgcactccagcctgggcgacagagcgagattccctctaaaaaacaaacaaacaaacaaaacaatgagg

SEQ ID NO: 76997 - DNA, 892 bp, Homo sapiens
gcatacatatacatcatggccccttgttacaggattccttcagtaccgtttgaccagccagaaatctctgtggccgtcacctctgtctgggcctcacttgggcccactggacttgctctgcccacttgacccagcaggctgtgcttggcttgtgccctggtctggatcccatacccactgtggctccacgctcagcccattgttggacctggcatgctgtgagcggcttcagcatcgggcgctgacgtccagatgaggggaacgctgtggcacccaaaaactcagaaaggccagcaattgcggagccccaaggggtgttacagctcttgcttggggattctcgaggtctgagctccccaaaaatgtcacagctcttcactcctaaagctcagttagtgggagtgtgttacaagcccttttattcccaccactcgcagcttggcgagcagaagtgtgtggcactmagaggcttttttgactctcacagtttagcaagcaagagcgtggtacagcatttttacttctgccaccagcagcttgctgggttctgggtttgtaaccttcaaccaagaggaataaggtgcgtggacaccagagagtgagtaaggcagaaaagaattttaccgagtgacagaaagaaagctctcagtggagagaggactccagaactagtagccaactgtgcggctgagtccatagtttttatgggcttagaatgaggtaatgctggcgggcacctgtagtaccagctactcgggaggttgaggcaggagaatggcgtgaacccaggaggcggaccttgcagtgagcggagatcatgccactgcactccagcctgggcgacagagcgagattccctctaaaaaacaaacaaacaaacaaaacaatgagg

SEQ ID NO: 76998 - DNA, 892 bp, Homo sapiens
gcatacatatacatcatggccccttgttacaggattccttcagtaccgtttgaccagccagaaatctctgtggccgtcacctctgtctgggcctcacttgggcccactggacttgctctgcccacttgacccagcaggctgtgcttggcttgtgccctggtctggatcccatacccactgtggctccacgctcagcccattgttggacctggcatgctgtgagcggcttcagcatcgggcgctgacgtccagatgaggggaacgctgtggcacccaaaaactcagaaaggccagcaattgcggagccccaaggggtgttacagctcttgcttggggattctcgaggtctgagctccccaaaaatgtcacagctcttcactcctaaagctcagttagtgggagtgtgttacaagcccttttattcccaccactcgcagcttggcgagcagaagtgtgtggcactaagaggcttttttgactctcacagtttagcaagcaagagcgtggtacagcatttttacttctgccaccagcagcttgctgggttctgggtttgtaaccttcaaccaagaggaataaggtgcgtggacaccagagagtgagtaaggcagaaaagaattttaccgagtgacagaaagaaagctctcagtggagagaggactccagaactagtagccaactgtgcggctgagtccatagtttttatgggcttagaatgaggtaatgctggcgggcacctgtagtaccagctactcgggaggytgaggcaggagaatggcgtgaacccaggaggcggaccttgcagtgagcggagatcatgccactgcactccagcctgggcgacagagcgagattccctctaaaaaacaaacaaacaaacaaaacaatgagg

SEQ ID NO: 76999 - DNA, 862 bp, Homo sapiens
cacacggtaagaaaggaagcaagagagaaaaaccaaggagccagaatctttttaacaacccacttgcccctctggtatggcaatctactcatgacccaaacacctgctactaggcactaccttccaaaactgcmccactgaaaatcaaattttaacatgagttttggtggggacaaaccacatccaaagcacagcaaggagaaatgtactttcaattggctgtgaagcacacataatttataattatgtcctaacaagctgcattattctgccatccagaacagaacatatagttttcaacatataaaaaaattgcaaaaaatgaaattaaactacattttataaaagtaatatttaatattaagagatttaaatttaggatcatgtgctttctcttttatgttcctctaaatgtttgaaactttataaagcaaatgttcaaaataatttaagggttctgtgatgactggaaaccattttacaaagttctccaagtttatgttatgattttcttaaaataagttggaattctttaaggactatatatcctacaagctgtttactaacacatttcagtttctgaagctttcaggaaattgcaattaaaatataaaagtgctcacattattttttaaattgaactttgaaatatatttacttgtggggagaaactttttgtggagctaatatttttacttggatgaatttatcttttgaacaaaaatagaagaaaactgagagtccctacaatattttagcatccaaattaggaaaaacattcaaaaatatcataaatgtagataacttatttgatgatttaattcttgaaaatattatttgaagattgatactctaagagtaa

SEQ ID NO: 77000 - DNA, 2386 bp, Homo sapiens
tgaacagttttgacaagagccaagtcttcccagagcttaaggacaattaacacttcaataaacaagatggcttaagatggagaagataaaacagggtgatgtgctgggccagagtcggtgaatgaatgaatgggcaaatagcaagaatgcaattttcagtccaacaacacaataggaaaatgttattgcctctaacaggtaggaagatgaaccagtgaagaagatactagtattagtcccatggtcccagtgaggaatcaaaagtatggggtcatacctagggtctaatcagccctctgagtagaagggcrggggatataccaactcctcagataaagaaaaattatctcaaagcagccaccttttaaaagtgtctactgccaagcttctgccagacactttacccacaggatcctctagacaactgtctgatcatctttataggtaaggccatcaaggctcagagacttgctcaagatcacccagctggaaagtggcaagtctggctggctccaagcactgtgtgctttctggaatagtgggtgcccccagccacagagccataccacccaacttctcagccttccaaagagagctgccctgaggacccaatcagcccacagcctgcagctgctgtgcctgcaaaacctgccaagtagccaggctgaggccacactctgctagccaaaagcccagtgtggcagcagtaccagggcctgggcattcctgctcagcttggggctcctctgtggacagtctatcagggagtcccactgggccggagagattttctcagagctgtgctgcaggctaacactcttcttacccaatctgcctgccttattctctcttcttagaaggctcaaacccacagtatggtctcaggcaatccccacccactcctgctccttctcctctggatttcttgcaggtgattcctgccataaatcccttgcacttcttgctccgtcatcttggcatctgcttttcagtgttcctaactggcacgacacatcatccaaaccacaaggaagacttctcagttatggaatcatgcagtacatggcatatgagggtggctcctctgtgcttctaaggttccagtggtggagaaacctctgacagctaaagcctggagccctctgaccatttgcacagcagcctggctcaggggagcaggtccaggctgagagtcagacagggcttggtgtccctgcagcagctccttcggctctctgggcctcagtcttcctcatctataaaataggcgtgctgacactttccccgtagtactgtcttaagaactggataaagcacctgctttgaaggtcagataaccaggagtgtgggattttagatccatgtcactagagtctagatgatcagagttggaaaatgtcatagagccctacattttcattatttgtgtagggaactgggaacatggaagggaagatcttaggcaagcagggacggcaggccacagcagaggcaggccaggtcccgtggcccagcccggagcctcagaatgccttccattcccattcagcaccagctttgcccgcaaccacagggagcccaggccaggatcccaacctcccccctttccccaggcaacccagggggcatggtgggaccagagggagaacccagtaagacctggcattaacatgaagactatctgtgggcagtcagaggcgcccagcctgcaacagaggccaaagggcaggcgaaggtggaggaggcggggtgctttttctccgctggtcccatcactgctaatgtggtctcagggcctcctctctggaagagcaaactgacctccggagaaaacagttggaacaggaaaaacagagagatgccagggacccaaggggcactcagagacagggtcagcccttattggagttagagaggcagacagaagacagagaggcccagggatggagaggggaagtgcaaaacagatggccggggagggatgcggaggagaggcggaggtgtgcgctgggggagaggactaccgacggcgctggcggtcgggatgggctggagcgggctgcagtcggggctgcatcgccgggtcccagcatagcgcaggctcggcgccgcacccgcagcctttgtcctgagctgcagagggttcccgcgggccgccagcgccccctgccgcccccagagcgccgcgccgcagccgagcggcccctagctgtgcagaggggaccgagcccgagaagggaccgagcccgagaggggaccgcgagggcgggagggaagctccgcgagccggcgccagcgccacggcccaaaccccagcctctacaggtgctcactgcgcgactgcctgtcccaggcgctcgggctgggcgccctctctagggcctgg

SEQ ID NO: 77001 - DNA, 666 bp, Homo sapiens
tatgcgacctgaaccaaacccctccactgacctcctccacacagatttctgtggtayttctcgaacgtgccacaaacactctttcccccaggacccttgcaccttctgcctgactgctctgccacaccactccttcacctctgcgtagctggctcctttttggcacccagcccccccaccctcccctcacacctcccctcccttgccaccagagagcacacaggattgacttccacaatcacagggacttcaaggaagggaatgaaagggggcaatggaaagactgagcatgtaccccaatatagtcagacatacacacacacatacacatgagtacaaacacacacacacgagtacatacacaggagtacacacacacaagtacacaaacaaacacacatgagtacacacacacaagtatacacacatgagtataaacacacaagtacacactcacacaaacacacatgagtacacacacacacataagtatacacacacacacagcagagtaggcacatgtgcggaaatcggatctgttctggagaaagaaggtttgtgcatctgagctgtaatgccagtaagtctgtgattttgcttcaaatgcttccatttccctggccacagtgattggtctgccccaaactggccactcagagccaatct

SEQ ID NO: 77002 - DNA, 666 bp, Homo sapiens
tatgcgacctgaaccaaacccctccactgacctcctccacacagatttctgtggtatttctcgaacgtgccacaaacactctttcccccaggacccttgcaccttctgcctgactgctctgccacaccactccttcacctctgcgtagctggctcctttttggcacccagcccccccaccctcccctcacacctcccctcccttgccaccagagagcacacaggattgacttccacaatcacagggacttcaaggaagggaatgaaagggggcaatggaaagactgagcatgtaccccaatatagtcagacatacacacacacatacacatgagtacaaacacacacacacgagtacatacacaggagtacacacacacaagtacacaaacaaacacacatgagtacacacacacaagtatacacacatgagtataaacacacaagtacacactcacacaaacacacatgagtacacacacacacataagtatacacacacacacagcagagtaggcmcatgtgcggaaatcggatctgttctggagaaagaaggtttgtgcatctgagctgtaatgccagtaagtctgtgattttgcttcaaatgcttccatttccctggccacagtgattggtctgccccaaactggccactcagagccaatct

SEQ ID NO: 77003 - DNA, 655 bp, Homo sapiens
tctgcccttgacctaccacatcaccagagcagccacagacataccccataacttgctctgattccagcaagcacaggggactggtaagttgccagggagtcatggaactcttgacacagactgaccctaaggggaggggagcacaggctgccaaattaccccttggggccaaggaaacatgagcatggcaccaatgattgaagtggaaaccatcaaggcccagaaatggacttagagagggagtcgtctcttgcccctgcttttcctctctagaggactgctgcaagagacactaaaatacaaaagggtgaactgcagctgagtaggagcmtatctgctggctcttacccttaagcaccattaatggactgcaacctaaattacactacccaataaaaatacactgtttcaacatatggtgtctgtgaaacccacttcaggaacttatctacaaccaaggaacccctacagggccttggtcctctgaaagcacctagatatgaagccaattgacaatacatagcataagccacagtcaaatcctcatggggaaaaataatataaaatcaaaaagcccaatccaaatgatagcaaattcaaaagaaaaagtagcaccagctccctcagataggaaggaatcagcacaagaactaca

SEQ ID NO: 77004 - DNA, 1504 bp, Homo sapiens
taactgaactgccttgaacaaatcacttaacgtctcacaacattagtatccacatatacttcaattcacacttcatagagttgtggtaaaagtaatatgtatttaaatttagtttataaatatatttgaatgtttaccatagtacctggtatattttattcagttgataaatgkcagttaatatgtttttgggcttcctttatgccccagtatatttcttcagaatatttccccacattgtcttcttacccatattttgcatgtatgtgggtttgggttcatattttaggctccgctaaatgtcttctttgcagaaagaaccttgctggccatcccatcaaatgagggccccctccttttttccaccttactccttcaatttctcatttggtagcatatcacaatttgtagtcattttgtttattctcaaatgcttttaaatgcattttcaccaagaatgaaggcattataatagaatttttttcaattactcttttttcctccctccctacctcccttttcctcttgtctctttctttccattagctaatataatgacaagaacatagcaggtgtttaataactatgcaaattatttcatcagtaatttttccatttattctaaaactttcttattttgctgcacagtaaattttgtttttgtcaattcctaacactttcactcctctaaagctctaactttttaccttgttttcataacttctcttatttcagtctctgactttcacatggcctctttcatcactttcatttccttaaaaggttaagatgatgtcaaaagcataccctttgatcctgagaatgtagtatatttttatcatttctcttcctataggttttatatagtataattattatccattttatttatttaactttttcataggttctatgctgccttttgtggttatttactcacttttaagtgaaagcaaatgtctccaggtctgaacaaacggcatgtttgcaggactaaactgtttccatgtcccctcactgcttatctgaatgatgttgaagacctcctgtgaccttaaccacagaggtataaaatatatcatctatctatctatctatctatctatctatctatctatctatctaacagtttaatctttcataggctaatggagtctaggaatataactagcatcaaacacattcagtagaggacactctttgcctaattttctctctcattatcccaagatctttccaaatctaggataacaagtattaaaattttacattctatatattgtcttttaaacagaagtattttttcctataagaatcttgacaagctcatatcatttgacccagccatcccaatactgggtatatacccaaaggattataaatcatgctgctataaagacacatgcacacgtatgtttattgtggcactattcacaatagtacagacttggaaccaacccaaatgtccaacaatgatagactggattaagaaaatgtggcacat

SEQ ID NO: 77005 - DNA, 1504 bp, Homo sapiens
taactgaactgccttgaacaaatcacttaacgtctcacaacattagtatccacatatacttcaattcacacttcatagagttgtggtaaaagtaatatgtatttaaatttagtttataaatatatttgaatgtttaccatagtacctggtatattttattcagttgataaatggcagttaatatgtttttgggcttcctttatgccccagtatatttcttcagaatatttccccacrttgtcttcttacccatattttgcatgtatgtgggtttgggttcatattttaggctccgctaaatgtcttctttgcagaaagaaccttgctggccatcccatcaaatgagggccccctccttttttccaccttactccttcaatttctcatttggtagcatatcacaatttgtagtcattttgtttattctcaaatgcttttaaatgcattttcaccaagaatgaaggcattataatagaatttttttcaattactcttttttcctccctccctacctcccttttcctcttgtctctttctttccattagctaatataatgacaagaacatagcaggtgtttaataactatgcaaattatttcatcagtaatttttccatttattctaaaactttcttattttgctgcacagtaaattttgtttttgtcaattcctaacactttcactcctctaaagctctaactttttaccttgttttcataacttctcttatttcagtctctgactttcacatggcctctttcatcactttcatttccttaaaaggttaagatgatgtcaaaagcataccctttgatcctgagaatgtagtatatttttatcatttctcttcctataggttttatatagtataattattatccattttatttatttaactttttcataggttctatgctgccttttgtggttatttactcacttttaagtgaaagcaaatgtctccaggtctgaacaaacggcatgtttgcaggactaaactgtttccatgtcccctcactgcttatctgaatgatgttgaagacctcctgtgaccttaaccacagaggtataaaatatatcatctatctatctatctatctatctatctatctatctatctatctaacagtttaatctttcataggctaatggagtctaggaatataactagcatcaaacacattcagtagaggacactctttgcctaattttctctctcattatcccaagatctttccaaatctaggataacaagtattaaaattttacattctatatattgtcttttaaacagaagtattttttcctataagaatcttgacaagctcatatcatttgacccagccatcccaatactgggtatatacccaaaggattataaatcatgctgctataaagacacatgcacacgtatgtttattgtggcactattcacaatagtacagacttggaaccaacccaaatgtccaacaatgatagactggattaagaaaatgtggcacat

SEQ ID NO: 77006 - DNA, 1504 bp, Homo sapiens
taactgaactgccttgaacaaatcacttaacgtctcacaacattagtatccacatatacttcaattcacacttcatagagttgtggtaaaagtaatatgtatttaaatttagtttataaatatatttgaatgtttaccatagtacctggtatattttattcagttgataaatggcagttaatatgtttttgggcttcctttatgccccagtatatttcttcagaatatttccccacattgtcttcttacccatattttgcatgtatgtgggtttgrgttcatattttaggctccgctaaatgtcttctttgcagaaagaaccttgctggccatcccatcaaatgagggccccctccttttttccaccttactccttcaatttctcatttggtagcatatcacaatttgtagtcattttgtttattctcaaatgcttttaaatgcattttcaccaagaatgaaggcattataatagaatttttttcaattactcttttttcctccctccctacctcccttttcctcttgtctctttctttccattagctaatataatgacaagaacatagcaggtgtttaataactatgcaaattatttcatcagtaatttttccatttattctaaaactttcttattttgctgcacagtaaattttgtttttgtcaattcctaacactttcactcctctaaagctctaactttttaccttgttttcataacttctcttatttcagtctctgactttcacatggcctctttcatcactttcatttccttaaaaggttaagatgatgtcaaaagcataccctttgatcctgagaatgtagtatatttttatcatttctcttcctataggttttatatagtataattattatccattttatttatttaactttttcataggttctatgctgccttttgtggttatttactcacttttaagtgaaagcaaatgtctccaggtctgaacaaacggcatgtttgcaggactaaactgtttccatgtcccctcactgcttatctgaatgatgttgaagacctcctgtgaccttaaccacagaggtataaaatatatcatctatctatctatctatctatctatctatctatctatctatctaacagtttaatctttcataggctaatggagtctaggaatataactagcatcaaacacattcagtagaggacactctttgcctaattttctctctcattatcccaagatctttccaaatctaggataacaagtattaaaattttacattctatatattgtcttttaaacagaagtattttttcctataagaatcttgacaagctcatatcatttgacccagccatcccaatactgggtatatacccaaaggattataaatcatgctgctataaagacacatgcacacgtatgtttattgtggcactattcacaatagtacagacttggaaccaacccaaatgtccaacaatgatagactggattaagaaaatgtggcacat

SEQ ID NO: 77007 - DNA, 771 bp, Homo sapiens
agaaaggtggcctcccatctgaagtcgtgtcatctcccgccagtgtggcggagtctggggtttttataggcacaggatgggggaggggcaggccgttggtagtataggaaaaggcaacatttgatgggttaaaaattattattcagaaagaatcaatattggaaagggcaggcaaacaagaacagaagttctcactctgggtcatggctttcatccagaatcagcaggctgtttttggcttgaaggaggggtttctctaggtatgcacccctatctgcgtaggcattgtatggctcctgtcastatcaaatatagatgatatctactttacatgacctttcacatatgttcacaagtatctcagtctggagatgaatatcaatgatactaaacattttcacattgtgatttagattgatatttccaattaataaaattattttttgtcttttttgaaaagctgcactttcagttcactcttttcgaacagaaaacaaaattacctaggtattagggatagtttagcttaataataaaagtagatttatttatttttaccaaaggagcatattaattttgaagatcagattgactcatataaatagtggaataaacaatttattttaaatttgttttgccttcaacaattatatagactaaaagggttttccttgaaaagaatgaagaactgagaggaaatatgtgaaattataaatacatattatcctcaatatggaatatcagaaaaaaattgattatgcctacaatgca

SEQ ID NO: 77008 - DNA, 771 bp, Homo sapiens
agaaaggtggcctcccatctgaagtcgtgtcatctcccgccagtgtggcggagtctggggtttttataggcacaggatgggggaggggcaggccgttggtagtataggaaaaggcaacatttgatgggttaaaaattattattcagaaagaatcaatattggaaagggcaggcaaacaagaacagaagttctcactctgggtcatggctttcatccagaatcagcaggctgtttttggcttgaaggaggggtttctctaggtatgcacccctatctgcgtaggcattgtatggctcctgtcactatcaaatatagatgatatctactttacatgacctttcacatatgttcacaagtatctcagtctggagatgaatatcaatgatactaaacattttcacattgtgatttagattratatttccaattaataaaattattttttgtcttttttgaaaagctgcactttcagttcactcttttcgaacagaaaacaaaattacctaggtattagggatagtttagcttaataataaaagtagatttatttatttttaccaaaggagcatattaattttgaagatcagattgactcatataaatagtggaataaacaatttattttaaatttgttttgccttcaacaattatatagactaaaagggttttccttgaaaagaatgaagaactgagaggaaatatgtgaaattataaatacatattatcctcaatatggaatatcagaaaaaaattgattatgcctacaatgca

SEQ ID NO: 77009 - DNA, 771 bp, Homo sapiens
agaaaggtggcctcccatctgaagtcgtgtcatctcccgccagtgtggcggagtctggggtttttataggcacaggatgggggaggggcaggccgttggtagtataggaaaaggcaacatttgatgggttaaaaattattattcagaaagaatcaatattggaaagggcaggcaaacaagaacagaagttctcactctgggtcatggctttcatccagaatcagcaggctgtttttggcttgaaggaggggtttctctaggtatgcacccctatctgcgtaggcattgtatggctcctgtcactatcaaatatagatgatatctactttacatgacctttcacatatgttcacaagtatctcagtctggagatgaatatcaatgatactaaacattttcacattgtgatttagattgatatttccaattaataaaattattttttgtcttttttgaaaagctgcactttcagttcactcttttcgaacagaaaacraaattacctaggtattagggatagtttagcttaataataaaagtagatttatttatttttaccaaaggagcatattaattttgaagatcagattgactcatataaatagtggaataaacaatttattttaaatttgttttgccttcaacaattatatagactaaaagggttttccttgaaaagaatgaagaactgagaggaaatatgtgaaattataaatacatattatcctcaatatggaatatcagaaaaaaattgattatgcctacaatgca

SEQ ID NO: 77010 - DNA, 571 bp, Homo sapiens
tgtcttcatatctgatagattatatggtagttacatttctttacttttttatgaaatttacttagccatgggcttattcattcaaaactttgaattttaagtatkaactttgttttcattttgttgatttttttcaaaaataacttaggaaaaaattaattttaaatttcattgaatttaaatttgaaagaaaagttttatatttgtcatattaacttattcaaatacaggataactcttcatttatgtctttttgggttttcaaattttccacaaggagctatagagttccattaattttatatgtatcataagtttttatgctatttagaatattataatttttattttcttgtaattatcacttaagtaggagaacactataacttttttagaagtctcttattagtcctaatagcctggttttataatattttctgtgtagataatcttatcatctatgtataataagagttgtatctcctttctctctaatgctataccttttacatcctttttgttttttattatatcttccaagacctccaatactttgttgagctgtaacaat

SEQ ID NO: 77011 - DNA, 1269 bp, Homo sapiens
taatatttaatccagaaatttcctgcactctagcattcacaactcttttttttcaagacaaggtctgtctctgttgtccaggctacagtgcagtggctccatcacagctcacttgcagcctcaacttcccaggatcaagcaatcctcttgcctccatctcctgagtagctggtattacaggcatgtgccaccatgcctagctatttttttatttttttattttttgtagaaacagggtctggttgtgttgcccaggctggtcttgaactcccgggctcgaagatcttcctgccttggcctcccgaagtgctgggattacaggcatgagccaccacatctggccctgcattcacacctttgggttaagaaggtttcaatatcctaaaagacttatgtataaatgtcctaataccctgaacaaatcataatggacaggtaaaaaactgattttgaattaacattatagtttttcttttaagctgaatactggggataaatacatagaagcacacagaaaccagtaaataatccttttattttgttcccacaactaaagtggtatgtgaaaaactgaagaggatgtagaaaagtgcatgcatacaaacaggtgcatgatggcaaaggactggcttattcagttgtaaatctagcggtcaacttaatatccctgtttcagacaaaggatggcaatgaactgagccttctacaatggaaagaagaccattttaaactgcagcaagaaagccttaacgatttggagaaatgtattctcttagygtgcagttaatcattttagttactgagggaggttttgaaatctctttccctgcagatatttttttaattggatagattttaattttctagaatgtcatgttagaattctgccctacgagggcaagaaggagggagtgaggatggagattatctcaacaaggtccctcatccagggaccagggcttccaatctttccttctccccccagtcaatttcccttctttctcctttttcttctctctctttctctcatgacattaagttggtttgtgcttacatgagaagcaataaactttgtttctctttgctttatttctcatgaccacatgctttcacctatgtccattctataatgtgccacagattgcaaaatttaatggtaggaacagtgtgtatgtgtatgtaggtgtgtgtatctgtgtagggatgtgtgtgtgggggggtggggtggggaatagtggggtggagctagaaagggagtttcacaatgga

SEQ ID NO: 77012 - DNA, 1269 bp, Homo sapiens
taatatttaatccagaaatttcctgcactctagcattcacaactcttttttttcaagacaaggtctgtctctgttgtccaggctacagtgcagtggctccatcacagctcacttgcagcctcaacttcccaggatcaagcaatcctcttgcctccatctcctgagtagctggtattacaggcatgtgccaccatgcctagctatttttttatttttttattttttgtagaaacagggtctggttgtgttgcccaggctggtcttgaactcccgggctcgaagatcttcctgccttggcctcccgaagtgctgggattacaggcatgagccaccacatctggccctgcattcacacctttgggttaagaaggtttcaatatcctaaaagacttatgtataaatgtcctaataccctgaacaaatcataatggacaggtaaaaaactgattttgaattaacattatagtttttcttttaagctgaatactggggataaatacatagaagcacacagaaaccagtaaataatccttttattttgttcccacaactaaagtggtatgtgaaaaactgaagaggatgtagaaaagtgcatgcatacaaacaggtgcatgatggcaaaggactggcttattcagttgtaaatctagcggtcaacttaatatccctgtttcagacaaaggatggcaatgaactgagccttctacaatggaaagaagaccattttaaactgcagcaagaaagccttaacgatttggagaaatgtattctcttagcgtgcagttaatcattttagttactgagggaggttttgaaatctctttccctgcagatatttttttaattggatagattttaattttctagaatgtcatgttagaattctgccctacgagggcaagaaggagggagtgaggatggagattatctcaacaaggtccctcatccagggaccagggcttccaatctttccttctccccccagtcaatttcccttctttctcctttttcttctctctctttctctcatgacattaagttggtttgtgcttacatgagaagcaataaactttgtttctctttgctttatttctcatgaccacatgctttcacctatgtccaktctataatgtgccacagattgcaaaatttaatggtaggaacagtgtgtatgtgtatgtaggtgtgtgtatctgtgtagggatgtgtgtgtgggggggtggggtggggaatagtggggtggagctagaaagggagtttcacaatgga

SEQ ID NO: 77013 - DNA, 1269 bp, Homo sapiens
taatatttaatccagaaatttcctgcactctagcattcacaactcttttttttcaagacaaggtctgtctctgttgtccaggctacagtgcagtggctccatcacagctcacttgcagcctcaacttcccaggatcaagcaatcctcttgcctccatctcctgagtagctggtattacaggcatgtgccaccatgcctagctatttttttatttttttattttttgtagaaacagggtctggttgtgttgcccaggctggtcttgaactcccgggctcgaagatcttcctgccttggcctcccgaagtgctgggattacaggcatgagccaccacatctggccctgcattcacacctttgggttaagaaggtttcaatatcctaaaagacttatgtataaatgtcctaataccctgaacaaatcataatggacaggtaaaaaactgattttgaattaacattatagtttttcttttaagctgaatactggggataaatacatagaagcacacagaaaccagtaaataatccttttattttgttcccacaactaaagtggtatgtgaaaaactgaagaggatgtagaaaagtgcatgcatacaaacaggtgcatgatggcaaaggactggcttattcagttgtaaatctagcggtcaacttaatatccctgtttcagacaaaggatggcaatgaactgagccttctacaatggaaagaagaccattttaaactgcagcaagaaagccttaacgatttggagaaatgtattctcttagcgtgcagttaatcattttagttactgagggaggttttgaaatctctttccctgcagatatttttttaattggatagattttaattttctagaatgtcatgttagaattctgccctacgagggcaagaaggagggagtgaggatggagattatctcaacaaggtccctcatccagggaccagggcttccaatctttccttctccccccagtcaatttcccttctttctcctttttcttctctctctttctctcatgacattaagttggtttgtgcttacatgagaagcaataaactttgtttctctttgctttatttctcatgaccacatgctttcacctatgtccattctataatgtgccacagattgcaaaatttaatggtaggaacagtgtgtatgtgtatgtaggtgtgtgtatctgtgtaggratgtgtgtgtgggggggtggggtggggaatagtggggtggagctagaaagggagtttcacaatgga

SEQ ID NO: 77014 - DNA, 1269 bp, Homo sapiens
taatatttaatccagaaatttcctgcactctagcattcacaactcttttttttcaagacaaggtctgtctctgttgtccaggctacagtgcagtggctccatcacagctcacttgcagcctcaacttcccaggatcaagcaatcctcttgcctccatctcctgagtagctggtattacaggcatgtgccaccatgcctagctatttttttatttttttattttttgtagaaacagggtctggttgtgttgcccaggctggtcttgaactcccgggctcgaagatcttcctgccttggcctcccgaagtgctgggattacaggcatgagccaccacatctggccctgcattcacacctttgggttaagaaggtttcaatatcctaaaagacttatgtataaatgtcctaataccctgaacaaatcataatggacaggtaaaaaactgattttgaattaacattatagtttttcttttaagctgaatactggggataaatacatagaagcacacagaaaccagtaaataatccttttattttgttcccacaactaaagtggtatgtgaaaaactgaagaggatgtagaaaagtgcatgcatacaaacaggtgcatgatggcaaaggactggcttattcagttgtaaatctagcggtcaacttaatatccctgtttcagacaaaggatggcaatgaactgagccttctacaatggaaagaagaccattttaaactgcagcaagaaagccttaacgatttggagaaatgtattctcttagcgtgcagttaatcattttagttactgagggaggttttgaaatctctttccctgcagatatttttttaattggatagattttaattttctagaatgtcatgttagaattctgccctacgagggcaagaaggagggagtgaggatggagattatctcaacaaggtccctcatccagggaccagggcttccaatctttccttctccccccagtcaatttcccttctttctcctttttcttctctctctttctctcatgacattaagttggtttgtgcttacatgagaagcaataaactttgtttctctttgctttatttctcatgaccacatgctttcacctatgtccattctataatgtgccacagattgcaaaatttaatggtaggaacagtgtgtatgtgtatgtaggtgtgtgtatctgtgtagggatgtgtgtgtgggggggtggggkggggaatagtggggtggagctagaaagggagtttcacaatgga

SEQ ID NO: 77015 - DNA, 513 bp, Homo sapiens
caaagtgcaagataagccagtagaaattaatatggtactcatgagtcttctttatttccaggtacaaccatagacttttttaaactttagctaagtcgtcctttatacttctcccaaggatatagtaagagaatatgttagattaccatttgtatctgcagcaattgtgccatattgaacattttattacaataagcaatattatcacaaggctggtgtatcagggttctggacacctcatggccccgtcaagttgtcacataaaattaaccatcacagctggatttataaaattataaataaagccgtattctcattctatagaatacagcgtaagacacacctctgcttgttagcctgagaaccaaycaggaattcatcttttggggcaagggcatacctggagttgagggattcccctcacagatattttcctgtctcttctgaagggccagtcttctcgggagttgaagtgagtggttgctaagtgtggagtcagcagtagactgggaa

SEQ ID NO: 77016 - DNA, 1995 bp, Homo sapiens
aaatgtttcaaagggaaatatgtttattccttttgaaactcacgttgaaactgaatccccaaggtaacagtattgagaggcggggcctttaggaggcgggtaatcccttcgtggattggtagatcagtgggttctcacaggaggggttggttaccacaagcatggggctgttataatggccacgctctgatgcagtacgaggccctggccagaagcccatcggatgcggctcctgaacctgaggcctcccagcttccagaactggcagaaacaaatgccttttcttaataaattccccagcctcaggtactctgttatagcagcagaagatgctctaagacaatagagtactttaaaagatcttacccarcttactataaagtcagttaaacgttcacctctattttctttgaaagattttatggcttcttttcaacgttcagcttgtcaatctatttggaatttactttgggatatggtttggagtgacactcttaacttgatttttttcccaaggagtcactcttttaagcattattaattgaaaattccatcctcagtctaatcgtccgtaacacaactttgtccacgtgttcagcctttgctagaagcgtctttttcaggggcatcctctacctgtcatcggctgcaccatgaagttcctgttttgattgctttctcacttgttttaatatccccaaaggcaagcctcctccactgcccctctttccaaaaatgtagaattattcttatccctttcttctttcatcttcagaattatttagttaaggttttggagtcgcattaatttgacttatttacagtgtagttggtcagaagtacaccccatctctcctcattgtttcttcttcgtcacatctcatttcagcgaatcaaagttttctgtttgctgcagcatctttcctgctggagtctgtcaatgctctgagtgcaagatgagatggtctcagatattttgtcctcagggacttgtgcggtgcttggcatgtcgtgggactccatggacagatggagcgacacactggggactgacgagggggccccccaccccttttcagaaatcacattgctgtgtaaaattttatttcacaaatggctctcttgcttaaaactgtttgagaactcatacctctgtgcaaaacactaagccgccagtagtgagatgaagctctcagctccaggaagggagatattggaaatcggggaatgtttctggcaacctcagcttcccaacacgtgggtggtcttcggatccacttacacataaaacccaggcaatgttgaactgttttaaagggaaaggggagtaacgcgagtggaagcgatcatgaagtgtctcttttcatgcggaacattccagttgagccatctcaccattcttaaggaagaaggttgagggaagcagtggcggatgggtggtctgggcaaggtgaggtcacccgggggctcccccaccagctgatgtaggtggagagacggccttcacctccctagaagcagcaaatggggcatattctcttttcttggtggcttcaaagagcacagaagagtatatttcctggtgtaaattcactcgcaagacttgattctttttcctcctgccaaaggaatttccattcagtatcttctactggggcagagtttctttcaagcaatgcatttcctgaggagtgagactggcaaactctgtggtctttgatgagcctcactgttgaagggaaaacagcccttttctttcttgttccttcaaccctcactgacagtaattggctgttgcctcttacgatttctccagagaaatggaaatagcagctcagagtcctaaaacaatgtcctttgatctaaaagttccaggaaataaaacacctttgcagttatggagtccagacagggacgcatttgcagaaggtcccggagctcggctgctgccccttgcacgtcaagtgtggcgtcctcaggccaccatggggagtc

SEQ ID NO: 77017 - DNA, 633 bp, Homo sapiens
aggagcacaccttccttgccagctggcacagggctgatgagcctgtcagtgggcggctctggagggacactggtaagaggaaggggtttctcttcctagttccactgtgctttccttccttccgactcccttggcactcgcgggtatgtgggacgccagtggagtttacctccagcaggtttcagcagcacccaacacggagcatcctggctgagttctgcggctgtcccaggcctcccaaaaagttcagctgccccacaggcagccgcccagcattccccgggagcccagcctgctccagcttcccagcaagtccaaaagcatgccctgcaagcagctgtcccgcaaatttctttggcatcccagcaagtaatttcctgcccacagcttcaccctaccaaacatgaagccctggcccagggcaacccagtgaacttctccaccctggactaggctgctttcgattattcgctcygcccatgagagtggctgtgggacacaggtctggaggtcctcagcatttctgtgcactgtcatctcacagagcagctactgaacatgtgtgaatgcccggttagaaggggcacctcccctaggtttgctgcagtctcccccactcccaactattcagac

SEQ ID NO: 77018 - DNA, 1284 bp, Homo sapiens
cttccgcccacccaaggctaagtttggctatgagctgttcttttcctccggacacgtgtgaagtctctggtggtccagccaggtggtgggtggagttgggctggccctgggaatggctgctggtccatgcaggggggtctcactggctgaggctccatgctgcctgccccaggtcacccggccagggtgtggagtggctttacccctgacctcaactccaattttgggggatgctgcctgtacacacctgcatgtcaacaggataaaggtaagggtgttgggggtgccgggggtccagcacggcactggggtgaagtcccagtggttcatatttacagcttttcaaatccagaaggttcctaaggtctcccgaataattgcatcaatgcttgaagaaaatcacaagcgtttaaggaacaaaataatgtttttattaaaaattgtacccatagcacctctctgtcttcctacaagttgtttctttttttcttttaatgagatctgtttttctgcacaaatttcagaaaaagttgtagggaacgtttagggacctgacggctccctaaaccagaaggtgacgcgggaaggagacgtgtcccagcgggcaggctcagctcatgagtttccacgttgtcctcacctttcagactggatccatgctaccaggacgctgacccacggggagccacacttaggtacgcagacgggttgctcgtcaggaggatagctacactgtgtgccaagaatgcgtaagaaataaaaaccatgctacgaaccattaggcaaacatcatgcttcagcccagtcacagttagatacaaacacggcctccgaagacctgtacagagtgagccacctcccggggctgtggaggcgcgttccgtgtgtggccatctgggtcccctctccctggggcccctcgttttttggctrcagcattgagtgaagtgcgccttataaaagcaggctgggagagaggctgaaggcgaggctggggagaggggcttgggctggaccgattcacccagaaggtggccgtgcaggaggccgagggggtgtggcctggcagctctctctgggctcacctgcctggaatctctgccctggcaccccaggaggagggagctctgcacacccatccctgtggctcagacggagcctcctggccactccgtgaccacatccttgcagggtggggccgaagcaatctgaaatgagccacgttgggggtgggtggggagactcagccactgctgtcatgaggcatccgcaaggcatgacttt

SEQ ID NO: 77019 - DNA, 1284 bp, Homo sapiens
cttccgcccacccaaggctaagtttggctatgagctgttcttttcctccggacacgtgtgaagtctctggtggtccagccaggtggtgggtggagttgggctggccctgggaatggctgctggtccatgcaggggggtctcactggctgaggctccatgctgcctgccccaggtcacccggccagggtgtggagtggctttacccctgacctcaactccaattttgggggatgctgcctgtacacacctgcatgtcaacaggataaaggtaagggtgttgggggtgccgggggtccagcacggcactggggtgaagtcccagtggttcatatttacagcttttcaaatccagaaggttcctaaggtctcccgaataattgcatcaatgcttgaagaaaatcacaagcgtttaaggaacaaaataatgtttttattaaaaattgtacccatagcacctctctgtcttcctacaagttgtttctttttttcttttaatgagatctgtttttctgcacaaatttcagaaaaagttgtagggaacgtttagggacctgacggctccctaaaccagaaggtgacgcgggaaggagacgtgtcccagcgggcaggctcagctcatgagtttccacgttgtcctcacctttcagactggatccatgctaccaggacgctgacccacggggagccacacttaggtacgcagacgggttgctcgtcaggaggatagctacactgtgtgccaagaatgcgtaagaaataaaaaccatgctacgaaccattaggcaaacatcatgcttcagcccagtcacagttagatacaaacacggcctccgaagacctgtacagagtgagccacctcccggggctgtggaggcgcgttccgtgtgtggccatctgggtcccctctccctggggcccctcgttttttggctacagcattgagtgaagtgcgccttataaaagcaggcygggagagaggctgaaggcgaggctggggagaggggcttgggctggaccgattcacccagaaggtggccgtgcaggaggccgagggggtgtggcctggcagctctctctgggctcacctgcctggaatctctgccctggcaccccaggaggagggagctctgcacacccatccctgtggctcagacggagcctcctggccactccgtgaccacatccttgcagggtggggccgaagcaatctgaaatgagccacgttgggggtgggtggggagactcagccactgctgtcatgaggcatccgcaaggcatgacttt

SEQ ID NO: 77020 - DNA, 1284 bp, Homo sapiens
cttccgcccacccaaggctaagtttggctatgagctgttcttttcctccggacacgtgtgaagtctctggtggtccagccaggtggtgggtggagttgggctggccctgggaatggctgctggtccatgcaggggggtctcactggctgaggctccatgctgcctgccccaggtcacccggccagggtgtggagtggctttacccctgacctcaactccaattttgggggatgctgcctgtacacacctgcatgtcaacaggataaaggtaagggtgttgggggtgccgggggtccagcacggcactggggtgaagtcccagtggttcatatttacagcttttcaaatccagaaggttcctaaggtctcccgaataattgcatcaatgcttgaagaaaatcacaagcgtttaaggaacaaaataatgtttttattaaaaattgtacccatagcacctctctgtcttcctacaagttgtttctttttttcttttaatgagatctgtttttctgcacaaatttcagaaaaagttgtagggaacgtttagggacctgacggctccctaaaccagaaggtgacgcgggaaggagacgtgtcccagcgggcaggctcagctcatgagtttccacgttgtcctcacctttcagactggatccatgctaccaggacgctgacccacggggagccacacttaggtacgcagacgggttgctcgtcaggaggatagctacactgtgtgccaagaatgcgtaagaaataaaaaccatgctacgaaccattaggcaaacatcatgcttcagcccagtcacagttagatacaaacacggcctccgaagacctgtacagagtgagccacctcccggggctgtggaggcgcgttccgtgtgtggccatctgggtcccctctccctggggcccctcgttttttggctacagcattgagtgaagtgcgccttataaaagcaggctgggagagaggctgaaggsgaggctggggagaggggcttgggctggaccgattcacccagaaggtggccgtgcaggaggccgagggggtgtggcctggcagctctctctgggctcacctgcctggaatctctgccctggcaccccaggaggagggagctctgcacacccatccctgtggctcagacggagcctcctggccactccgtgaccacatccttgcagggtggggccgaagcaatctgaaatgagccacgttgggggtgggtggggagactcagccactgctgtcatgaggcatccgcaaggcatgacttt

SEQ ID NO: 77021 - DNA, 1284 bp, Homo sapiens
cttccgcccacccaaggctaagtttggctatgagctgttcttttcctccggacacgtgtgaagtctctggtggtccagccaggtggtgggtggagttgggctggccctgggaatggctgctggtccatgcaggggggtctcactggctgaggctccatgctgcctgccccaggtcacccggccagggtgtggagtggctttacccctgacctcaactccaattttgggggatgctgcctgtacacacctgcatgtcaacaggataaaggtaagggtgttgggggtgccgggggtccagcacggcactggggtgaagtcccagtggttcatatttacagcttttcaaatccagaaggttcctaaggtctcccgaataattgcatcaatgcttgaagaaaatcacaagcgtttaaggaacaaaataatgtttttattaaaaattgtacccatagcacctctctgtcttcctacaagttgtttctttttttcttttaatgagatctgtttttctgcacaaatttcagaaaaagttgtagggaacgtttagggacctgacggctccctaaaccagaaggtgacgcgggaaggagacgtgtcccagcgggcaggctcagctcatgagtttccacgttgtcctcacctttcagactggatccatgctaccaggacgctgacccacggggagccacacttaggtacgcagacgggttgctcgtcaggaggatagctacactgtgtgccaagaatgcgtaagaaataaaaaccatgctacgaaccattaggcaaacatcatgcttcagcccagtcacagttagatacaaacacggcctccgaagacctgtacagagtgagccacctcccggggctgtggaggcgcgttccgtgtgtggccatctgggtcccctctccctggggcccctcgttttttggctacagcattgagtgaagtgcgccttataaaagcaggctgggagagaggctgaaggcgaggctggggagaggggcttgggctggaccgattcacccagaaggtggccgtgcaggaggccgagggggtgtggcctggcagctctctstgggctcacctgcctggaatctctgccctggcaccccaggaggagggagctctgcacacccatccctgtggctcagacggagcctcctggccactccgtgaccacatccttgcagggtggggccgaagcaatctgaaatgagccacgttgggggtgggtggggagactcagccactgctgtcatgaggcatccgcaaggcatgacttt

SEQ ID NO: 77022 - DNA, 1284 bp, Homo sapiens
cttccgcccacccaaggctaagtttggctatgagctgttcttttcctccggacacgtgtgaagtctctggtggtccagccaggtggtgggtggagttgggctggccctgggaatggctgctggtccatgcaggggggtctcactggctgaggctccatgctgcctgccccaggtcacccggccagggtgtggagtggctttacccctgacctcaactccaattttgggggatgctgcctgtacacacctgcatgtcaacaggataaaggtaagggtgttgggggtgccgggggtccagcacggcactggggtgaagtcccagtggttcatatttacagcttttcaaatccagaaggttcctaaggtctcccgaataattgcatcaatgcttgaagaaaatcacaagcgtttaaggaacaaaataatgtttttattaaaaattgtacccatagcacctctctgtcttcctacaagttgtttctttttttcttttaatgagatctgtttttctgcacaaatttcagaaaaagttgtagggaacgtttagggacctgacggctccctaaaccagaaggtgacgcgggaaggagacgtgtcccagcgggcaggctcagctcatgagtttccacgttgtcctcacctttcagactggatccatgctaccaggacgctgacccacggggagccacacttaggtacgcagacgggttgctcgtcaggaggatagctacactgtgtgccaagaatgcgtaagaaataaaaaccatgctacgaaccattaggcaaacatcatgcttcagcccagtcacagttagatacaaacacggcctccgaagacctgtacagagtgagccacctcccggggctgtggaggcgcgttccgtgtgtggccatctgggtcccctctccctggggcccctcgttttttggctacagcattgagtgaagtgcgccttataaaagcaggctgggagagaggctgaaggcgaggctggggagaggggcttgggctggaccgattcacccagaaggtggccgtgcaggaggccgagggggtgtggcctggcagctctctctsggctcacctgcctggaatctctgccctggcaccccaggaggagggagctctgcacacccatccctgtggctcagacggagcctcctggccactccgtgaccacatccttgcagggtggggccgaagcaatctgaaatgagccacgttgggggtgggtggggagactcagccactgctgtcatgaggcatccgcaaggcatgacttt

SEQ ID NO: 77023 - DNA, 1525 bp, Homo sapiens
ggcagttcaatgagcagctggattttgctggttcccaagagcaaggaaaattcccttgttttaaagagccagatccatttggaatagtctttcttccccacatattacagcatgaacgtgactctaaagtacctgccgagggtctttctttttgtgacggtgggcgctgttccccactgtcrtggacttctcacagcgctcagtgtgcattcagttgcttctctccataacgcctctcagctaactgtgctgtttctgtgctcctgggttgttaatgttcaagtcttggctctataccattttccttatcatttaggattccactgggaagacatcactaagttgtgaaatcaaacttcatgagttggctgagatcatagggttgggtgtcctctgagcacttgcaggctgggggaagacagaaaacctggacaccttgcaattgtttgcaacaaagtggaaaaactaaagtagttttgatatgtgcattagtttgcttggactgctataacgaaatactacttggtggcttaaacaacagaaatttcttttcttacagtcctggaggctggaagtgcaaaaggaaggtgtcggcaagatcgtttttttctgagagctctctccttggcttgcagatggcagcttgctcctggcacagtcttttctctgtatgtgctcatgtctgtgtcctgatttccatttcctagtagggccagtcaaattggattagggcctaaagtaattatctcattttactttacttctttaaaggccatatgtccaaatacagtcacattctggggtgctagaggttaagatttcaacatatgaatttgcaggggacacatctccacccataacaatttgtttttcgtaatacgtttaaaatacccatttctgggctggacgcagtggctcatgcctataatcccagcactgtgggaggatcacttgagcccaggagtttgagaccagcctgggcaacatagccagactctatctataaaaaaaaatacacacacacacaaacttggccagatacagtggtgcacacctgtagtcctagctgcttgggggactgaggtgggagggtcgcttgagcccagaagtttgaggttacagtgagctatgatcatgccactgccctccagcctgggcaacaaagcaagactgtgttacttaaaaaataaaataaaacaaaaagacccacttccatttatttcacccatggataaattgtgcagcaagtggttaggtgaaatgtgaaatgtctggccaattattgtcatcatgctcaattatagagacacagtatgctcccctttgcattcttcattgctgattctgtgctttacatctggcagctacaaaaatttagtattttgctagcaggtgcatcaaatctatttttggtttcaaacaatacactttttgttttcaacgattctgaccagtagtcaacaattgcaagtatgtggaatgtgattctcctgctttgggaacaagggagctcccagttttgtgg

SEQ ID NO: 77024 - DNA, 1525 bp, Homo sapiens
ggcagttcaatgagcagctggattttgctggttcccaagagcaaggaaaattcccttgttttaaagagccagatccatttggaatagtctttcttccccacatattacagcatgaacgtgactctaaagtacctgccgagggtctttctttttgtgacggtgggcgctgttccccactgtcgtggacttctcacagcgctcagtgtgcattcrgttgcttctctccataacgcctctcagctaactgtgctgtttctgtgctcctgggttgttaatgttcaagtcttggctctataccattttccttatcatttaggattccactgggaagacatcactaagttgtgaaatcaaacttcatgagttggctgagatcatagggttgggtgtcctctgagcacttgcaggctgggggaagacagaaaacctggacaccttgcaattgtttgcaacaaagtggaaaaactaaagtagttttgatatgtgcattagtttgcttggactgctataacgaaatactacttggtggcttaaacaacagaaatttcttttcttacagtcctggaggctggaagtgcaaaaggaaggtgtcggcaagatcgtttttttctgagagctctctccttggcttgcagatggcagcttgctcctggcacagtcttttctctgtatgtgctcatgtctgtgtcctgatttccatttcctagtagggccagtcaaattggattagggcctaaagtaattatctcattttactttacttctttaaaggccatatgtccaaatacagtcacattctggggtgctagaggttaagatttcaacatatgaatttgcaggggacacatctccacccataacaatttgtttttcgtaatacgtttaaaatacccatttctgggctggacgcagtggctcatgcctataatcccagcactgtgggaggatcacttgagcccaggagtttgagaccagcctgggcaacatagccagactctatctataaaaaaaaatacacacacacacaaacttggccagatacagtggtgcacacctgtagtcctagctgcttgggggactgaggtgggagggtcgcttgagcccagaagtttgaggttacagtgagctatgatcatgccactgccctccagcctgggcaacaaagcaagactgtgttacttaaaaaataaaataaaacaaaaagacccacttccatttatttcacccatggataaattgtgcagcaagtggttaggtgaaatgtgaaatgtctggccaattattgtcatcatgctcaattatagagacacagtatgctcccctttgcattcttcattgctgattctgtgctttacatctggcagctacaaaaatttagtattttgctagcaggtgcatcaaatctatttttggtttcaaacaatacactttttgttttcaacgattctgaccagtagtcaacaattgcaagtatgtggaatgtgattctcctgctttgggaacaagggagctcccagttttgtgg

SEQ ID NO: 77025 - DNA, 1525 bp, Homo sapiens
ggcagttcaatgagcagctggattttgctggttcccaagagcaaggaaaattcccttgttttaaagagccagatccatttggaatagtctttcttccccacatattacagcatgaacgtgactctaaagtacctgccgagggtctttctttttgtgacggtgggcgctgttccccactgtcgtggacttctcacagcgctcagtgtgcattcagttgcttctctccataacgcctctcagctaactgtgctgtttctgtgctcctgggttgttaatgttcaagtcttggctctataccattttccttatcatttaggattccactgggaagacatcactaagttgtgaaatcaaacttcatgagttggctgagatcatagggttgggtgtcctctgagcacttgcaggctgggggaagacagaaaacctggacaccttgcaattgtttgcaacaaagtggaaaaactaaagtagttttgatrtgtgcattagtttgcttggactgctataacgaaatactacttggtggcttaaacaacagaaatttcttttcttacagtcctggaggctggaagtgcaaaaggaaggtgtcggcaagatcgtttttttctgagagctctctccttggcttgcagatggcagcttgctcctggcacagtcttttctctgtatgtgctcatgtctgtgtcctgatttccatttcctagtagggccagtcaaattggattagggcctaaagtaattatctcattttactttacttctttaaaggccatatgtccaaatacagtcacattctggggtgctagaggttaagatttcaacatatgaatttgcaggggacacatctccacccataacaatttgtttttcgtaatacgtttaaaatacccatttctgggctggacgcagtggctcatgcctataatcccagcactgtgggaggatcacttgagcccaggagtttgagaccagcctgggcaacatagccagactctatctataaaaaaaaatacacacacacacaaacttggccagatacagtggtgcacacctgtagtcctagctgcttgggggactgaggtgggagggtcgcttgagcccagaagtttgaggttacagtgagctatgatcatgccactgccctccagcctgggcaacaaagcaagactgtgttacttaaaaaataaaataaaacaaaaagacccacttccatttatttcacccatggataaattgtgcagcaagtggttaggtgaaatgtgaaatgtctggccaattattgtcatcatgctcaattatagagacacagtatgctcccctttgcattcttcattgctgattctgtgctttacatctggcagctacaaaaatttagtattttgctagcaggtgcatcaaatctatttttggtttcaaacaatacactttttgttttcaacgattctgaccagtagtcaacaattgcaagtatgtggaatgtgattctcctgctttgggaacaagggagctcccagttttgtgg

SEQ ID NO: 77026 - DNA, 1397 bp, Homo sapiens
gcattgctgtatttttccagaaatgtgcagccagacctaatgataggtggtttagggtgrgaagcagagtaagatgacagaactttaggaccacatgaagggaaggagagggtcccccaggaaagggtgcagtttgttagacagaacaatagcatatccgctacaaagagctgccatttgctgggcgctaagggcctggccctctgtgaacctcaccatctgcatcatctcacttcatcctcaccagggtgggggcacgaggactctctcatgaccagggctattctcaatttacaaatgaggaaacaaaggctcaggaagggctctttctcaaggccactgagttgggagctacgttccactctgggtctgtttgtctcagggacaaaccttgaagccacacaagggccccgagaagctgtgcagatgtgaaacccagagtggcccgatcagatctatgactttgtgtcatcacaaaagtgaaagaagcagttcacagaaggagtggagtgtgcaggtcagaggcaggaaggacaggcagacactgtgatgatgataggctgtgaagaggtgggcgatgcctgggatgggagggactgtgttggacccagtgctgacctgagaacctcctctcaggccctcagtcaggctggcccctgttagacatgagatttgactcactggttcccattaacagccactagagatgaatgcactctatcaagtccatgtctgattaaattcaacaactcagtagtagtggtcaggaagtgtgctgattttttttcaatacaggtaaagtttttaattatgaacttttcagagggcaaactcagattgcttagggtgtatttgtccttgtagtgtttttgagggagtcattaggggcatggaataattaagtgaaaattaagctatgaaagaatcactcagctaagaaacaagatggtagatcaggctccgtctgatctcttggcagtatgcattagaccaaagggttatttaggtgtcaaggattttgttttgccagttatcaagcctaagaaacttcccagttacatcaaatcaagcaaaatgatgaaggctatcatccacccttgcttacaacaaaaagaaaccacttataagttcttcccgttagccaaaactgaagaatttaaactgccttggctcttaataatagttttactttatggttttcttgctagtatttcaaatacgtagtctgtcttcaccaaactagaaatagttgataccaagaaaaacgtgtttgcccggactgcatgatgtcattgcacactcacggaccatgcactctttagcagcacccatctaattccatgctgacctgccttctccatttgtaggataactgcaatactcagaagccggctggt

SEQ ID NO: 77027 - DNA, 1397 bp, Homo sapiens
gcattgctgtatttttccagaaatgtgcagccagacctaatgataggtggtttagggtgagaagcagagtaagatgacagaactttaggaccacatgaagggaaggagagggtcccccaggaaagggtgcagtttgttagacagaacaatagcatatccgytacaaagagctgccatttgctgggcgctaagggcctggccctctgtgaacctcaccatctgcatcatctcacttcatcctcaccagggtgggggcacgaggactctctcatgaccagggctattctcaatttacaaatgaggaaacaaaggctcaggaagggctctttctcaaggccactgagttgggagctacgttccactctgggtctgtttgtctcagggacaaaccttgaagccacacaagggccccgagaagctgtgcagatgtgaaacccagagtggcccgatcagatctatgactttgtgtcatcacaaaagtgaaagaagcagttcacagaaggagtggagtgtgcaggtcagaggcaggaaggacaggcagacactgtgatgatgataggctgtgaagaggtgggcgatgcctgggatgggagggactgtgttggacccagtgctgacctgagaacctcctctcaggccctcagtcaggctggcccctgttagacatgagatttgactcactggttcccattaacagccactagagatgaatgcactctatcaagtccatgtctgattaaattcaacaactcagtagtagtggtcaggaagtgtgctgattttttttcaatacaggtaaagtttttaattatgaacttttcagagggcaaactcagattgcttagggtgtatttgtccttgtagtgtttttgagggagtcattaggggcatggaataattaagtgaaaattaagctatgaaagaatcactcagctaagaaacaagatggtagatcaggctccgtctgatctcttggcagtatgcattagaccaaagggttatttaggtgtcaaggattttgttttgccagttatcaagcctaagaaacttcccagttacatcaaatcaagcaaaatgatgaaggctatcatccacccttgcttacaacaaaaagaaaccacttataagttcttcccgttagccaaaactgaagaatttaaactgccttggctcttaataatagttttactttatggttttcttgctagtatttcaaatacgtagtctgtcttcaccaaactagaaatagttgataccaagaaaaacgtgtttgcccggactgcatgatgtcattgcacactcacggaccatgcactctttagcagcacccatctaattccatgctgacctgccttctccatttgtaggataactgcaatactcagaagccggctggt

SEQ ID NO: 77028 - DNA, 1397 bp, Homo sapiens
gcattgctgtatttttccagaaatgtgcagccagacctaatgataggtggtttagggtgagaagcagagtaagatgacagaactttaggaccacatgaagggaaggagagggtcccccaggaaagggtgcagtttgttagacagaacaatagcatatccgctacaaagagctgccatttgctgggcgctaagggcctggccctctgtgaacctcaccatctgcatcatctcacttcatcctcaccagggtgggggcaygaggactctctcatgaccagggctattctcaatttacaaatgaggaaacaaaggctcaggaagggctctttctcaaggccactgagttgggagctacgttccactctgggtctgtttgtctcagggacaaaccttgaagccacacaagggccccgagaagctgtgcagatgtgaaacccagagtggcccgatcagatctatgactttgtgtcatcacaaaagtgaaagaagcagttcacagaaggagtggagtgtgcaggtcagaggcaggaaggacaggcagacactgtgatgatgataggctgtgaagaggtgggcgatgcctgggatgggagggactgtgttggacccagtgctgacctgagaacctcctctcaggccctcagtcaggctggcccctgttagacatgagatttgactcactggttcccattaacagccactagagatgaatgcactctatcaagtccatgtctgattaaattcaacaactcagtagtagtggtcaggaagtgtgctgattttttttcaatacaggtaaagtttttaattatgaacttttcagagggcaaactcagattgcttagggtgtatttgtccttgtagtgtttttgagggagtcattaggggcatggaataattaagtgaaaattaagctatgaaagaatcactcagctaagaaacaagatggtagatcaggctccgtctgatctcttggcagtatgcattagaccaaagggttatttaggtgtcaaggattttgttttgccagttatcaagcctaagaaacttcccagttacatcaaatcaagcaaaatgatgaaggctatcatccacccttgcttacaacaaaaagaaaccacttataagttcttcccgttagccaaaactgaagaatttaaactgccttggctcttaataatagttttactttatggttttcttgctagtatttcaaatacgtagtctgtcttcaccaaactagaaatagttgataccaagaaaaacgtgtttgcccggactgcatgatgtcattgcacactcacggaccatgcactctttagcagcacccatctaattccatgctgacctgccttctccatttgtaggataactgcaatactcagaagccggctggt

SEQ ID NO: 77029 - DNA, 1397 bp, Homo sapiens
gcattgctgtatttttccagaaatgtgcagccagacctaatgataggtggtttagggtgagaagcagagtaagatgacagaactttaggaccacatgaagggaaggagagggtcccccaggaaagggtgcagtttgttagacagaacaatagcatatccgctacaaagagctgccatttgctgggcgctaagggcctggccctctgtgaacctcaccatctgcatcatctcacttcatcctcaccagggtgggggcacgaggactctctcatgaccagggctattctcaatttacaaatgaggaaacaaaggctcaggaagggctctttctcaaggccactgagttgggagctacgttccactctgggtctgtttgtytcagggacaaaccttgaagccacacaagggccccgagaagctgtgcagatgtgaaacccagagtggcccgatcagatctatgactttgtgtcatcacaaaagtgaaagaagcagttcacagaaggagtggagtgtgcaggtcagaggcaggaaggacaggcagacactgtgatgatgataggctgtgaagaggtgggcgatgcctgggatgggagggactgtgttggacccagtgctgacctgagaacctcctctcaggccctcagtcaggctggcccctgttagacatgagatttgactcactggttcccattaacagccactagagatgaatgcactctatcaagtccatgtctgattaaattcaacaactcagtagtagtggtcaggaagtgtgctgattttttttcaatacaggtaaagtttttaattatgaacttttcagagggcaaactcagattgcttagggtgtatttgtccttgtagtgtttttgagggagtcattaggggcatggaataattaagtgaaaattaagctatgaaagaatcactcagctaagaaacaagatggtagatcaggctccgtctgatctcttggcagtatgcattagaccaaagggttatttaggtgtcaaggattttgttttgccagttatcaagcctaagaaacttcccagttacatcaaatcaagcaaaatgatgaaggctatcatccacccttgcttacaacaaaaagaaaccacttataagttcttcccgttagccaaaactgaagaatttaaactgccttggctcttaataatagttttactttatggttttcttgctagtatttcaaatacgtagtctgtcttcaccaaactagaaatagttgataccaagaaaaacgtgtttgcccggactgcatgatgtcattgcacactcacggaccatgcactctttagcagcacccatctaattccatgctgacctgccttctccatttgtaggataactgcaatactcagaagccggctggt

SEQ ID NO: 77030 - DNA, 1397 bp, Homo sapiens
gcattgctgtatttttccagaaatgtgcagccagacctaatgataggtggtttagggtgagaagcagagtaagatgacagaactttaggaccacatgaagggaaggagagggtcccccaggaaagggtgcagtttgttagacagaacaatagcatatccgctacaaagagctgccatttgctgggcgctaagggcctggccctctgtgaacctcaccatctgcatcatctcacttcatcctcaccagggtgggggcacgaggactctctcatgaccagggctattctcaatttacaaatgaggaaacaaaggctcaggaagggctctttctcaaggccactgagttgggagctacgttccactctgggtctgtttgtctcagggacaaaccttgaagccacacaagggccccgagaarctgtgcagatgtgaaacccagagtggcccgatcagatctatgactttgtgtcatcacaaaagtgaaagaagcagttcacagaaggagtggagtgtgcaggtcagaggcaggaaggacaggcagacactgtgatgatgataggctgtgaagaggtgggcgatgcctgggatgggagggactgtgttggacccagtgctgacctgagaacctcctctcaggccctcagtcaggctggcccctgttagacatgagatttgactcactggttcccattaacagccactagagatgaatgcactctatcaagtccatgtctgattaaattcaacaactcagtagtagtggtcaggaagtgtgctgattttttttcaatacaggtaaagtttttaattatgaacttttcagagggcaaactcagattgcttagggtgtatttgtccttgtagtgtttttgagggagtcattaggggcatggaataattaagtgaaaattaagctatgaaagaatcactcagctaagaaacaagatggtagatcaggctccgtctgatctcttggcagtatgcattagaccaaagggttatttaggtgtcaaggattttgttttgccagttatcaagcctaagaaacttcccagttacatcaaatcaagcaaaatgatgaaggctatcatccacccttgcttacaacaaaaagaaaccacttataagttcttcccgttagccaaaactgaagaatttaaactgccttggctcttaataatagttttactttatggttttcttgctagtatttcaaatacgtagtctgtcttcaccaaactagaaatagttgataccaagaaaaacgtgtttgcccggactgcatgatgtcattgcacactcacggaccatgcactctttagcagcacccatctaattccatgctgacctgccttctccatttgtaggataactgcaatactcagaagccggctggt

SEQ ID NO: 77031 - DNA, 1397 bp, Homo sapiens
gcattgctgtatttttccagaaatgtgcagccagacctaatgataggtggtttagggtgagaagcagagtaagatgacagaactttaggaccacatgaagggaaggagagggtcccccaggaaagggtgcagtttgttagacagaacaatagcatatccgctacaaagagctgccatttgctgggcgctaagggcctggccctctgtgaacctcaccatctgcatcatctcacttcatcctcaccagggtgggggcacgaggactctctcatgaccagggctattctcaatttacaaatgaggaaacaaaggctcaggaagggctctttctcaaggccactgagttgggagctacgttccactctgggtctgtttgtctcagggacaaaccttgaagccacacaagggccccgagaagctgtgcagatgtgaaacccagagtggcccgatcagatctatgactttgtgtcatcacaaaagtgaaagaagcagttcacagaaggagtggagtgtgcaggtcagaggcaggaaggacaggcagacactgtgatgatgataggctgtgaagaggtgggcgatgcctgggatgggagggactgtgttggacccagtgctgacctgagaacctcctctcaggccctcagtcaggctggcccctgttagacatgagatttgactcactggttcccattaacagccactagagatgaatgcactctatcaagtccatgtctgattaaattcaacaactcagkagtagtggtcaggaagtgtgctgattttttttcaatacaggtaaagtttttaattatgaacttttcagagggcaaactcagattgcttagggtgtatttgtccttgtagtgtttttgagggagtcattaggggcatggaataattaagtgaaaattaagctatgaaagaatcactcagctaagaaacaagatggtagatcaggctccgtctgatctcttggcagtatgcattagaccaaagggttatttaggtgtcaaggattttgttttgccagttatcaagcctaagaaacttcccagttacatcaaatcaagcaaaatgatgaaggctatcatccacccttgcttacaacaaaaagaaaccacttataagttcttcccgttagccaaaactgaagaatttaaactgccttggctcttaataatagttttactttatggttttcttgctagtatttcaaatacgtagtctgtcttcaccaaactagaaatagttgataccaagaaaaacgtgtttgcccggactgcatgatgtcattgcacactcacggaccatgcactctttagcagcacccatctaattccatgctgacctgccttctccatttgtaggataactgcaatactcagaagccggctggt

SEQ ID NO: 77032 - DNA, 1397 bp, Homo sapiens
gcattgctgtatttttccagaaatgtgcagccagacctaatgataggtggtttagggtgagaagcagagtaagatgacagaactttaggaccacatgaagggaaggagagggtcccccaggaaagggtgcagtttgttagacagaacaatagcatatccgctacaaagagctgccatttgctgggcgctaagggcctggccctctgtgaacctcaccatctgcatcatctcacttcatcctcaccagggtgggggcacgaggactctctcatgaccagggctattctcaatttacaaatgaggaaacaaaggctcaggaagggctctttctcaaggccactgagttgggagctacgttccactctgggtctgtttgtctcagggacaaaccttgaagccacacaagggccccgagaagctgtgcagatgtgaaacccagagtggcccgatcagatctatgactttgtgtcatcacaaaagtgaaagaagcagttcacagaaggagtggagtgtgcaggtcagaggcaggaaggacaggcagacactgtgatgatgataggctgtgaagaggtgggcgatgcctgggatgggagggactgtgttggacccagtgctgacctgagaacctcctctcaggccctcagtcaggctggcccctgttagacatgagatttgactcactggttcccattaacagccactagagatgaatgcactctatcaagtccatgtctgattaaattcaacaactcagtagtagtggtcaggaagtgtgctgattttttttcaatacaggtaaagtttttaattatgaacttttcagagggcaaactcagattgcttagggtgtatttgtccttgtagtgtttttgagggagtcattaggggcatggaataattaagtgaaaattaagctatgaaagaatcactcagctaagaaacaagatggtagatcaggctccgtctgatctcttggcagtatgcattagaccaaagggttatttaggtgtcaaggattttgttttgccagttatcaagcctaagaaacttcccagttacatcaaatcaagcaaaatgatgaaggctatcatccacccttgcttacaacaaaaagaaaccacttataagttcttcccgttagccaaaactgaagaatttaaactgccttggctcttaataatagttttactttatggttttcttgctagtatttcaaatacrtagtctgtcttcaccaaactagaaatagttgataccaagaaaaacgtgtttgcccggactgcatgatgtcattgcacactcacggaccatgcactctttagcagcacccatctaattccatgctgacctgccttctccatttgtaggataactgcaatactcagaagccggctggt

SEQ ID NO: 77033 - DNA, 1397 bp, Homo sapiens
gcattgctgtatttttccagaaatgtgcagccagacctaatgataggtggtttagggtgagaagcagagtaagatgacagaactttaggaccacatgaagggaaggagagggtcccccaggaaagggtgcagtttgttagacagaacaatagcatatccgctacaaagagctgccatttgctgggcgctaagggcctggccctctgtgaacctcaccatctgcatcatctcacttcatcctcaccagggtgggggcacgaggactctctcatgaccagggctattctcaatttacaaatgaggaaacaaaggctcaggaagggctctttctcaaggccactgagttgggagctacgttccactctgggtctgtttgtctcagggacaaaccttgaagccacacaagggccccgagaagctgtgcagatgtgaaacccagagtggcccgatcagatctatgactttgtgtcatcacaaaagtgaaagaagcagttcacagaaggagtggagtgtgcaggtcagaggcaggaaggacaggcagacactgtgatgatgataggctgtgaagaggtgggcgatgcctgggatgggagggactgtgttggacccagtgctgacctgagaacctcctctcaggccctcagtcaggctggcccctgttagacatgagatttgactcactggttcccattaacagccactagagatgaatgcactctatcaagtccatgtctgattaaattcaacaactcagtagtagtggtcaggaagtgtgctgattttttttcaatacaggtaaagtttttaattatgaacttttcagagggcaaactcagattgcttagggtgtatttgtccttgtagtgtttttgagggagtcattaggggcatggaataattaagtgaaaattaagctatgaaagaatcactcagctaagaaacaagatggtagatcaggctccgtctgatctcttggcagtatgcattagaccaaagggttatttaggtgtcaaggattttgttttgccagttatcaagcctaagaaacttcccagttacatcaaatcaagcaaaatgatgaaggctatcatccacccttgcttacaacaaaaagaaaccacttataagttcttcccgttagccaaaactgaagaatttaaactgccttggctcttaataatagttttactttatggttttcttgctagtatttcaaatacgtagtctgtcttcaccaaactagaaatagttgataccaagaaaaacgtgtttgcccggactgmatgatgtcattgcacactcacggaccatgcactctttagcagcacccatctaattccatgctgacctgccttctccatttgtaggataactgcaatactcagaagccggctggt

SEQ ID NO: 77034 - DNA, 1587 bp, Homo sapiens
atttgattcaattcagatatgcctttcaagctggccctgctgagctgggcctgaaaggcacatggctcatctcatctgcatgtgacagtctctttgaagtccccagaagtgcctgctcagagtcatgctcgggagggaagaggtaaggcacagaatgagtacagactgccacccagccgcaggaaaggtgactgcacaccagaggttcctggtaaggaggtgactcacccgtgactgtctcacctgtccaaagtgtgtgtcacctgctctgtgttcacccactgggttcatcagaggggcacttgaacaaaacaggaatgtcactggagaggggaacaaatgctgtccccaagtccttccctgccgtttagagtaacacagcccctgtccgcacatcctcacccccatctgccctctgcttgccagaattatcagaatctctccattctaatttcagccattctctgtgaaaatgaaaagttagtggcaggcaatggacaccctattgaaatagaaattgttcttcatatgtcagaaaagtcccagagtaatctgggagtaatctgagcaaactgattcaaaggattattacaatttcttagtcttctactgctgcaaaagtggcactctttgattctcatgtttgaggttctaattgctacctcatgcaggacttacgagagatcagccatgctgcttacactgtgtgtagtgaatcaatgttattctgaagggcctcctggaagcagtagagattggagaatgtatgtcttttaacatgatcattcccatcctatgggggttgggcactcttaactcatgttgcagatgagtaaactgaggcttttgagagtttgagggtgcacagcttgaggcagaggtggaattcccagcttcatccaagaaaccacgaatctccaatggcttgcacacatccaggtttgctggatcctatttgccaagaccacatgcagattaggagccttcaaacaaattatttccaagggagggcatctttctctgtaacccctaccctggcaattctccatggcctcagggagtccagccggaagctctgcratgagtcctggggaactctcatctggaaaaaggcgctcatgacaggtggtgccaaccttccacggatgcttttcagcatctcttgggatgaggatacagaatttctctttcaccctgtaaacgtggtaaatgagggaatagaatttccagctttaatttttctgaataggattcaaaaatgaaattgtataaaaaggtatccagtgaaaaacacacacccatccccatctcccatccagttccctccgtaacccttttcttagtttcttatatgtcctttgcaaatacagtataagcaaaaaagaatgggcctttttcttttcttccttattttccacaaaatctatcaaaatgggtttttttttgttttgttttgtttgagacagggtctcactctgttgcccaggctggagtgcagtgacaccatcacggttcactgcagcctcgacctccccaggctcagttgatcctcccatctcagccttctgagttgctgggactacaagc

SEQ ID NO: 77035 - DNA, 1587 bp, Homo sapiens
atttgattcaattcagatatgcctttcaagctggccctgctgagctgggcctgaaaggcacatggctcatctcatctgcatgtgacagtctctttgaagtccccagaagtgcctgctcagagtcatgctcgggagggaagaggtaaggcacagaatgagtacagactgccacccagccgcaggaaaggtgactgcacaccagaggttcctggtaaggaggtgactcacccgtgactgtctcacctgtccaaagtgtgtgtcacctgctctgtgttcacccactgggttcatcagaggggcacttgaacaaaacaggaatgtcactggagaggggaacaaatgctgtccccaagtccttccctgccgtttagagtaacacagcccctgtccgcacatcctcacccccatctgccctctgcttgccagaattatcagaatctctccattctaatttcagccattctctgtgaaaatgaaaagttagtggcaggcaatggacaccctattgaaatagaaattgttcttcatatgtcagaaaagtcccagagtaatctgggagtaatctgagcaaactgattcaaaggattattacaatttcttagtcttctactgctgcaaaagtggcactctttgattctcatgtttgaggttctaattgctacctcatgcaggacttacgagagatcagccatgctgcttacactgtgtgtagtgaatcaatgttattctgaagggcctcctggaagcagtagagattggagaatgtatgtcttttaacatgatcattcccatcctatgggggttgggcactcttaactcatgttgcagatgagtaaactgaggcttttgagagtttgagggtgcacagcttgaggcagaggtggaattcccagcttcatccaagaaaccacgaatctccaatggcttgcacacatccaggtttgctggatcctatttgccaagaccacatgcagattaggagccttcaaacaaattatttccaagggagggcatctttctctgtaacccctaccctggcaattctccatggcctcagggagtccagccggaagctctgcgatgagtcctggggaactctcatctggaaaaaggcgctcatgacaggtggtgccaaccttccacggatgcttttcagcatctcttgggatgaggatacagaatttctctttcaccctgtaaaygtggtaaatgagggaatagaatttccagctttaatttttctgaataggattcaaaaatgaaattgtataaaaaggtatccagtgaaaaacacacacccatccccatctcccatccagttccctccgtaacccttttcttagtttcttatatgtcctttgcaaatacagtataagcaaaaaagaatgggcctttttcttttcttccttattttccacaaaatctatcaaaatgggtttttttttgttttgttttgtttgagacagggtctcactctgttgcccaggctggagtgcagtgacaccatcacggttcactgcagcctcgacctccccaggctcagttgatcctcccatctcagccttctgagttgctgggactacaagc

SEQ ID NO: 77036 - DNA, 1587 bp, Homo sapiens
atttgattcaattcagatatgcctttcaagctggccctgctgagctgggcctgaaaggcacatggctcatctcatctgcatgtgacagtctctttgaagtccccagaagtgcctgctcagagtcatgctcgggagggaagaggtaaggcacagaatgagtacagactgccacccagccgcaggaaaggtgactgcacaccagaggttcctggtaaggaggtgactcacccgtgactgtctcacctgtccaaagtgtgtgtcacctgctctgtgttcacccactgggttcatcagaggggcacttgaacaaaacaggaatgtcactggagaggggaacaaatgctgtccccaagtccttccctgccgtttagagtaacacagcccctgtccgcacatcctcacccccatctgccctctgcttgccagaattatcagaatctctccattctaatttcagccattctctgtgaaaatgaaaagttagtggcaggcaatggacaccctattgaaatagaaattgttcttcatatgtcagaaaagtcccagagtaatctgggagtaatctgagcaaactgattcaaaggattattacaatttcttagtcttctactgctgcaaaagtggcactctttgattctcatgtttgaggttctaattgctacctcatgcaggacttacgagagatcagccatgctgcttacactgtgtgtagtgaatcaatgttattctgaagggcctcctggaagcagtagagattggagaatgtatgtcttttaacatgatcattcccatcctatgggggttgggcactcttaactcatgttgcagatgagtaaactgaggcttttgagagtttgagggtgcacagcttgaggcagaggtggaattcccagcttcatccaagaaaccacgaatctccaatggcttgcacacatccaggtttgctggatcctatttgccaagaccacatgcagattaggagccttcaaacaaattatttccaagggagggcatctttctctgtaacccctaccctggcaattctccatggcctcagggagtccagccggaagctctgcgatgagtcctggggaactctcatctggaaaaaggcgctcatgacaggtggtgccaaccttccacggatgcttttcagcatctcttgggatgaggatacagaatttctctttcaccctgtaaacgtggtaaatgagggaatagaatttccagctttaatttttctgaataggattcaaaaatgaaattgtataaaaaggtatccagtgaaaaacacacacccatccccatctcccatccagttccctccgtaacccttttcttagtttcttatatgtcctttgcaaatacagtataagcaaaaaagaatgggcctttttcttttcttccttattttccacaaaatctatcaaaatgggtttttttttgttttgttttgtttgagacagggtctcactctgttgcccaggctggagtgcagtgrcaccatcacggttcactgcagcctcgacctccccaggctcagttgatcctcccatctcagccttctgagttgctgggactacaagc

SEQ ID NO: 77037 - DNA, 1587 bp, Homo sapiens
atttgattcaattcagatatgcctttcaagctggccctgctgagctgggcctgaaaggcacatggctcatctcatctgcatgtgacagtctctttgaagtccccagaagtgcctgctcagagtcatgctcgggagggaagaggtaaggcacagaatgagtacagactgccacccagccgcaggaaaggtgactgcacaccagaggttcctggtaaggaggtgactcacccgtgactgtctcacctgtccaaagtgtgtgtcacctgctctgtgttcacccactgggttcatcagaggggcacttgaacaaaacaggaatgtcactggagaggggaacaaatgctgtccccaagtccttccctgccgtttagagtaacacagcccctgtccgcacatcctcacccccatctgccctctgcttgccagaattatcagaatctctccattctaatttcagccattctctgtgaaaatgaaaagttagtggcaggcaatggacaccctattgaaatagaaattgttcttcatatgtcagaaaagtcccagagtaatctgggagtaatctgagcaaactgattcaaaggattattacaatttcttagtcttctactgctgcaaaagtggcactctttgattctcatgtttgaggttctaattgctacctcatgcaggacttacgagagatcagccatgctgcttacactgtgtgtagtgaatcaatgttattctgaagggcctcctggaagcagtagagattggagaatgtatgtcttttaacatgatcattcccatcctatgggggttgggcactcttaactcatgttgcagatgagtaaactgaggcttttgagagtttgagggtgcacagcttgaggcagaggtggaattcccagcttcatccaagaaaccacgaatctccaatggcttgcacacatccaggtttgctggatcctatttgccaagaccacatgcagattaggagccttcaaacaaattatttccaagggagggcatctttctctgtaacccctaccctggcaattctccatggcctcagggagtccagccggaagctctgcgatgagtcctggggaactctcatctggaaaaaggcgctcatgacaggtggtgccaaccttccacggatgcttttcagcatctcttgggatgaggatacagaatttctctttcaccctgtaaacgtggtaaatgagggaatagaatttccagctttaatttttctgaataggattcaaaaatgaaattgtataaaaaggtatccagtgaaaaacacacacccatccccatctcccatccagttccctccgtaacccttttcttagtttcttatatgtcctttgcaaatacagtataagcaaaaaagaatgggcctttttcttttcttccttattttccacaaaatctatcaaaatgggtttttttttgttttgttttgtttgagacagggtctcactctgttgcccaggctggagtgcagtgacacsatcacggttcactgcagcctcgacctccccaggctcagttgatcctcccatctcagccttctgagttgctgggactacaagc

SEQ ID NO: 77038 - DNA, 785 bp, Homo sapiens
tttggggaaagaggactggtagaagacacgactaagaaagtgagtaggagtccagacgtgtgtgattcatcctttagggcctctgtgtgtgatgggttgacttgtgtctcccaaaattcacatgtggacgtccttgcccctggcagctcagacgtgaccttatttggaaatagtgccattgccgatgtaattagttcaaatgaggtcatgctggagtcgggtgggcccctgatcccatatcactggtgtccttataagaaggggaaatttcaagacagacacacactcagggagtgcaccatgtgaagactggacttaaacagctacaccaccagaagccgagagagaggctggaacatagccttccctttggaggtagcctggcccagtgggcactgtgatctcagacttccagccttcagaactgtgagacaatattttattgtttaagccacttattttttggtactttcttacggcagccctagcagatgctaatccagcgtgcgtcctgrcagaggttgaagggggctcctcaagtcccaggtccagcttggtgtggttcagctactcgagagacatctgctgctaatggatgagcagtcaacctggacgcaggaaatcattttttatttgggtgaatacaatattctccttttgttttcacttttcctaaaagttaaatcaaggttcaaaagaaaatcgaggttcaaaagaaaaatttggtctttacatgtgctaaaaagaaaaaaacaaaaagactcatttcatctttatatgggatg

SEQ ID NO: 77039 - DNA, 785 bp, Homo sapiens
tttggggaaagaggactggtagaagacacgactaagaaagtgagtaggagtccagacgtgtgtgattcatcctttagggcctctgtgtgtgatgggttgacttgtgtctcccaaaattcacatgtggacgtccttgcccctggcagctcagacgtgaccttatttggaaatagtgccattgccgatgtaattagttcaaatgaggtcatgctggagtcgggtgggcccctgatcccatatcactggtgtccttataagaaggggaaatttcaagacagacacacactcagggagtgcaccatgtgaagactggacttaaacagctacaccaccagaagccgagagagaggctggaacatagccttccctttggaggtagcctggcccagtgggcactgtgatctcagacttccagccttcagaactgtgagacaatattttattgtttaagccacttattttttggtactttcttacggcagccctagcagatgctaatccagcgtgcgtcctggcagaggttgaagggggctyctcaagtcccaggtccagcttggtgtggttcagctactcgagagacatctgctgctaatggatgagcagtcaacctggacgcaggaaatcattttttatttgggtgaatacaatattctccttttgttttcacttttcctaaaagttaaatcaaggttcaaaagaaaatcgaggttcaaaagaaaaatttggtctttacatgtgctaaaaagaaaaaaacaaaaagactcatttcatctttatatgggatg

SEQ ID NO: 77040 - DNA, 785 bp, Homo sapiens
tttggggaaagaggactggtagaagacacgactaagaaagtgagtaggagtccagacgtgtgtgattcatcctttagggcctctgtgtgtgatgggttgacttgtgtctcccaaaattcacatgtggacgtccttgcccctggcagctcagacgtgaccttatttggaaatagtgccattgccgatgtaattagttcaaatgaggtcatgctggagtcgggtgggcccctgatcccatatcactggtgtccttataagaaggggaaatttcaagacagacacacactcagggagtgcaccatgtgaagactggacttaaacagctacaccaccagaagccgagagagaggctggaacatagccttccctttggaggtagcctggcccagtgggcactgtgatctcagacttccagccttcagaactgtgagacaatattttattgtttaagccacttattttttggtactttcttacggcagccctagcagatgctaatccagcgtgcgtcctggcagaggttgaagggggctcctcaagtcccaggtccagcttggtgtggttcagctactcragagacatctgctgctaatggatgagcagtcaacctggacgcaggaaatcattttttatttgggtgaatacaatattctccttttgttttcacttttcctaaaagttaaatcaaggttcaaaagaaaatcgaggttcaaaagaaaaatttggtctttacatgtgctaaaaagaaaaaaacaaaaagactcatttcatctttatatgggatg

SEQ ID NO: 77041 - DNA, 1322 bp, Homo sapiens
cacacacacacacacttgtcgagacccagtaatctaccctgmttctttggtggtgatggtaattgctttggaaactcttataaaaatgaaattaccctgtgtatttattagttaggtgctcagcatctctcttcctggtaaaattttagttctgtccagagcaggaaacttaaccattctcttctcagtcatgtgcccataacaatgtccaacacactgtgtaaacatctgttcaaatgcactgcattgaatccagttgaagtgatttcaaaggaaataaatgaaactgttaaaagatggatatgtttttggcttgagggctcattcaaaaggaacaaagctgctaaaattaagtattggccatgaattactctagactttcaatagaaaagaacatccaccaggcatggtgacttgctcctagagtcccaggtacttggaaagctgaggtgggaggatagtttaagctcaagagctgaaggctgcagtgagctatgattgtaccactgtactccagcctggatgacagggtgagatcttgtcaagaaagaaagaaaaaaggaaggaaggaaggaaggaaggaaggaaagagaaagaaagaaagaaaggaaagaaagagagagaaagagagaaaaagaaagagagagaaaagaaaggaacatcctactaaacttggattcaacaaaggaaaaggttcctgtctatctctcctttattaattaattaactaatttatttatttatttatttatttatttattgagacattctcttttttgtcgcccaggctgaagagcagtggtgagatctcagctcaccgtaacctctgcttcccaggctcaagcaatcccccaacctcagcctcccaagtagctgggactataggcatacaccactatgcctggctaatttttaaattttttttgtagagacagggttttgccacattgccgaggctggtctcaaactcctgggctcaagcaatccacctgcctcagcctcacaaagtgttgagattacacgagtgagccaccacacctggctatctcaccttcttgccttcatccaatgtttcatgcatttgactaacaggtagtggaggacatcctgcagccagctgcttgtcaggggccagggaatgggttgaggaccccctattcctgccttcaaggcactcactgtctgagcccatggtgggaacaaggacaggaaaatgcacctgggggactcggagcctggagcagagcaggtcaccagagttcaagctatgcaggggtgttgaagaggtagctggaaggtaccagctatacgtcagcttccaa

SEQ ID NO: 77042 - DNA, 1322 bp, Homo sapiens
cacacacacacacacttgtcgagacccagtaatctaccctgcttctttggtggtgatggtaattgctttggaaactcttataaaaatgaaattaccctgtgtatttattagttaggtgctcagcatctctcttcctggtaaaattttagttctgtccagmgcaggaaacttaaccattctcttctcagtcatgtgcccataacaatgtccaacacactgtgtaaacatctgttcaaatgcactgcattgaatccagttgaagtgatttcaaaggaaataaatgaaactgttaaaagatggatatgtttttggcttgagggctcattcaaaaggaacaaagctgctaaaattaagtattggccatgaattactctagactttcaatagaaaagaacatccaccaggcatggtgacttgctcctagagtcccaggtacttggaaagctgaggtgggaggatagtttaagctcaagagctgaaggctgcagtgagctatgattgtaccactgtactccagcctggatgacagggtgagatcttgtcaagaaagaaagaaaaaaggaaggaaggaaggaaggaaggaaggaaagagaaagaaagaaagaaaggaaagaaagagagagaaagagagaaaaagaaagagagagaaaagaaaggaacatcctactaaacttggattcaacaaaggaaaaggttcctgtctatctctcctttattaattaattaactaatttatttatttatttatttatttatttattgagacattctcttttttgtcgcccaggctgaagagcagtggtgagatctcagctcaccgtaacctctgcttcccaggctcaagcaatcccccaacctcagcctcccaagtagctgggactataggcatacaccactatgcctggctaatttttaaattttttttgtagagacagggttttgccacattgccgaggctggtctcaaactcctgggctcaagcaatccacctgcctcagcctcacaaagtgttgagattacacgagtgagccaccacacctggctatctcaccttcttgccttcatccaatgtttcatgcatttgactaacaggtagtggaggacatcctgcagccagctgcttgtcaggggccagggaatgggttgaggaccccctattcctgccttcaaggcactcactgtctgagcccatggtgggaacaaggacaggaaaatgcacctgggggactcggagcctggagcagagcaggtcaccagagttcaagctatgcaggggtgttgaagaggtagctggaaggtaccagctatacgtcagcttccaa

SEQ ID NO: 77043 - DNA, 1322 bp, Homo sapiens
cacacacacacacacttgtcgagacccagtaatctaccctgcttctttggtggtgatggtaattgctttggaaactcttataaaaatgaaattaccctgtgtatttattagttaggtgctcagcatctctcttcctggtaaaattttagttctgtccagagcaggaaacttraccattctcttctcagtcatgtgcccataacaatgtccaacacactgtgtaaacatctgttcaaatgcactgcattgaatccagttgaagtgatttcaaaggaaataaatgaaactgttaaaagatggatatgtttttggcttgagggctcattcaaaaggaacaaagctgctaaaattaagtattggccatgaattactctagactttcaatagaaaagaacatccaccaggcatggtgacttgctcctagagtcccaggtacttggaaagctgaggtgggaggatagtttaagctcaagagctgaaggctgcagtgagctatgattgtaccactgtactccagcctggatgacagggtgagatcttgtcaagaaagaaagaaaaaaggaaggaaggaaggaaggaaggaaggaaagagaaagaaagaaagaaaggaaagaaagagagagaaagagagaaaaagaaagagagagaaaagaaaggaacatcctactaaacttggattcaacaaaggaaaaggttcctgtctatctctcctttattaattaattaactaatttatttatttatttatttatttatttattgagacattctcttttttgtcgcccaggctgaagagcagtggtgagatctcagctcaccgtaacctctgcttcccaggctcaagcaatcccccaacctcagcctcccaagtagctgggactataggcatacaccactatgcctggctaatttttaaattttttttgtagagacagggttttgccacattgccgaggctggtctcaaactcctgggctcaagcaatccacctgcctcagcctcacaaagtgttgagattacacgagtgagccaccacacctggctatctcaccttcttgccttcatccaatgtttcatgcatttgactaacaggtagtggaggacatcctgcagccagctgcttgtcaggggccagggaatgggttgaggaccccctattcctgccttcaaggcactcactgtctgagcccatggtgggaacaaggacaggaaaatgcacctgggggactcggagcctggagcagagcaggtcaccagagttcaagctatgcaggggtgttgaagaggtagctggaaggtaccagctatacgtcagcttccaa

SEQ ID NO: 77044 - DNA, 1322 bp, Homo sapiens
cacacacacacacacttgtcgagacccagtaatctaccctgcttctttggtggtgatggtaattgctttggaaactcttataaaaatgaaattaccctgtgtatttattagttaggtgctcagcatctctcttcctggtaaaattttagttctgtccagagcaggaaacttaaccattctcttctcagtcatgtgcccataacaatgtccaacacactgtgtaaacatctgttcaaatgcactgcattgaatccagttgaagtgatttcaaaggaaataaatgaaactgttaaaagatggatatgtttttggcttgagggctcattcaaaaggaacaaagctgctaaaattaagtattggccatgaattamtctagactttcaatagaaaagaacatccaccaggcatggtgacttgctcctagagtcccaggtacttggaaagctgaggtgggaggatagtttaagctcaagagctgaaggctgcagtgagctatgattgtaccactgtactccagcctggatgacagggtgagatcttgtcaagaaagaaagaaaaaaggaaggaaggaaggaaggaaggaaggaaagagaaagaaagaaagaaaggaaagaaagagagagaaagagagaaaaagaaagagagagaaaagaaaggaacatcctactaaacttggattcaacaaaggaaaaggttcctgtctatctctcctttattaattaattaactaatttatttatttatttatttatttatttattgagacattctcttttttgtcgcccaggctgaagagcagtggtgagatctcagctcaccgtaacctctgcttcccaggctcaagcaatcccccaacctcagcctcccaagtagctgggactataggcatacaccactatgcctggctaatttttaaattttttttgtagagacagggttttgccacattgccgaggctggtctcaaactcctgggctcaagcaatccacctgcctcagcctcacaaagtgttgagattacacgagtgagccaccacacctggctatctcaccttcttgccttcatccaatgtttcatgcatttgactaacaggtagtggaggacatcctgcagccagctgcttgtcaggggccagggaatgggttgaggaccccctattcctgccttcaaggcactcactgtctgagcccatggtgggaacaaggacaggaaaatgcacctgggggactcggagcctggagcagagcaggtcaccagagttcaagctatgcaggggtgttgaagaggtagctggaaggtaccagctatacgtcagcttccaa

SEQ ID NO: 77045 - DNA, 1322 bp, Homo sapiens
cacacacacacacacttgtcgagacccagtaatctaccctgcttctttggtggtgatggtaattgctttggaaactcttataaaaatgaaattaccctgtgtatttattagttaggtgctcagcatctctcttcctggtaaaattttagttctgtccagagcaggaaacttaaccattctcttctcagtcatgtgcccataacaatgtccaacacactgtgtaaacatctgttcaaatgcactgcattgaatccagttgaagtgatttcaaaggaaataaatgaaactgttaaaagatggatatgtttttggcttgagggctcattcaaaaggaacaaagctgctaaaattaagtattggccatgaattactctagactttcaatagaaaagaacatccaccaggcatggtgacttgctcctagagtcccaggtacttggaaagctgaggtgggaggatagtttaagctcaagagctgaaggctgcagtgagctatgattgtaccactgtactccagcctggatgacagggtgagatcttgtcaagaaagaaagaaaaaaggaaggaaggaaggaaggaaggaaggaaagagaaagaaagaaagaaaggaaagaaagagagagaaagagagaaaaagaaagagagagaaaagaaaggaacatcctactaaacttggattcaacaaaggaaaaggttcctgtctatctctcctttattaattaattaactaatttatttatttatttatttatttatttattgagacattctcttttttgtcgcccaggctgaagagcagtggtgagatctcagctcaccgtaacctctgcttcccaggctcaagcaatcccccaacctcagcctcccaagtagctgggactataggcatacaccactatgcctggctaatttttaaattttttttgtagagacagggttttgccacattgccgaggctggtctcaaactcctgggctcaagcaatccacctgcctcagcctcacaaagtgttgagattacacgagtgagccaccacacctggctatctcaccttcttgccttcatccaatgtttcatgcatttgactaacargtagtggaggacatcctgcagccagctgcttgtcaggggccagggaatgggttgaggaccccctattcctgccttcaaggcactcactgtctgagcccatggtgggaacaaggacaggaaaatgcacctgggggactcggagcctggagcagagcaggtcaccagagttcaagctatgcaggggtgttgaagaggtagctggaaggtaccagctatacgtcagcttccaa

SEQ ID NO: 77046 - DNA, 581 bp, Homo sapiens
tccttccacagagactgatgaaaccaaacacagtccatcttgacactggactctcacacagctgataaagaaaggggaagctctccatataatgatgcgaaaagttctcagacatagtaagtgaaacgaaagcaaggcacaaaacagtgtgcctccttttgtgtaaaagggggggaaacatgaatgtatttatgcatgtttatatttgcataatgaaattctgaaggatagactgatacaataaaactaattacttgattcaagaggtgattgattgggaatgtgtaatctgaaaagactagtgatataaaagcagacaaaattaagctttccttcaccaagaacacagaagcaaacatttcccaaggagcaattaagaaagaagaataagcagtggsttttgtctttgaatgacatttccctacagatttacacaacagcggacggccaaaggaagatggagctaaggggaattggcaaggagaaggcagagctcagaggcttataggaaatgaaagagaagtcattgcatgactgagaaggtcacacagagaggcactgcggtttcatttgagagggag

SEQ ID NO: 77047 - DNA, 755 bp, Homo sapiens
ttttttcagtcatgctagtaggggtgaaatgatatttccctgtggccagctgcccttttttgattgaccttcatcctgcctgccagacttttcaccttttttctccatcatccccttctgtttgagaagctctaagcttcctgggcttacagtgttgcttttcttggtaatatatgctaaatgtttactagtgctcacataaagcaattttacccaatatccttttcagcaggagattccccaacccatgaatactctcagaggaaactgcagaatgaccacagagttcacagtccttgggatttagattgccaatgcaatgcacccagggttggaaatctggggtggcctacctacttggggacaaacattgaagtcttctgttggtcacctcaatcattcttttttcaaaacaacatgaattcatcatgtattaattgacagcagcaattwtgaatcattgagattctcaaatttgaatttattggatgcccaaggctatgtcatctctaagcccatgttggtcccaaagagaaggaaaaatggatttgctcacaagccaggctgtgcagacccaccacgtggaacagcaggtggagggtggaagttggctctcctactgctgaccacactgctccattttccactgcacataaactcgggactggtggtgtcgacgaactccccacacaagactccaaacctgcttcctaagcaacgtgacaaatgactgtcctagtgagtacatattcctg

SEQ ID NO: 77048 - DNA, 755 bp, Homo sapiens
ttttttcagtcatgctagtaggggtgaaatgatatttccctgtggccagctgcccttttttgattgaccttcatcctgcctgccagacttttcaccttttttctccatcatccccttctgtttgagaagctctaagcttcctgggcttacagtgttgcttttcttggtaatatatgctaaatgtttactagtgctcacataaagcaattttacccaatatccttttcagcaggagattccccaacccatgaatactctcagaggaaactgcagaatgaccacagagttcacagtccttgggatttagattgccaatgcaatgcacccagggttggaaatctggggtggcctacctacttggggacaaacattgaagtcttctgttggtcacctcaatcattcttttttcaaaacaacatgaattcatcatgtattaattgacagcagcaattatgaatcrttgagattctcaaatttgaatttattggatgcccaaggctatgtcatctctaagcccatgttggtcccaaagagaaggaaaaatggatttgctcacaagccaggctgtgcagacccaccacgtggaacagcaggtggagggtggaagttggctctcctactgctgaccacactgctccattttccactgcacataaactcgggactggtggtgtcgacgaactccccacacaagactccaaacctgcttcctaagcaacgtgacaaatgactgtcctagtgagtacatattcctg

SEQ ID NO: 77049 - DNA, 755 bp, Homo sapiens
ttttttcagtcatgctagtaggggtgaaatgatatttccctgtggccagctgcccttttttgattgaccttcatcctgcctgccagacttttcaccttttttctccatcatccccttctgtttgagaagctctaagcttcctgggcttacagtgttgcttttcttggtaatatatgctaaatgtttactagtgctcacataaagcaattttacccaatatccttttcagcaggagattccccaacccatgaatactctcagaggaaactgcagaatgaccacagagttcacagtccttgggatttagattgccaatgcaatgcacccagggttggaaatctggggtggcctacctacttggggacaaacattgaagtcttctgttggtcacctcaatcattcttttttcaaaacaacatgaattcatcatgtattaattgacagcagcaattatgaatcattgagattctcaaatttgaatttattggatgcccaaggctatgtcatctctaagcccatgttggtcccaaagagaaggaaaaatggatttgctcacaagccaggctgtgcagacccaccacgtggaacagcaggtggagggtggaagytggctctcctactgctgaccacactgctccattttccactgcacataaactcgggactggtggtgtcgacgaactccccacacaagactccaaacctgcttcctaagcaacgtgacaaatgactgtcctagtgagtacatattcctg

SEQ ID NO: 77050 - DNA, 755 bp, Homo sapiens
ttttttcagtcatgctagtaggggtgaaatgatatttccctgtggccagctgcccttttttgattgaccttcatcctgcctgccagacttttcaccttttttctccatcatccccttctgtttgagaagctctaagcttcctgggcttacagtgttgcttttcttggtaatatatgctaaatgtttactagtgctcacataaagcaattttacccaatatccttttcagcaggagattccccaacccatgaatactctcagaggaaactgcagaatgaccacagagttcacagtccttgggatttagattgccaatgcaatgcacccagggttggaaatctggggtggcctacctacttggggacaaacattgaagtcttctgttggtcacctcaatcattcttttttcaaaacaacatgaattcatcatgtattaattgacagcagcaattatgaatcattgagattctcaaatttgaatttattggatgcccaaggctatgtcatctctaagcccatgttggtcccaaagagaaggaaaaatggatttgctcacaagccaggctgtgcagacccaccacgtggaacagcaggtggagggtggaagttggctctcctactgctgaccacactgctccattttccactgcacataaactcgggactggtggtgtcgacgaaytccccacacaagactccaaacctgcttcctaagcaacgtgacaaatgactgtcctagtgagtacatattcctg

SEQ ID NO: 77051 - DNA, 2148 bp, Homo sapiens
agggttgccccaggtgcatttgggtgtttaacagggttttgggtgatgactgtgtaaaaggaacaatattagagtttttgaccagagtgactgaggagctcacaggagtacagggtgtataagtcccaccaaagattccatgtgccttgggactgccccatcccattgggaattccagtctggcttcttggcaatgggtgcctgggcaacagagcaacagagcaacagagcaaggtggaggagagaagccctcctggtacccatccccacaccagcaagagggagcgccagactcacagcctcccatcccctccagccccagcccacctgacctacatcagccaccttctgattgattctgttttttcctggggaaaaggccaaaaagccatctaggcctcaaccccagcatctctgaacctctgacccagccctggacttccaaatttcagacttctttcaggtgagacaagcaaaccacatgttttttaagcctctgctattcaggctttccattgtttgcagcctaacggagccctggctgctcctgtctggagatggggcacgtggacgaggccttggagaggccagcatctctcacctcctttctagcccacagctccaggcacgcagactcttcctgtgactatatagaagtcatctatcttcctaaagccataaccagacagaccttctgtcaaaaggcaggagagttgggaacgggctctttgaggccacagatggacactgtcattgacccctccaggatcctgtttcctgacatacacccttgattcaggtcatctggttattgtgagctgggtcataaatcttaaggagctccctttctttgcaaacaactatacsccaagaatactccttatttataaaacaatatgtatgctggttctatggaaggttttcagtcctcagggtgctaaaattcttgtgcccttctgcctctttaaccatagcacacatgctcaagagaactagagttgccaagaaatcatttctatagatgggctccaacaaacccaggttatggaggatggcctatttccaacaagcttcatttaaggttctcctacattaaaggaataaatatgatgatgtgaagcagaacataaatgcctgcagaaagtcagaaaattccctcctggtgcctcatcatcattggggtgaggggaacaaaaggtggaaaaatcgattccaccttcttattcttggagaagaaaacaactctctagacaagaacatggaccagcaaacagggagagactgatttcagtcaattattgcagttgccacatttctcaggagtgttgatgtccaggtcggggctgacccatgaatggtcagcaacacactcaggccaacaaaaaggaggaggcctggctgtgaatgaagcatgctcgactttagctcgtcatatgagcaggtcacagagagcagatgcctgtgggtgcttagtgaacactgcagggcatggcactggtactgaaagggactacagttaaatgtttatcagaatgtttacagcaaacttcccacagcacaggtcaggtgaactctttctgcccatgcatgagcctttggacagacagcccccaaaactatgagtctttaatattagcctgcatccctcagttctggacttttccactgtactgggttatacgtcattcaaaattcacctccaaaggaacctcagcatagattcctcactcactgtgggactggacacagcctttcagggcatctccaaatagaaccaagatagtgaggtagggggcgggactcaactccagaggctgggctcagacactggaccaaattgagagctagctgaaacagggccagggcagaagcagctttccataagacatgcccaccagtgtgccatgtcagtttaccatcgccgtggcaacacctgagagttaccacccctttctatggcagtaacccaatgacccggaagttaccacctttttcctagaaatgcctgcatcaactgccttttaacttgcatgtaattaaaagtgggtacaaatatgactgctgaactgcccctgagctgctactctgggcacactgcctgtggggtagccctgctccacagggagcagtacagctgctgctgcctca

SEQ ID NO: 77052 - DNA, 2148 bp, Homo sapiens
agggttgccccaggtgcatttgggtgtttaacagggttttgggtgatgactgtgtaaaaggaacaatattagagtttttgaccagagtgactgaggagctcacaggagtacagggtgtataagtcccaccaaagattccatgtgccttgggactgccccatcccattgggaattccagtctggcttcttggcaatgggtgcctgggcaacagagcaacagagcaacagagcaaggtggaggagagaagccctcctggtacccatccccacaccagcaagagggagcgccagactcacagcctcccatcccctccagccccagcccacctgacctacatcagccaccttctgattgattctgttttttcctggggaaaaggccaaaaagccatctaggcctcaaccccagcatctctgaacctctgacccagccctggacttccaaatttcagacttctttcaggtgagacaagcaaaccacatgttttttaagcctctgctattcaggctttccattgtttgcagcctaacggagccctggctgctcctgtctggagatggggcacgtggacgaggccttggagaggccagcatctctcacctcctttctagcccacagctccaggcacgcagactcttcctgtgactatatagaagtcatctatcttcctaaagccataaccagacagaccttctgtcaaaaggcaggagagttgggaacgggctctttgaggccacagatggacactgtcattgacccctccaggatcctgtttcctgacatacacccttgattcaggtcatctggttattgtgagctgggtcataaatcttaaggagctccctttctttgcaaacaactatacgccaagaatactccttatttataaaacaatatgtatgctggttctatggaaggttttcagtcctcagggtgctaaaattcttgtgcccttctgcctctttaaycatagcacacatgctcaagagaactagagttgccaagaaatcatttctatagatgggctccaacaaacccaggttatggaggatggcctatttccaacaagcttcatttaaggttctcctacattaaaggaataaatatgatgatgtgaagcagaacataaatgcctgcagaaagtcagaaaattccctcctggtgcctcatcatcattggggtgaggggaacaaaaggtggaaaaatcgattccaccttcttattcttggagaagaaaacaactctctagacaagaacatggaccagcaaacagggagagactgatttcagtcaattattgcagttgccacatttctcaggagtgttgatgtccaggtcggggctgacccatgaatggtcagcaacacactcaggccaacaaaaaggaggaggcctggctgtgaatgaagcatgctcgactttagctcgtcatatgagcaggtcacagagagcagatgcctgtgggtgcttagtgaacactgcagggcatggcactggtactgaaagggactacagttaaatgtttatcagaatgtttacagcaaacttcccacagcacaggtcaggtgaactctttctgcccatgcatgagcctttggacagacagcccccaaaactatgagtctttaatattagcctgcatccctcagttctggacttttccactgtactgggttatacgtcattcaaaattcacctccaaaggaacctcagcatagattcctcactcactgtgggactggacacagcctttcagggcatctccaaatagaaccaagatagtgaggtagggggcgggactcaactccagaggctgggctcagacactggaccaaattgagagctagctgaaacagggccagggcagaagcagctttccataagacatgcccaccagtgtgccatgtcagtttaccatcgccgtggcaacacctgagagttaccacccctttctatggcagtaacccaatgacccggaagttaccacctttttcctagaaatgcctgcatcaactgccttttaacttgcatgtaattaaaagtgggtacaaatatgactgctgaactgcccctgagctgctactctgggcacactgcctgtggggtagccctgctccacagggagcagtacagctgctgctgcctca

SEQ ID NO: 77053 - DNA, 2148 bp, Homo sapiens
agggttgccccaggtgcatttgggtgtttaacagggttttgggtgatgactgtgtaaaaggaacaatattagagtttttgaccagagtgactgaggagctcacaggagtacagggtgtataagtcccaccaaagattccatgtgccttgggactgccccatcccattgggaattccagtctggcttcttggcaatgggtgcctgggcaacagagcaacagagcaacagagcaaggtggaggagagaagccctcctggtacccatccccacaccagcaagagggagcgccagactcacagcctcccatcccctccagccccagcccacctgacctacatcagccaccttctgattgattctgttttttcctggggaaaaggccaaaaagccatctaggcctcaaccccagcatctctgaacctctgacccagccctggacttccaaatttcagacttctttcaggtgagacaagcaaaccacatgttttttaagcctctgctattcaggctttccattgtttgcagcctaacggagccctggctgctcctgtctggagatggggcacgtggacgaggccttggagaggccagcatctctcacctcctttctagcccacagctccaggcacgcagactcttcctgtgactatatagaagtcatctatcttcctaaagccataaccagacagaccttctgtcaaaaggcaggagagttgggaacgggctctttgaggccacagatggacactgtcattgacccctccaggatcctgtttcctgacatacacccttgattcaggtcatctggttattgtgagctgggtcataaatcttaaggagctccctttctttgcaaacaactatacgccaagaatactccttatttataaaacaatatgtatgctggttctatggaaggttttcagtcctcagggtgctaaaattcttgtgcccttctgcctctttaaccatagcacacatgctcaagagaactagagttgccaagaaatcatttctatasatgggctccaacaaacccaggttatggaggatggcctatttccaacaagcttcatttaaggttctcctacattaaaggaataaatatgatgatgtgaagcagaacataaatgcctgcagaaagtcagaaaattccctcctggtgcctcatcatcattggggtgaggggaacaaaaggtggaaaaatcgattccaccttcttattcttggagaagaaaacaactctctagacaagaacatggaccagcaaacagggagagactgatttcagtcaattattgcagttgccacatttctcaggagtgttgatgtccaggtcggggctgacccatgaatggtcagcaacacactcaggccaacaaaaaggaggaggcctggctgtgaatgaagcatgctcgactttagctcgtcatatgagcaggtcacagagagcagatgcctgtgggtgcttagtgaacactgcagggcatggcactggtactgaaagggactacagttaaatgtttatcagaatgtttacagcaaacttcccacagcacaggtcaggtgaactctttctgcccatgcatgagcctttggacagacagcccccaaaactatgagtctttaatattagcctgcatccctcagttctggacttttccactgtactgggttatacgtcattcaaaattcacctccaaaggaacctcagcatagattcctcactcactgtgggactggacacagcctttcagggcatctccaaatagaaccaagatagtgaggtagggggcgggactcaactccagaggctgggctcagacactggaccaaattgagagctagctgaaacagggccagggcagaagcagctttccataagacatgcccaccagtgtgccatgtcagtttaccatcgccgtggcaacacctgagagttaccacccctttctatggcagtaacccaatgacccggaagttaccacctttttcctagaaatgcctgcatcaactgccttttaacttgcatgtaattaaaagtgggtacaaatatgactgctgaactgcccctgagctgctactctgggcacactgcctgtggggtagccctgctccacagggagcagtacagctgctgctgcctca

SEQ ID NO: 77054 - DNA, 2148 bp, Homo sapiens
agggttgccccaggtgcatttgggtgtttaacagggttttgggtgatgactgtgtaaaaggaacaatattagagtttttgaccagagtgactgaggagctcacaggagtacagggtgtataagtcccaccaaagattccatgtgccttgggactgccccatcccattgggaattccagtctggcttcttggcaatgggtgcctgggcaacagagcaacagagcaacagagcaaggtggaggagagaagccctcctggtacccatccccacaccagcaagagggagcgccagactcacagcctcccatcccctccagccccagcccacctgacctacatcagccaccttctgattgattctgttttttcctggggaaaaggccaaaaagccatctaggcctcaaccccagcatctctgaacctctgacccagccctggacttccaaatttcagacttctttcaggtgagacaagcaaaccacatgttttttaagcctctgctattcaggctttccattgtttgcagcctaacggagccctggctgctcctgtctggagatggggcacgtggacgaggccttggagaggccagcatctctcacctcctttctagcccacagctccaggcacgcagactcttcctgtgactatatagaagtcatctatcttcctaaagccataaccagacagaccttctgtcaaaaggcaggagagttgggaacgggctctttgaggccacagatggacactgtcattgacccctccaggatcctgtttcctgacatacacccttgattcaggtcatctggttattgtgagctgggtcataaatcttaaggagctccctttctttgcaaacaactatacgccaagaatactccttatttataaaacaatatgtatgctggttctatggaaggttttcagtcctcagggtgctaaaattcttgtgcccttctgcctctttaaccatagcacacatgctcaagagaactagagttgccaagaaatcatttctatagatgggctccaacaaacccaggttatggaggatggcctatttccaacaagcttcatttaaggytctcctacattaaaggaataaatatgatgatgtgaagcagaacataaatgcctgcagaaagtcagaaaattccctcctggtgcctcatcatcattggggtgaggggaacaaaaggtggaaaaatcgattccaccttcttattcttggagaagaaaacaactctctagacaagaacatggaccagcaaacagggagagactgatttcagtcaattattgcagttgccacatttctcaggagtgttgatgtccaggtcggggctgacccatgaatggtcagcaacacactcaggccaacaaaaaggaggaggcctggctgtgaatgaagcatgctcgactttagctcgtcatatgagcaggtcacagagagcagatgcctgtgggtgcttagtgaacactgcagggcatggcactggtactgaaagggactacagttaaatgtttatcagaatgtttacagcaaacttcccacagcacaggtcaggtgaactctttctgcccatgcatgagcctttggacagacagcccccaaaactatgagtctttaatattagcctgcatccctcagttctggacttttccactgtactgggttatacgtcattcaaaattcacctccaaaggaacctcagcatagattcctcactcactgtgggactggacacagcctttcagggcatctccaaatagaaccaagatagtgaggtagggggcgggactcaactccagaggctgggctcagacactggaccaaattgagagctagctgaaacagggccagggcagaagcagctttccataagacatgcccaccagtgtgccatgtcagtttaccatcgccgtggcaacacctgagagttaccacccctttctatggcagtaacccaatgacccggaagttaccacctttttcctagaaatgcctgcatcaactgccttttaacttgcatgtaattaaaagtgggtacaaatatgactgctgaactgcccctgagctgctactctgggcacactgcctgtggggtagccctgctccacagggagcagtacagctgctgctgcctca

SEQ ID NO: 77055 - DNA, 2148 bp, Homo sapiens
agggttgccccaggtgcatttgggtgtttaacagggttttgggtgatgactgtgtaaaaggaacaatattagagtttttgaccagagtgactgaggagctcacaggagtacagggtgtataagtcccaccaaagattccatgtgccttgggactgccccatcccattgggaattccagtctggcttcttggcaatgggtgcctgggcaacagagcaacagagcaacagagcaaggtggaggagagaagccctcctggtacccatccccacaccagcaagagggagcgccagactcacagcctcccatcccctccagccccagcccacctgacctacatcagccaccttctgattgattctgttttttcctggggaaaaggccaaaaagccatctaggcctcaaccccagcatctctgaacctctgacccagccctggacttccaaatttcagacttctttcaggtgagacaagcaaaccacatgttttttaagcctctgctattcaggctttccattgtttgcagcctaacggagccctggctgctcctgtctggagatggggcacgtggacgaggccttggagaggccagcatctctcacctcctttctagcccacagctccaggcacgcagactcttcctgtgactatatagaagtcatctatcttcctaaagccataaccagacagaccttctgtcaaaaggcaggagagttgggaacgggctctttgaggccacagatggacactgtcattgacccctccaggatcctgtttcctgacatacacccttgattcaggtcatctggttattgtgagctgggtcataaatcttaaggagctccctttctttgcaaacaactatacgccaagaatactccttatttataaaacaatatgtatgctggttctatggaaggttttcagtcctcagggtgctaaaattcttgtgcccttctgcctctttaaccatagcacacatgctcaagagaactagagttgccaagaaatcatttctatagatgggctccaacaaacccaggttatggaggatggcctatttccaacaagcttcatttaaggttctcctacattaaaggaataaatatgatgatgtgaagcagaacataaatgcctgcagaaagtcagaaaattccctcctggtgcctcatcatcaytggggtgaggggaacaaaaggtggaaaaatcgattccaccttcttattcttggagaagaaaacaactctctagacaagaacatggaccagcaaacagggagagactgatttcagtcaattattgcagttgccacatttctcaggagtgttgatgtccaggtcggggctgacccatgaatggtcagcaacacactcaggccaacaaaaaggaggaggcctggctgtgaatgaagcatgctcgactttagctcgtcatatgagcaggtcacagagagcagatgcctgtgggtgcttagtgaacactgcagggcatggcactggtactgaaagggactacagttaaatgtttatcagaatgtttacagcaaacttcccacagcacaggtcaggtgaactctttctgcccatgcatgagcctttggacagacagcccccaaaactatgagtctttaatattagcctgcatccctcagttctggacttttccactgtactgggttatacgtcattcaaaattcacctccaaaggaacctcagcatagattcctcactcactgtgggactggacacagcctttcagggcatctccaaatagaaccaagatagtgaggtagggggcgggactcaactccagaggctgggctcagacactggaccaaattgagagctagctgaaacagggccagggcagaagcagctttccataagacatgcccaccagtgtgccatgtcagtttaccatcgccgtggcaacacctgagagttaccacccctttctatggcagtaacccaatgacccggaagttaccacctttttcctagaaatgcctgcatcaactgccttttaacttgcatgtaattaaaagtgggtacaaatatgactgctgaactgcccctgagctgctactctgggcacactgcctgtggggtagccctgctccacagggagcagtacagctgctgctgcctca

SEQ ID NO: 77056 - DNA, 2148 bp, Homo sapiens
agggttgccccaggtgcatttgggtgtttaacagggttttgggtgatgactgtgtaaaaggaacaatattagagtttttgaccagagtgactgaggagctcacaggagtacagggtgtataagtcccaccaaagattccatgtgccttgggactgccccatcccattgggaattccagtctggcttcttggcaatgggtgcctgggcaacagagcaacagagcaacagagcaaggtggaggagagaagccctcctggtacccatccccacaccagcaagagggagcgccagactcacagcctcccatcccctccagccccagcccacctgacctacatcagccaccttctgattgattctgttttttcctggggaaaaggccaaaaagccatctaggcctcaaccccagcatctctgaacctctgacccagccctggacttccaaatttcagacttctttcaggtgagacaagcaaaccacatgttttttaagcctctgctattcaggctttccattgtttgcagcctaacggagccctggctgctcctgtctggagatggggcacgtggacgaggccttggagaggccagcatctctcacctcctttctagcccacagctccaggcacgcagactcttcctgtgactatatagaagtcatctatcttcctaaagccataaccagacagaccttctgtcaaaaggcaggagagttgggaacgggctctttgaggccacagatggacactgtcattgacccctccaggatcctgtttcctgacatacacccttgattcaggtcatctggttattgtgagctgggtcataaatcttaaggagctccctttctttgcaaacaactatacgccaagaatactccttatttataaaacaatatgtatgctggttctatggaaggttttcagtcctcagggtgctaaaattcttgtgcccttctgcctctttaaccatagcacacatgctcaagagaactagagttgccaagaaatcatttctatagatgggctccaacaaacccaggttatggaggatggcctatttccaacaagcttcatttaaggttctcctacattaaaggaataaatatgatgatgtgaagcagaacataaatgcctgcagaaagtcagaaaattccctcctggtgcctcatcatcattggggtgaggggaacaaaaggtggaaaaatcgattccaccttcttattcttggagaagaaaacaactctctagacaagaacatggaccagcaaacagggagagactgatttcagtcaattattgcagttgccacatttctcaggagtgttgatgtccaggtcggggctgacccatgaatggtcagcaacacactcaggccaacaaaaaggaggaggcctggctgtgaatgaagcatgctcgactttagctcgtcatatgagcaggtcacagagagcagatgcctgtgggtgcttagtgaacactgcagggcatggcactggtactgaaagggactacagttaaatgtttatcagaatgtttacagcaaacttcccacagcacaggtcaggtgaactctttctgcccatgcatgagcctttggacagacagcccccaaaactatgagtctttaatattagcctgcatccctcagttctggacttttccactgtactgggttatacgtcattcaaaattcacctccaaaggaacctcagcatagattcctcactcactgtgggactggacacagcctttcagggcatctccaaatagaaccaagatagtgargtagggggcgggactcaactccagaggctgggctcagacactggaccaaattgagagctagctgaaacagggccagggcagaagcagctttccataagacatgcccaccagtgtgccatgtcagtttaccatcgccgtggcaacacctgagagttaccacccctttctatggcagtaacccaatgacccggaagttaccacctttttcctagaaatgcctgcatcaactgccttttaacttgcatgtaattaaaagtgggtacaaatatgactgctgaactgcccctgagctgctactctgggcacactgcctgtggggtagccctgctccacagggagcagtacagctgctgctgcctca

SEQ ID NO: 77057 - DNA, 2148 bp, Homo sapiens
agggttgccccaggtgcatttgggtgtttaacagggttttgggtgatgactgtgtaaaaggaacaatattagagtttttgaccagagtgactgaggagctcacaggagtacagggtgtataagtcccaccaaagattccatgtgccttgggactgccccatcccattgggaattccagtctggcttcttggcaatgggtgcctgggcaacagagcaacagagcaacagagcaaggtggaggagagaagccctcctggtacccatccccacaccagcaagagggagcgccagactcacagcctcccatcccctccagccccagcccacctgacctacatcagccaccttctgattgattctgttttttcctggggaaaaggccaaaaagccatctaggcctcaaccccagcatctctgaacctctgacccagccctggacttccaaatttcagacttctttcaggtgagacaagcaaaccacatgttttttaagcctctgctattcaggctttccattgtttgcagcctaacggagccctggctgctcctgtctggagatggggcacgtggacgaggccttggagaggccagcatctctcacctcctttctagcccacagctccaggcacgcagactcttcctgtgactatatagaagtcatctatcttcctaaagccataaccagacagaccttctgtcaaaaggcaggagagttgggaacgggctctttgaggccacagatggacactgtcattgacccctccaggatcctgtttcctgacatacacccttgattcaggtcatctggttattgtgagctgggtcataaatcttaaggagctccctttctttgcaaacaactatacgccaagaatactccttatttataaaacaatatgtatgctggttctatggaaggttttcagtcctcagggtgctaaaattcttgtgcccttctgcctctttaaccatagcacacatgctcaagagaactagagttgccaagaaatcatttctatagatgggctccaacaaacccaggttatggaggatggcctatttccaacaagcttcatttaaggttctcctacattaaaggaataaatatgatgatgtgaagcagaacataaatgcctgcagaaagtcagaaaattccctcctggtgcctcatcatcattggggtgaggggaacaaaaggtggaaaaatcgattccaccttcttattcttggagaagaaaacaactctctagacaagaacatggaccagcaaacagggagagactgatttcagtcaattattgcagttgccacatttctcaggagtgttgatgtccaggtcggggctgacccatgaatggtcagcaacacactcaggccaacaaaaaggaggaggcctggctgtgaatgaagcatgctcgactttagctcgtcatatgagcaggtcacagagagcagatgcctgtgggtgcttagtgaacactgcagggcatggcactggtactgaaagggactacagttaaatgtttatcagaatgtttacagcaaacttcccacagcacaggtcaggtgaactctttctgcccatgcatgagcctttggacagacagcccccaaaactatgagtctttaatattagcctgcatccctcagttctggacttttccactgtactgggttatacgtcattcaaaattcacctccaaaggaacctcagcatagattcctcactcactgtgggactggacacagcctttcagggcatctccaaatagaaccaagatagtgaggtagggggcgggactcaactccagaggctgggctcagacactggaccaaattgagagctagctgaaacagggccagggcagaagyagctttccataagacatgcccaccagtgtgccatgtcagtttaccatcgccgtggcaacacctgagagttaccacccctttctatggcagtaacccaatgacccggaagttaccacctttttcctagaaatgcctgcatcaactgccttttaacttgcatgtaattaaaagtgggtacaaatatgactgctgaactgcccctgagctgctactctgggcacactgcctgtggggtagccctgctccacagggagcagtacagctgctgctgcctca

SEQ ID NO: 77058 - DNA, 710 bp, Homo sapiens
aaactgccacgtccccaatccaccaccatgggtggcctccttcaaagccctcagctctccacaggaaacctcctcctccaggacacctgtcatcagctccccagctgccttaatttccttcctcaaaacactctacattgcaatcatgcgaccatgcaattgttcagcatatatgttagtttcctatgactcctatagcaattaccacaaactcagtggcttcaaacaacacaaatctattctcttacagtcctggtggtcagaagtccaaaatgtgtctttcaaggctgaaagcaaggtrtcagagggttggctcctttggaaggctccagcagagaatctgtcccttgcctcttccagtttccagagctgccagctttcctcagtttgtagctgcagcactcccacatttacttccataatcacattgccttctcctatgctgatcacctgcctcctccttatgaaaacccctgtgattacattaggccaatgcagagtaatctctccatctcaagatcctgaacttaatcacatctacagagtccattttgccatatacgataatattcacatgttccagggatcaggatacagacatggtgggaaggtggtgattactcagcttaatacacagtgtgtctttcccactaggatgttagtgatcagggtctttgtgcagctaatttagtctttatgctccaggatcc

SEQ ID NO: 77059 - DNA, 710 bp, Homo sapiens
aaactgccacgtccccaatccaccaccatgggtggcctccttcaaagccctcagctctccacaggaaacctcctcctccaggacacctgtcatcagctccccagctgccttaatttccttcctcaaaacactctacattgcaatcatgcgaccatgcaattgttcagcatatatgttagtttcctatgactcctatagcaattaccacaaactcagtggcttcaaacaacacaaatctattctcttacagtcctggtggtcagaagtccaaaatgtgtctttcaaggctgaaagcaaggtatcagagggttggctcctttggaaggctccagcagagaatctgtcccttgcctcttccagtttccagagctgccagctttcctcagtttgtagctgcakcactcccacatttacttccataatcacattgccttctcctatgctgatcacctgcctcctccttatgaaaacccctgtgattacattaggccaatgcagagtaatctctccatctcaagatcctgaacttaatcacatctacagagtccattttgccatatacgataatattcacatgttccagggatcaggatacagacatggtgggaaggtggtgattactcagcttaatacacagtgtgtctttcccactaggatgttagtgatcagggtctttgtgcagctaatttagtctttatgctccaggatcc

SEQ ID NO: 77060 - DNA, 710 bp, Homo sapiens
aaactgccacgtccccaatccaccaccatgggtggcctccttcaaagccctcagctctccacaggaaacctcctcctccaggacacctgtcatcagctccccagctgccttaatttccttcctcaaaacactctacattgcaatcatgcgaccatgcaattgttcagcatatatgttagtttcctatgactcctatagcaattaccacaaactcagtggcttcaaacaacacaaatctattctcttacagtcctggtggtcagaagtccaaaatgtgtctttcaaggctgaaagcaaggtatcagagggttggctcctttggaaggctccagcagagaatctgtcccttgcctcttccagtttccagagctgccagctttcctcagtttgtagctgcagcactcccacatttacttccataatcacattgccttctcctatgctgatcacctgcctcctccttatgaaaacccctgtgattacattaggccaatgcagagtaatctctccatctcaagatcctgaacttaatcacatctacaragtccattttgccatatacgataatattcacatgttccagggatcaggatacagacatggtgggaaggtggtgattactcagcttaatacacagtgtgtctttcccactaggatgttagtgatcagggtctttgtgcagctaatttagtctttatgctccaggatcc

SEQ ID NO: 77061 - DNA, 811 bp, Homo sapiens
tggccaacatggtgaaacaccgtctctacaaaaatttaaaaattagccgggtatgatggcgggcacctgtaatcccagctactcgggaggctatggtgggagaattgctggagcccagaaggcagaggttgcagcgagccaagatcacgccattgcactccagcctgggtgacagaacaagactccawcttaaaaaaaaaagaaagaaagaaagaaagaaaaagataaagaaatagggaatagggacacctgtgtgtttttattgtaagtttgatggagaagtcgatagtagtggagaagtgtgattggacaaagagagtatgatctaattagttatatacaagggggaactcagcaaggcctgtttgttcagcttttcttctgcatccctgtgtcttcagagataaagacgttcctcccctccaggtaaagagtgggcacctctcacacaaggaccttatgccttgctccaggagaaagtcagcttggtttcatggcctgcttcaggaaaagaagggcaaggagaaggtgagagaggccttcctgcttctgccgttttctccaatgccaatctgccatattttggggtagtattccctgaaccccaccacagcctcagagagtggggctttgcccaagggtgagttgcagcactctgccaggtgtttcaaacagcagaggttagttacggggtattgattcaaaatagctaccacgcatgagcttgtcaccctgcaccaactcatcctgtgcagttaccactactgttaactctgacctaggatttgtagttcattcgggatgtcatgca

SEQ ID NO: 77062 - DNA, 811 bp, Homo sapiens
tggccaacatggtgaaacaccgtctctacaaaaatttaaaaattagccgggtatgatggcgggcacctgtaatcccagctactcgggaggctatggtgggagaattgctggagcccagaaggcagaggttgcagcgagccaagatcacgccattgcactccagcctgggtgacagaacaagactccatcttaaaaaaaaaagaaagaaagaaagaaagaaaaagataaagaaatagggaatagggacacctgtgtgtttttattgtaagtttgatggagaagtcgatagtagtggagaagtgtgattggacaaagrgagtatgatctaattagttatatacaagggggaactcagcaaggcctgtttgttcagcttttcttctgcatccctgtgtcttcagagataaagacgttcctcccctccaggtaaagagtgggcacctctcacacaaggaccttatgccttgctccaggagaaagtcagcttggtttcatggcctgcttcaggaaaagaagggcaaggagaaggtgagagaggccttcctgcttctgccgttttctccaatgccaatctgccatattttggggtagtattccctgaaccccaccacagcctcagagagtggggctttgcccaagggtgagttgcagcactctgccaggtgtttcaaacagcagaggttagttacggggtattgattcaaaatagctaccacgcatgagcttgtcaccctgcaccaactcatcctgtgcagttaccactactgttaactctgacctaggatttgtagttcattcgggatgtcatgca

SEQ ID NO: 77063 - DNA, 811 bp, Homo sapiens
tggccaacatggtgaaacaccgtctctacaaaaatttaaaaattagccgggtatgatggcgggcacctgtaatcccagctactcgggaggctatggtgggagaattgctggagcccagaaggcagaggttgcagcgagccaagatcacgccattgcactccagcctgggtgacagaacaagactccatcttaaaaaaaaaagaaagaaagaaagaaagaaaaagataaagaaatagggaatagggacacctgtgtgtttttattgtaagtttgatggagaagtcgatagtagtggagaagtgtgattggacaaagagagtatgatctaattagttatatacaagggggaactcagcaaggcctgtttgttcagcttttcttctgcrtccctgtgtcttcagagataaagacgttcctcccctccaggtaaagagtgggcacctctcacacaaggaccttatgccttgctccaggagaaagtcagcttggtttcatggcctgcttcaggaaaagaagggcaaggagaaggtgagagaggccttcctgcttctgccgttttctccaatgccaatctgccatattttggggtagtattccctgaaccccaccacagcctcagagagtggggctttgcccaagggtgagttgcagcactctgccaggtgtttcaaacagcagaggttagttacggggtattgattcaaaatagctaccacgcatgagcttgtcaccctgcaccaactcatcctgtgcagttaccactactgttaactctgacctaggatttgtagttcattcgggatgtcatgca

SEQ ID NO: 77064 - DNA, 811 bp, Homo sapiens
tggccaacatggtgaaacaccgtctctacaaaaatttaaaaattagccgggtatgatggcgggcacctgtaatcccagctactcgggaggctatggtgggagaattgctggagcccagaaggcagaggttgcagcgagccaagatcacgccattgcactccagcctgggtgacagaacaagactccatcttaaaaaaaaaagaaagaaagaaagaaagaaaaagataaagaaatagggaatagggacacctgtgtgtttttattgtaagtttgatggagaagtcgatagtagtggagaagtgtgattggacaaagagagtatgatctaattagttatatacaagggggaactcagcaaggcctgtttgttcagcttttcttctgcatccctgtgtcttcagagataaagaygttcctcccctccaggtaaagagtgggcacctctcacacaaggaccttatgccttgctccaggagaaagtcagcttggtttcatggcctgcttcaggaaaagaagggcaaggagaaggtgagagaggccttcctgcttctgccgttttctccaatgccaatctgccatattttggggtagtattccctgaaccccaccacagcctcagagagtggggctttgcccaagggtgagttgcagcactctgccaggtgtttcaaacagcagaggttagttacggggtattgattcaaaatagctaccacgcatgagcttgtcaccctgcaccaactcatcctgtgcagttaccactactgttaactctgacctaggatttgtagttcattcgggatgtcatgca

SEQ ID NO: 77065 - DNA, 835 bp, Homo sapiens
gatccaaaaaaaacagtcattgatttggaaggagatgctgttctccatctcagccagctgttaaagggacatggattgaactcscaggcagggaggggcattttgtttcccttggccacatcagcatgtttttacagttgagagagcaggagatgactctccagcctgtggcagagagaaagtgcccttggcccaactccgtggaagatgttccccaccccccttccaggagaagctcctgctggtggatgcacgaacccagctggtggcgacacaaggccagtgggcactctctgccttgctgaggcctcagcctcctggctgcgaaggccccgggttcccctctgcagccaagtctttacttccccttcaccctgaaaaacgtcttcacagactatcattcttggtctcttgactgcctttctccggtttcctttcacaatccctcagagatgggacatctctccagaggacgcctgggttgtgaggatctatggtcagaacattttggtcaatgacagattacatacaccacagtggctccctcagattataaaggagctgaataattcctatcaccaagtgacagtgctatgccatctaagcttgtgtaagtacaccctgtgatgttcacacaatgacgaaatcaccattgttaagtaaatgggtttgggagaaggttcaaacagcttccacctgccccacccttccgtttcctaagctcagccatgcctttggagggtagcacctttgtttcttccacatgtcgcaaatacagtgacacatgactgtattcaggaacaaggaggctctggtgcaaaaagaacatcatttc

SEQ ID NO: 77066 - DNA, 913 bp, Homo sapiens
tgacccatatgaggagatcaaggacagcaaagctgagctatggtgatggaagccatgggtatggcagggcatccggggaaccggytgtgttctgagtcttgatcttggtggtggtttcatgggcatggtcagtgtgtgaaaatagtgctgcaatgaacatacatgtgcatgtatctttataatagaatgatttatattcctttgtgcttcacatttacgatggaatgtttttcatagacacagcctcataacatttctattcatattggtagtggagaagaaaatggggaccctctattcccttttaagagaaaaaagatcattgattgaacctttaaaagagatcaaatgaggtcatacacgggactcgaatacttcaggatcaggagttggtggctccatccagctccgcaaacttgggcaagttctaatcactctggccttcagtttcttcctgtgttaagtggagataaaaacttctacttctggccaggcatggtggctcatgcctgtaatcccagcactttgggaggccgaggtgggcggatcacctgaggtcggaagttcaagaccagcctgaccaacatggagaaaccccatctctactaaaaacacaaaattagccgggtgtggtggtgcatgcctgtaatcccagctattcgggaggctgaggcaggagaattgcttgaacccaggaggcagaggttgcggtgagccaagatcgcaacattgcactctagcctgggcagcaaaaatgaaactctgtctcaaaaaaaaaaaaaaaaacttctacttctagtgttgttgaggagattaaatatgtgtcacattgcctaaaatactacaaatgttcaatagattggctatgatgattattaatcagccccacaggtggataggagaagggaaagag

SEQ ID NO: 77067 - DNA, 583 bp, Homo sapiens
tggataaacaaccgtgtgtagttttgcttttctgttttatctcaagatcctgctgacatggctaacagggcaactgtgaaaagatttttattcgtgtctacatcagtgtgaaaggcttcatcctggtgtgtactaatcactcagacagtggtatgaataaatgaaggaatgcattgacaaactaatacacaaggtgattccggaaargcgcacctcctgggataaatacggtgacagtggtgagtctgctctaggtctacgaagttcttgctcttagtagagatccagacacccaatgttgaagacagttcctctttgctttagaaagctttgtgtgcaagagatggcaaactacttcttaaaaaacagagagtcccgtaaacatatgccaaggtccacggtgctccaggcagggtgcttggtgccagagagacagagtgaactgagctggccatggcatctgtcctggagaagtcacactccaatcaggaaggcaggaatgtgggccagacctacagcctctggggaagggtgtccataagctgtgaggtggtggccactgactccaatggcagagaaggtg

SEQ ID NO: 77068 - DNA, 792 bp, Homo sapiens
  misc_feature (1)...(792): n = A,T,C or G
ttaagcagctttcaagccaacatcartgaaaggttttaggtgactatcagaaatccattccactctccatggtccaccggtgtcgactatgcctttcaattgtgccgacagaccctgtcagaagagaatggtttcgcactaatccaagtttacaaccaaaatcatcctgttttcagtggtgtagatccagtgtctgtatctgtcttgtcaactcacaatagcattagcacagggggctggatttatgctctaagaaatgcaatttacctttctaagctcacttatatatatttgtatctaacatattgtaaatttcttaaacttgttacacatttaattttataactagaaatcaatttttatttatttatttatttatttatttagtggacaacagaaaatgaagtgcaagagtccctcatttccggggcaannnnnnnnnnnnnnnnnnnnnnnnnnnnnnnnnnnnnnnnnnnnnnnnnnnnnnnnnnnnnnnnnnnnnnnnnnnnnnnnnnnnnnnnnnnnnnnnnnnnagctcaacttgtttgctgtttaggtgggccagtatttcaacacaggaggttagaattaatctgagaaatgagggagtctgtcaaacccatacagagccacattaaccctggtgagccattggtgtgtatttcacttttaaaaggtttgtaatattttgcaaatgttggcaaatccattggattagcctggtgactccaatttaaagtgtataattgggtattcaactttagaatctggatattggtcaaaaggtataaa

SEQ ID NO: 77069 - DNA, 792 bp, Homo sapiens
  misc_feature (1)...(792): n = A,T,C or G
ttaagcagctttcaagccaacatcagtgaaaggttttaggtgactatcagaaatccattccactctccatggtccaccggtgtcgactatgcctttcaattgtgccgacagaccctgtcagaagagaatggtttcgcactaatccaagtttacaaccaaaatcatcctgttttcagtggtgtagatccagtgtctgtatctgtcttgtcaactcacaatagcattagcacagggggctggatttatgctctaagaaatgcaatttacctttctaagctcacttatatatatttgtatctaacatattgtaaatttcttaaacttgttacacatttaattttataactagaaatcaatttttatttatttatttatttatttatttagtggamaacagaaaatgaagtgcaagagtccctcatttccggggcaannnnnnnnnnnnnnnnnnnnnnnnnnnnnnnnnnnnnnnnnnnnnnnnnnnnnnnnnnnnnnnnnnnnnnnnnnnnnnnnnnnnnnnnnnnnnnnnnnnnagctcaacttgtttgctgtttaggtgggccagtatttcaacacaggaggttagaattaatctgagaaatgagggagtctgtcaaacccatacagagccacattaaccctggtgagccattggtgtgtatttcacttttaaaaggtttgtaatattttgcaaatgttggcaaatccattggattagcctggtgactccaatttaaagtgtataattgggtattcaactttagaatctggatattggtcaaaaggtataaa

SEQ ID NO: 77070 - DNA, 792 bp, Homo sapiens
  misc_feature (1)...(792): n = A,T,C or G
ttaagcagctttcaagccaacatcagtgaaaggttttaggtgactatcagaaatccattccactctccatggtccaccggtgtcgactatgcctttcaattgtgccgacagaccctgtcagaagagaatggtttcgcactaatccaagtttacaaccaaaatcatcctgttttcagtggtgtagatccagtgtctgtatctgtcttgtcaactcacaatagcattagcacagggggctggatttatgctctaagaaatgcaatttacctttctaagctcacttatatatatttgtatctaacatattgtaaatttcttaaacttgttacacatttaattttataactagaaatcaatttttatttatttatttatttatttatttagtggacaacagaaaatgaagtgcaagagwccctcatttccggggcaannnnnnnnnnnnnnnnnnnnnnnnnnnnnnnnnnnnnnnnnnnnnnnnnnnnnnnnnnnnnnnnnnnnnnnnnnnnnnnnnnnnnnnnnnnnnnnnnnnnagctcaacttgtttgctgtttaggtgggccagtatttcaacacaggaggttagaattaatctgagaaatgagggagtctgtcaaacccatacagagccacattaaccctggtgagccattggtgtgtatttcacttttaaaaggtttgtaatattttgcaaatgttggcaaatccattggattagcctggtgactccaatttaaagtgtataattgggtattcaactttagaatctggatattggtcaaaaggtataaa

SEQ ID NO: 77071 - DNA, 1918 bp, Homo sapiens
aggaggagataattttaatccgactaatagcaaagtgacatgaactcaaagagggctgtagcctactggttgacctcgtgattggaaattagctcatgaattaatttttgccatagtgacattggatatattcatttgcgcctttcttacttataacttctaatttttttcttaatttcctgactattaaaagtttggtatttctgagaatttccttctctttcctccagctccccaatgatatccaataaatattccagttcatataaaaaaagagtaatttttgcacttagtgagtgcaatttaacttaacatcctttttaaactgagatagattccatataccatcaaattattctcctaaagtctattggtcagtggattttactacatttacaaagctgtacaaccatcaccactaattctagacccagcaaatgcagtagtttccctgcttcatgcctgtgaaatgtgttgcttttccttagtgtcctcatgagggagcctcagagagtggagaaagtccaggttcatcacgacagcacctcggctgtgaactcacatgaacaggtgagtaaattggaaaagcacaacatactggctagatgacagcttgagttatattttcttcttaattcctggggtagctgagcatagaaatttcagtttagttacataaactgtagcatgattttttactcctcttttaatatcaattatcaaatatttagaaaaatggaagaaataatctacgcttcacagaaactaggataaaaattaaaaggcccttattcccctctttttccagatgttagctatcataacccataaggaaatattaaaaggctatgacctaggctgactaaatttatagaagcaataaaaagaagcccaacatatgcataaataccagctttggtgggtgggagtaagatagtgggggataagagagccctagaatagcagatactaaaataaccatggactgtcaagcaaaagggccaccaagaagcaagggtgccttgggaagggaagtgtcctggggtacaagagtagggtctgcaggataaggaagggagcgcagctatctctcccctcttcctgctgcctgattaccccgcatccctctagaaattggtgctgtggatccaggcttccatctgtttgcattcagatctgtgatcttgccaagtctaatctgaccaaattattggcagctttgcatcgtacacaagtgactggggacctctcctctgaatccagagatgaagtgagccacttggaagaatcctgcagatagtaaaacttctgagcatttatttccccaatcctcttggaggctattcagccagatactgtgcaatacatccacctgggaggctgcagcagaggagagatccacattgataaaacacacagaaaggggattttgatctcaatataagggaacttggagagttgtaaaccatggcagactgtactgtttagcttctgaggcataagagccattacttcaagttgcttgttcaatacgctgagctacagggtcacgccagacttcaggaagagccagaacactcagaacctagactcttactctaaaactaggaactccagctgctgctgtgtgagagctgcttsagaactgtgtgtcatgttctgggcttttctcttgcagggattgcaaggccaggaccctgaaatttgcccaactcggagaccctgaggatgccccagggacctgggtccttcttcctcaaaacagaagggagtttcaaatgagattggaccatgacaacagtgactatcattatctagatgacagtaggtttaaggaaaatattcatttactggttttcaaacttcatgaaagagaaagcatgaattgcagactcagtgtttaaaaatcacatgcatt

SEQ ID NO: 77072 - DNA, 667 bp, Homo sapiens
acttggcagtgggggagaatctgcacacatttggtcacagaagtctcctggggtcattgttgcgtggtgagagtggaagagaaacacagtttgagaattgtttttctgatacgaaatgaaaatataatttaaatacatatggaaaatagatatgtctttattaacaccattctcaatttgtcaaatttcygatgaaagaaaggtctattttgtgaatttaaggatttaagcacaggcaataacagatttaaatacaaaagtatagaggtgtcattattatacattttcttcctaagtgagtatgatgaactttatcggttgaaagattgctgctgagagtcagtggcactgagtcatattttaaccttttcaatatgacagaataaaccattagctgtaatcttattcatattgtttctgtggttgtcagagtctgccacaaagtcccagcactcccttcgtcattccaaagcatcacaattagtcttaatttctactcccacttcatctgagataggactcttttgtctgtgctaacactgacaggttttcaaactgtctttttaaacattatactttgtatttgtaaggcccctttccactgctagagccactggaattgcactttgaagtttgcatataatcctttattagtcttaatatgtga

SEQ ID NO: 77073 - DNA, 667 bp, Homo sapiens
acttggcagtgggggagaatctgcacacatttggtcacagaagtctcctggggtcattgttgcgtggtgagagtggaagagaaacacagtttgagaattgtttttctgatacgaaatgaaaatataatttaaatacatatggaaaatagatatgtctttattaacaccattctcaatttgtcaaatttccgatgaaagaaaggtctattttgtgaatttaaggatttaagmacaggcaataacagatttaaatacaaaagtatagaggtgtcattattatacattttcttcctaagtgagtatgatgaactttatcggttgaaagattgctgctgagagtcagtggcactgagtcatattttaaccttttcaatatgacagaataaaccattagctgtaatcttattcatattgtttctgtggttgtcagagtctgccacaaagtcccagcactcccttcgtcattccaaagcatcacaattagtcttaatttctactcccacttcatctgagataggactcttttgtctgtgctaacactgacaggttttcaaactgtctttttaaacattatactttgtatttgtaaggcccctttccactgctagagccactggaattgcactttgaagtttgcatataatcctttattagtcttaatatgtga

SEQ ID NO: 77074 - DNA, 709 bp, Homo sapiens
gcaactactgtactggaaatatgctaaattagggttctgattagagttaatggaattaacttgggtgagagaaaatactcaccattaatctaggggtaacagaggagttaaactccaattcagaaayagagcagttcaaaatcagaatctagagtcagcctacatgggcttgatctgggaatgtgccctttattagacgtgtaaccttgggctgctgcttgactgaataggtcttcgattcctcatggaatgaatataataagatctgatgaatgcaattagacagtgcctgaaacagtagtcttaagtaggtatttttgttgtcccactttttgagaaacaaaaccaaagtcaattcaattaaaactgcaggtttcttgatttcatcctaatactttgcaaattaatcacagaacccaagtgaaattgcctagactctcaaagagttcgaaaaacatttctaatacactcaaaattttcctagttgacgttcacagattatcaagagtaaagcaccttcatacagttttgatcctcacactgtctaaatctgaggagctgtcaggaaagacatgtaaggagagatctaagctaaaactcaaaccacacatgaggcttttcaactgtgaccaacttgtagttaaaattcagtttatgcttttctgtccacctaagagcaaattaaacctttaagaaagcaaaggataaa

SEQ ID NO: 77075 - DNA, 709 bp, Homo sapiens
gcaactactgtactggaaatatgctaaattagggttctgattagagttaatggaattaacttgggtgagagaaaatactcaccattaatctaggggtaacagaggagttaaactccaattcagaaacagagcagttcaaaatcagaatctagagtcagcctacatgggcttgatctgggaatgtgccctttattagacgtgtaaccttgggctgctgcttgactgaatwggtcttcgattcctcatggaatgaatataataagatctgatgaatgcaattagacagtgcctgaaacagtagtcttaagtaggtatttttgttgtcccactttttgagaaacaaaaccaaagtcaattcaattaaaactgcaggtttcttgatttcatcctaatactttgcaaattaatcacagaacccaagtgaaattgcctagactctcaaagagttcgaaaaacatttctaatacactcaaaattttcctagttgacgttcacagattatcaagagtaaagcaccttcatacagttttgatcctcacactgtctaaatctgaggagctgtcaggaaagacatgtaaggagagatctaagctaaaactcaaaccacacatgaggcttttcaactgtgaccaacttgtagttaaaattcagtttatgcttttctgtccacctaagagcaaattaaacctttaagaaagcaaaggataaa

SEQ ID NO: 77076 - DNA, 779 bp, Homo sapiens
ggtgaaatgttcaaaagttagtattgttattaggtgctgggcacttttctaggctttgggatatagagatcaatgtccctgatgtcctggtgtttataatttattgtggacactttgctatttttttggatacagatctttattttcataaacatggataattttcattgagtgcagtgtgatctcaattgatacttttgtagtatttcatcattatgcttatattctttttaaaatttaggtactgttgagggaaagtgagaatgacatgattttgataacatggtagaacctttttcattcatctggtgttgccacactggggctctgggtgctttatgaatcatgttcacaagtcatacttgtgtctgtccatggttcttttcactacagccaccatagttcagggtgagatttttcacaccgactgtaaagatttatctgtggaaaatggtaatgagcttgcctggttgatgtcctgttgttttcccaagtacatacttggaagagagtgaacagaagactaaaacgtgggtcaacagatgttttgcagtgagctaaaaaataattgacttcactagaacaaytgcttgatattctacagcagttttgcaggtttctgaagtggaagaagcagatagtgatggaatgctgctaaaagaaatataagagaataataacacccttggtgcttgttaatttcattttgaattttttttttttaagttgtcagttacatgtttggtgactgctttgaaagttctgattctgttgcatgt

SEQ ID NO: 77077 - DNA, 668 bp, Homo sapiens
atattttctaaactgtctttgttttacaaataaaggatcatggctacattagtgtgttgcactcattatcaaccgctttttttactcagatattcattcttatatttggaaagtgtggcctctgttttcaaattaatttttaactaaatttttattaatatatttaagaattattttttgatttccaaaatttgcctccatggataaaaaggattttgataagcaggtaatgggggaagaaatctcagtgagacaaaggactcgaaactctattaccgtctccagagtggcctcttcatggtacagattcctgctgattctcacgcctgtctagatcaatctttttctatcctgacactaaaacaactcagaagttctckatggaatgagaatgaaaatagcttcacagaacttggaatagtgcgtgcctcgttgtagacattatagaaatggcaacaattattgataagtttcattattattcaaatatcaactacatatatgtacacacctttccttcccttctgccaaagttccattgtgaaatccagttctttggactaaactccttgtttcgttcagaaaagtgatttctctctcaggatttattataatccatgtcattaaaactggattctgtcacatggggtttctcagtctctcatgca

SEQ ID NO: 77078 - DNA, 708 bp, Homo sapiens
agtcactgttattgttagataaattagatgatgaaattagataacaacattctattaggttggtgtaaaagtttttgccatttaaaaatgatggcagccaggcgcagtggctcatgcctgtaatcccaacactttgggaggccaaggcaggcatatcacaaggtcaggagtttgagaccagcctggccaacatagtgaaatcctgactatactaaaaatacaaaaaattacctgggtgtggtggcgggcgcctgtaatcccagctacttcagaggctgaggtaggagaattgcttaaacctgggaggcggaggttgcagtgagccaagatagcaccactgtactccagcccaggtgacaatgcgagactctgtctcaaaaaaaaagatggcaaaaactgcaattacttttgcaccaatctaagagtgtcattcattcattcattcattctgtttacatccaatttgcactccatatatgaactggggatacagaaaccaccaaagccatttctgttctcagggccttagcatctgctatggggaatggacaagtaataggcatgggcaagatttaaacagcatggctgccatgtccaagaagcttcaaggtcagtacaaatgagtcacagaattagagaagggcagttccaggtgtggtaggtcttgaagcatgtgtaacttgggcggccctgttttwaaaaaaggat

SEQ ID NO: 77079 - DNA, 2037 bp, Homo sapiens
ggatcccataactctttgttggggggttggcctatgcattataagatgtttagcagcatccttggcctttacccacgagatgccagtagcatcccattttccagggtgacaaccaaaaaatgcccccagacattgccaggtgttcccctggagggcaaaaccacctccagttgagaacccctgagtcacgagactggcaaagcggacaacatgggatgaaggaatagccaggtgggctgcaaagctgctcaaagtgtttgagatccaggaagaaggctggtttggctggagggcaatgggccagggaaggatggcaggatcatcatggccacttgctctgtgaaactctccagaaagtactcagcaacattcatggagtccctttgctgtgccaggcattgtactagctgtgcccaaggacacagcacatgctccaaggtgataatagtcgggtggctggataagacacaacagctgtcagcctgatgctatccatggtaacagaatattctggaccaaaagcaagcagagaggcactccaagggcagtggccatggtgaaaaagatgctggagaaggcaatgtctgggcccctttttgaagaggagagagcaggcagctgtggccttcaccttcccagctcccgcccctccattgcccatagcaactgcctgtccccatgcccagctgcacgcggttttggtggaatttctaatcatggtgccctgctagactggccaagggctggcatgagacccaagcttggccaccatatactttcttcctggaatcaggatattggccagagaaacccaagggcattgaatggctagagtcagtttttctaatggaagtggaacaaagcatgttcttttgttctggcataattttttgactatctcaactccctaagaagcaattgtttctctctcttccaaggcctatttttcagcttttccttccaaagccctttcaatacacctctatttaattcaccagagtgggtttccaatgtttgaaaccccaattaaaatagaaacagtataatgtgaacagggataagagagtgtaggtttctgattcactgtgctcaccactttacattaaataagctgtgtgtccctctctctcctagttacaagcaggatgctttgccaaggcctgactgtgtctttttctcttcatatccacagtgcccagctcagggttgacttctcctctgcacctgccatggtttataattatgcatttctttgtgggataatttgtttaatgtcatctactctatgttggaagtcccatgaaaatagaatgcatggagcccaatttattaggaagaccaactgtcccaatttgcctggggtggggtgggggatttctgagacatggcttccagggctaaaatcaggaaagtccagggcaaattggagcagtgcccaccctaccagtgtctggcatataggaagtcttcaagcaccagttgtcccggtcactcaaggaatatatgttgagatgaacggaggcaaactgcagcacagcagaaggcatattctttcatgcaaaaacatttcttcatgcctgctgtgtgccaggtaaccagcttgtcagaagcagaagattcaaggaaggaaatcccagcagccagggctgccataggattgtaggttgaaatcacactgcatgaggtcttgagcatcaggctaagaaaccagcatgcagcacccagatgaggcaggtcscctctgatttaggagaagggaggagatatgaaaacatagtaatttaggaatgatgcattggcagcgcctcccagggactctgataaggaaaccactgcaggaggaatccgcaggggctactgaaacaggggacagaacctgaagtgagcgggttatttggttgtttctttccaaattctgcactgggcagagagagggtttagcaacttcctttttcgtctcaagcacagccatctgctcagttcaacaagcagaaaatccacccccaggaaacgtgaatttatttgtgggtatgtgat

SEQ ID NO: 77080 - DNA, 780 bp, Homo sapiens
atcctgcagggaaatcccagttctgcctctgcctcataggttgctaccaccagatttcgatggttctaccacacacactttttgttttctttttcacattttaacatctcaaaaatcagagtatattttacaattgatggcatgtcagagtttaattgacagttgttattctttcttgatggcacattacacaatggtgagccttatcatgtactgttggcacatttatgaaatatattattatcagcttcatttttcacagatgagtaatgcagcctgttcacaagcaaatcagtggtcccctgcccacttccctgacctcacctccgcctaggatgcctgattctttctttctttctttctttcttttctttctttctttctttctttccttccttcyttccttccttccttccttccttccttccttccttccttccttccttccttctttccttctttctttctttctttctttctttctttctttctttctttctttctttctttctttctttctttctttctttcttctttcttcctctcctttttctttttttttttagtctcgctgttgtccaggctctgggctcactgcagcctccatctcctgggttcaagagattctcccgcctcagcctcctgagtagctgggattacactcacccgccatcatgcccagctattttttgtatttttgtagagacggggtttcgccatgttggccaggctggtcctgaactcctgacctcaggtgatctgcctgcctaggcctcccaa

SEQ ID NO: 77081 - DNA, 1486 bp, Homo sapiens
tatcccaggatcttaattaataggacacagacatcgtcataacagtgaggtctttatcagggactatctggttgctagaaatgaccttttactaagaaaagtttacataaatgggaactagccatcaagattcaaagcaatctcacaactgaggctgcagaaagtgggcggggcttccagagagctaaagtgtcctccccatgtctcgctggggctcctggggtgctrccctgcttctctccaatcacatgctccatcactgtctctgcagatccacattgtctgtaggttttttcttcttccttttccagaagttcagcccacctgggattttaatgtacagggctcagatctggtccagccctcagccacctctgggggaggcaggaaagtcaagtgataaagacccaggtcatattctgtctatggaactttgttactgcaggtgccagtggagtagcattgcagccaaattgcagcaatgcagacaaactacatccacatccctcctttccccaccgatctatcccgtgtgtccatgttgctgagaagaggcccgtgctgaaaacgtcaaccaacagatgctaacggtagatataggctcaaaagatctcagggaatgtccttcccaatatataaaacccatgttcacttcacgccttaaattctttatctgctgtgtcagttccaagaaatgttttgtttcagagttagtagaacttatttggaatttcctattggaatttcagtccatggtatatagtatttacataaacaaaataatataggttcctctagagataccttacaattatttttagtatatactatatatactaaaaatggaaatatttagcttctggtatatttttagtatatataatatgtactatactcaactatactaaatatgtatattaatatatactaagctatactaaaatattctaaaagctaaatattttgatttttactttaaacttttttcttggagaattgggatgcatcgtaaccagctacatgccataatctgacaaacatggtccttcattaaacttgatttcctcatctataaaatgggtatacaaacagagcttactttgcagggttgatgtgagaacgaaataaagctcagcaaacactagtctttcttcttcttataaccttgcatcgaagggctaacactatctaattgatccagagcctggatctcttggtttaaattctccaaaggattcatctgattggctgtgaagtgtgtctctccaggttcaggaatcttccagagccaggttggaggagaaggatcacgtgaagcaagcatgagcgcacaagctaaccttgcggctggtggggagggtgattgctgagaagccaggataggcaggactgccacggcagatgcagaattgacaataagaagattctagagtcctagagctggaaaggcaattgagaccatctggcccagtctctccagttttcc

SEQ ID NO: 77082 - DNA, 1505 bp, Homo sapiens
tgacgccaaccgctacttcctgctacgcacatttgggagaagatgcccaaatactcggcatcacagaaggaaaagaatttgtaattcctgaggaattctggaaaggagggaggaagtaacagagattggaagggaaaagacaatatgagtcagcaagatggcggaaggctgtgtactctgaggtgatcctcctttcttggtccctccaaatgttcagtaaaagctactcagccaaccaactgcttgttgtcagttgataatttgtaaaaactaataatgaagcctcagtttccagcccacatggatctaaaataggcatcagatcagcatggaaaagccggagacactggggaccttgaggacatggccctggagaaatcacaaaaaaggatggaaaggggctgtggctttcaagcctgtaaccctgggttgctccagcccagagatgcccatctctctggggacagtctcttgaagcagtaagtaatgtgggctctgggctgggcacggtggctcacgcctgtaatcccagcactttgggaagccaaggtgggtggattacaaggtcaggagatcgagaccatcctgggcaacaaggtgaaaccccttctctactaaaaatacaaaaattagccgggtgtggtggcatgcgcctgtagtcccagctactcgagaggctgaggcaggagaatctcttgaacccgggaggcggagtttgcagtgagccgaaattgcaccagtgcactccagcctggcaacagagcaagactccatttcaaaaaaacaataataataaaatgtgggctctggcaacatacagcctggatccaaatcccagtttttccacttagtagctgagtgatattgggcagatcacgtggcctttcttaatytccctcctttatctctaagaacaatctctacgattgttctgagaattagatgaggaaacacctacaaaacaattattatcgcggccagcacatggcaaaagcattgtttgctagcatggcaaaaagaagacaaccatagtggagatggtgattgtagtacacactcttagtctcctacagattgtccattctcccctttttcttgctcacagaaccatgcccagctgcagtgataaatcactatgagtctgagccaattgtgacaaatatttttccagcatcccttaaggccacatgacacagttttgaccaataggacttaagaggaagcctattgtgggggctttgggaaagctttgcttacgtggtgtcttagttcattttctcttgctataacagaataccacatactgagtaaattataaagaaaagaaatgtatgtagctcacagttctggaggatgggaagtccaagagcatggcatgggccctggggagggccttgttctgagtcaaaatgtggcaggaggcatcacatggagagagggcaagagactgcgtgtatgttcaggtctctcttcctcttcttataaagccaccagtcccatcatgg

SEQ ID NO: 77083 - DNA, 1307 bp, Homo sapiens
gggccttgtttttagttacttgcatccaaaggcatttctaacagatataatgtttatctatctccaaggagcagagaagtcccagtggacttccaggttgcatgtatattctgacctacaaaactgtcatatagaatcacttccagtttcccaaagtgtcacaacatccatacccctaaaaagtgggtccaggaaaatcattccactttgcaccattagaactcagctgacaaataaagtgaggccaagttattatctaaagcaataaaataaaatttctgcttccagagcaatcaatgaggaagaaatggttacatgagaaaggggaggggttgagtcataaccaatactatcccgaaaaatccaagcacatgtgtttcccactaagaaattaccactatgactgccaaatttccaattattcaattgaccccaattcatcttaatccggactgttcttggtttgttttgccttcccaagacccaaattaactattctataagcttcttatgagtaacgaccaagtcctagttatctttgcagctccagtgcctaatatgggacctggcacagattaggagctcaatccagaataaatgaatgaacgaatgagagattaggacagaatatttccaagccaaagacttcaagccatcagttgggctgaagtagaaaaagaagctgcatagccaaacagttgcaaccatgggtgctccagtaaagataactcaattcaaatcctgtgtctgcactgtcatacaccagctgtggggtctgttcgaaccactggcctccacacctcagtttcccttctgtaacatggggcaagttatggcaccctcatcagactggctatgagggtcatagtcatttagtaagtgttcacagaaagcactcagtgaaaggcaggtggtggtggtgttattatcacagtatttctattctgtgtagacagcatcaggatcacagggagggctcgtcaaacacagagctctgggccccacccccagagtttctgattcagtaggtctagggtggggcctgagaatttgcatttctaacaggaaccaggtgatgctgctgttactattctgggaactgcactttgaaaaccactggcctaacttattgctgtgaggtcacaggcaggctgtgctcgacagaaggcagaaaaggagagtaaagagaaggaagaaaggtaacacacacacwcacacacacacacacacacacacaaactcagaatttccagcacagagcttcccggcctgtgctaccatggctagatacatgtgcacccagaaat

SEQ ID NO: 77084 - DNA, 1307 bp, Homo sapiens
gggccttgtttttagttacttgcatccaaaggcatttctaacagatataatgtttatctatctccaaggagcagagaagtcccagtggacttccaggttgcatgtatattctgacctacaaaactgtcatatagaatcacttccagtttcccaaagtgtcacaacatccatacccctaaaaagtgggtccaggaaaatcattccactttgcaccattagaactcagctgacaaataaagtgaggccaagttattatctaaagcaataaaataaaatttctgcttccagagcaatcaatgaggaagaaatggttacatgagaaaggggaggggttgagtcataaccaatactatcccgaaaaatccaagcacatgtgtttcccactaagaaattaccactatgactgccaaatttccaattattcaattgaccccaattcatcttaatccggactgttcttggtttgttttgccttcccaagacccaaattaactattctataagcttcttatgagtaacgaccaagtcctagttatctttgcagctccagtgcctaatatgggacctggcacagattaggagctcaatccagaataaatgaatgaacgaatgagagattaggacagaatatttccaagccaaagacttcaagccatcagttgggctgaagtagaaaaagaagctgcatagccaaacagttgcaaccatgggtgctccagtaaagataactcaattcaaatcctgtgtctgcactgtcatacaccagctgtggggtctgttcgaaccactggcctccacacctcagtttcccttctgtaacatggggcaagttatggcaccctcatcagactggctatgagggtcatagtcatttagtaagtgttcacagaaagcactcagtgaaaggcaggtggtggtggtgttattatcacagtatttctattctgtgtagacagcatcaggatcacagggagggctcgtcaaacacagagctctgggccccacccccagagtttctgattcagtaggtctagggtggggcctgagaatttgcatttctaacaggaaccaggtgatgctgctgttactattctgggaactgcactttgaaaaccactggcctaacttattgctgtgaggtcacaggcaggctgtgctcgacagaaggcagaaaaggagagtaaagagaaggaagaaaggtaacacacacactcacacacacacacacacacacacaaactcagaatttccagcacagagcttcccggcctgtgctaccatggctagatacatgtgcrcccagaaat

SEQ ID NO: 77085 - DNA, 1841 bp, Homo sapiens
ggctggatgggagacgttcctattgcttgtgcaactttaagttttcccccagaaaatttgtccacaggaggaacaagacgggctgtctgggactcactggccggaagccaaacccaacacctgtcaagatgtaggaccctgcactgggaaaacggttgccctccctgctcagggacatctgcacagcacactgcattcctgtcctttggggtgacgtgggggcacgctgctttacttctttccactgctctttgaaaactgagtcgttaggaaagcatcagcagtggacatgtgtgtgtggaggatggcagtgtggctcccaggtgacacctgcatcactgctgagctccacaccctccagggctgtccatgtgacaccccagtggggctcatcacgcgctcctatccctgcccctgcaagtccctgccagggtgagctcaacagggctccacactatatgaatattcaggtgctagacccttagtgagtaccacgatgctgagtgtctctctcggagccaggcaacgaggacagggacataggtcagtggggtggcccctgccccagctgcctgccccctgcctctggtgcatgtgtgaccttgggcagtcggtgcaccctctcaggcccccctcctagttcagcagaggcagtggctgcatttctagaaagggagggcccataggaaagcatgctttaggtttgtattgcttttctgaacacacttcttccattgcaaagttgcaatgattgatagcataaaatagaacacatgtttcagaaaggattctggcacaaaaagtctgattcctaagagcttcaaataggaaatgcatttagactttacattttatgaatacattgaagaaagcacctttttgaaactatccaattctccagtgcttgtaggtgatggtctcattatttttgatccacaagaacacctggcaacctacaggagctagaatccaatgctcatggaaatcaactctatgaaactccaagacattgccctgtgatgttgccacggccctcaacataatagcagctctctatggggcctgcactgtgagaagcctccatgcccttgtcagggtatctgtgcccctgagatgtcctggagaccagtgaatcccttggcctgcccagccactgtcactgctgcatcagctctgtaacagacagggccccacagacaaggctcctacactcccagaatgtctgctccccaccaagaaatggccctactacacatactccaaaaacattggcccaaaaatacatataagctactcttgcattcaaatatttatcgagcactcgcttggccaggggcaggcatgaacaagacacactccctgctctcagacagcaaagcctcctgggcacaagccctctgagagtaagacaggtaagcagccgctgctgcaggggaacaggtgggaacaacgtcatcacraagacaggggtgggatttgtactcagaaaactcaggagtaaagcaggaggggaaagtaaactgtccaacaagactgatcccttcccagatcaaccaaactaagccaccaggctggaccctgtgactactggatcgtaaacagcctcacacaccgggaggcagcctgcctggtcctggcacagcggggagtgacatgtgaggacccacccagagctgggtacctgcagcaggtcaccctggcccaccaagtgccctggtaccctgaagggctggtagacattctctcatagccttataagggcctgggaactgaccctcaaagcttgagggtcccccccaataatgaaatgagagactttggggaaatgctatccacatgca

SEQ ID NO: 77086 - DNA, 1841 bp, Homo sapiens
ggctggatgggagacgttcctattgcttgtgcaactttaagttttcccccagaaaatttgtccacaggaggaacaagacgggctgtctgggactcactggccggaagccaaacccaacacctgtcaagatgtaggaccctgcactgggaaaacggttgccctccctgctcagggacatctgcacagcacactgcattcctgtcctttggggtgacgtgggggcacgctgctttacttctttccactgctctttgaaaactgagtcgttaggaaagcatcagcagtggacatgtgtgtgtggaggatggcagtgtggctcccaggtgacacctgcatcactgctgagctccacaccctccagggctgtccatgtgacaccccagtggggctcatcacgcgctcctatccctgcccctgcaagtccctgccagggtgagctcaacagggctccacactatatgaatattcaggtgctagacccttagtgagtaccacgatgctgagtgtctctctcggagccaggcaacgaggacagggacataggtcagtggggtggcccctgccccagctgcctgccccctgcctctggtgcatgtgtgaccttgggcagtcggtgcaccctctcaggcccccctcctagttcagcagaggcagtggctgcatttctagaaagggagggcccataggaaagcatgctttaggtttgtattgcttttctgaacacacttcttccattgcaaagttgcaatgattgatagcataaaatagaacacatgtttcagaaaggattctggcacaaaaagtctgattcctaagagcttcaaataggaaatgcatttagactttacattttatgaatacattgaagaaagcacctttttgaaactatccaattctccagtgcttgtaggtgatggtctcattatttttgatccacaagaacacctggcaacctacaggagctagaatccaatgctcatggaaatcaactctatgaaactccaagacattgccctgtgatgttgccacggccctcaacataatagcagctctctatggggcctgcactgtgagaagcctccatgcccttgtcagggtatctgtgcccctgagatgtcctggagaccagtgaatcccttggcctgcccagccactgtcactgctgcatcagctctgtaacagacagggccccacagacaaggctcctacactcccagaatgtctgctccccaccaagaaatggccctactacacatactccaaaaacattggcccaaaaatacatataagctactcttgcattcaaatatttatcgagcactcgcttggccaggggcaggcatgaacaagacacactccctgctctcagacagcaaagcctcctgggcacaagccctctgagagtaagacaggtaagcagccgctgctgcaggggaacaggtgggaacaacgtcatcacgaagacasgggtgggatttgtactcagaaaactcaggagtaaagcaggaggggaaagtaaactgtccaacaagactgatcccttcccagatcaaccaaactaagccaccaggctggaccctgtgactactggatcgtaaacagcctcacacaccgggaggcagcctgcctggtcctggcacagcggggagtgacatgtgaggacccacccagagctgggtacctgcagcaggtcaccctggcccaccaagtgccctggtaccctgaagggctggtagacattctctcatagccttataagggcctgggaactgaccctcaaagcttgagggtcccccccaataatgaaatgagagactttggggaaatgctatccacatgca

SEQ ID NO: 77087 - DNA, 1039 bp, Homo sapiens
cactgcactcagcacctagatgatgtaactctcaccttttgcctggaccttgcatatttaaggttggattgtgacatatactttagcccagctcagagttgtgatgatgacactcataccacaaaccagccaacagaagagatgctggcatttgtagctagacttagagaaaggaataaattcctgggtcttctgtaggcaatgtaactctccttcctgggtcctgcctataggaagcataaggacctgtctgtgtatccatcacccagctgttgtgactctccttttttgactgaaacctgccacaaagggtgattgtgacatatcactgggcccagaacctagtctctggtgtgtctttattagcagtgtgagaacagactaatacagtaaattggtaccagcagaatggggcattgctgaaaagatagccgaaaatgtggaagcaactttggaaccgggtgacaggcagaggttggaacagtttggagggctcagaatacagaagaatgtggggaagtgtgggacttcctacagacttgttgaatggctttgaccaaaatgctgatagcgatatggacaataaagtccaggctgaggtggtcccagacggacatgaggaacttgctgggaactggagcaaaggtgactcttcttatgttttagcaaagagactggtggcattttgccccttccctagagatttgtggaactttgaacttgagagagatgacttagggtatctggaggaagaaatttctaagcagggcaggtctctgttgatccatggatggggatctctgttctgcaggatggggtttgtaaagttgttaagaataaagcctactttaagagatatcaagcgaaatttagaagacrgcaagagggtgaaactgagtattatgcttggaaatgcttggtgatacaggacaaaaataaatacaacacacccaaatacaggatgatagtttgtgtaacacacagagatattatttatcaggttgcttatgcccgtacagaaggggatatgatagtacgc

SEQ ID NO: 77088 - DNA, 903 bp, Homo sapiens
tgcatcagcatataaaatgacatattctcagtgatcaggaacgaaaattgttcctacaacttctcatggaaagctggttgtcttttaacatcatgtgtcctttaatgagggtgaccatacatgccggttgtggttgtgcagttrcttccttttccacaagctcctgatttaaatgatacatttatggtggtccttccatatggcaggcaggccagtgtggtggaggaccatcctgcccagtgcaaacctttgctttgcttcagttgtggctgctgtccttggagagcttcctccttgccattctgattgtcgtctcattccaaccccttggtcctgatttgttctgtttggtcttccaatggacgccattaggatattttaaatgtgaactgcttgtgattttaggaaatagaattttctgcctacaaaagcaccaatgagactctgaatgtttttttgttttgtttttttttttttttttgagacagagtctcgctctgtcacccaggctggagtgcagtggtgcaatctcggctcactgcaacctccgcctcccaggttcaagcaattctctgcctcagcctccagagtagctgggattacaggcacccaccactatgcctggctaaattttttttttttttgtatttttagtagaggtggggtttcaccacgttggccaggctggtcttgaactcctgaccttgtggttcacccgcctcagtctcccaaagtgctgggattacaggcgtgagccaccgcgcccgtccctctgaatgtttttcttgatgagaagctctgcatgaaatagcaaaggtggcctgaatctcctgctaatgcaaaagtgagcctaaaagtgtcatcccatagtatttggtctcctgtgcgagtttctgccatgca

SEQ ID NO: 77089 - DNA, 1161 bp, Homo sapiens
tgcatttctgattgatacattccatgctcaccagcatccaagcagattttagtcacccccactggtgggccactatgtaatattctaaagtaccagataaaacatcatatcatgtaaaacccttaacaaatcgtgtaggaggtgttttgtatatcggttcactagtagcttgtcagagctccccacacctgtcactcttctccctactggaccsccagaaaggtttccagccctgtagttaggtgaagccacaagaccaacccggccattgggccatgagcaaatgagacacacattcctagcctggcatttacaggcagctgtcagttctatcccctgtctcttccttgccaagatgatcctgaaagctgctgtttctatggtggcatcacaaaacgccagtgtctctgtccagcagggaccctactgaccagcactaaagatgtcaccaagaaaaagtgtggttgtgtcaagcttccaagacagcagggccagtgtttcactcagcaaagcctatcctatcctgatacatccggcacaagaaaatatcaaatggataggctatatgtcatctggtctgtttgcaaacgttgaaagaaaaattaggtcagtcatgtttgcagttgttcagttttgttccaattaactgtgtcattcactagcaatggaatacctaatttccacaaatgcacatcataaacatcaccgaaaaactgctttttattattaaaagtttgagaagtgaatggccacagtactattctctcataatttatttaaattcttcttcagattattaatgttgaggaatttaaatgtgaccacagtgtagcttcagacaagcaagtgaaaatgttgacacaacctaactcttcttagcattgtgactgcaaagttagggatatcctgagccctgaaaggaagaatctcttggtcccaatatttctaataattctgtagctgtgatttctccagacttggttttctatagtgaatataaagactgtctttcttattaatgctaaggggaaaatataatttacatagaaaaatgttaatatatattgagacaatgtagaatcttaagggtaatgaccaatgaaaaaattgtaagtagtaatcattcgatgtgagaatgttaacaatctcttgatgaatgca

SEQ ID NO: 77090 - DNA, 1161 bp, Homo sapiens
tgcatttctgattgatacattccatgctcaccagcatccaagcagattttagtcacccccactggtgggccactatgtaatattctaaagtaccagataaaacatcatatcatgtaaaacccttaacaaatcgtgtaggaggtgttttgtatatcggttcactagtagcttgtcagagctccccacacctgtcactcttctccctactggaccgccagaaaggtttccagccctgtagttaggtgaagccacaagaccaacccggccattgggccatgagcaaatgagacacacattcctagcctggcatttacaggcagctgtcagttctatcccctgtctcttccttgccaagatgatcctgaaagctgctgtttctatggtggcatcacaaaacgccagtgtctctgtccagcagggaccctactgaccagcactaaagatgtcaccaagaaaaagtgtggttgtgtcaagcttccaagacagcagggccagtgtttcactcagcaaagcctatcctatcctgatacatccggcacaagaaaatatcaaatggataggctatatgtcatctggtctgtttgcaaacgttgaaagaaaaattaggtcagtcatgtttgcagttgttcagttttgttccaattaactgtgtcattcactagcaatggaatacctaatttccacaaatgcacatcataaacatcaccgaaaaactgctttttattattaaaagtttgagaagtgaatggccacagyactattctctcataatttatttaaattcttcttcagattattaatgttgaggaatttaaatgtgaccacagtgtagcttcagacaagcaagtgaaaatgttgacacaacctaactcttcttagcattgtgactgcaaagttagggatatcctgagccctgaaaggaagaatctcttggtcccaatatttctaataattctgtagctgtgatttctccagacttggttttctatagtgaatataaagactgtctttcttattaatgctaaggggaaaatataatttacatagaaaaatgttaatatatattgagacaatgtagaatcttaagggtaatgaccaatgaaaaaattgtaagtagtaatcattcgatgtgagaatgttaacaatctcttgatgaatgca

SEQ ID NO: 77091 - DNA, 558 bp, Homo sapiens
gatccatttgctaatgttaaatcatcagttattcatttcattttttcctttttctgatttsctaaaatatttggaagtttgtcttgccacagaaggcaaggacattttcaatgtaaggaataaagccaagagcaaggctgcaagtcataggctggcattgagcatgaggaaggcttgtcacgctaggcagatccttccctcaccactgactatctgcactggaggaacccaggagagcttgaatatttctaatcattgaatgccccaggacccttcaacacaggaagtgatcaattgcacctgagtaacctgtggctgaggacgggaatgtgtcatctcaagctgattggagcatgcctgacctcctcagtttaatggttcttctttcccttgaattagaaatgacctccctatacataccttccatgaaagatcctgtctcagcctattcaggctactatagcacaataccatagagactgcatgacttataaacaacagatgtttattgctcacagttctggaggctggaagtccaagatcaaggcatggctgatt

SEQ ID NO: 77092 - DNA, 558 bp, Homo sapiens
gatccatttgctaatgttaaatcatcagttattcatttcattttttcctttttctgatttgctaaaatatttggaagtttgtcttgccacagaaggcaaggacattttcaatgtaaggaataaagccaagagcaaggctgcaagtcataggctgrcattgagcatgaggaaggcttgtcacgctaggcagatccttccctcaccactgactatctgcactggaggaacccaggagagcttgaatatttctaatcattgaatgccccaggacccttcaacacaggaagtgatcaattgcacctgagtaacctgtggctgaggacgggaatgtgtcatctcaagctgattggagcatgcctgacctcctcagtttaatggttcttctttcccttgaattagaaatgacctccctatacataccttccatgaaagatcctgtctcagcctattcaggctactatagcacaataccatagagactgcatgacttataaacaacagatgtttattgctcacagttctggaggctggaagtccaagatcaaggcatggctgatt

SEQ ID NO: 77093 - DNA, 558 bp, Homo sapiens
gatccatttgctaatgttaaatcatcagttattcatttcattttttcctttttctgatttgctaaaatatttggaagtttgtcttgccacagaaggcaaggacattttcaatgtaaggaataaagccaagagcaaggctgcaagtcataggctggcattgagcatgaggaaggcttgtcacgctaggcagatccttccctcaccactgactatctgcactggaggaacccaggagagcttgaatatttctaatcattgaatgccccaggacccttcaacacaggaagtgatcaattgcacctgagtaacctgtggctgaggacgggaatgtgtcatctcaagctgattggagcatgcctgacctcctcagtttratggttcttctttcccttgaattagaaatgacctccctatacataccttccatgaaagatcctgtctcagcctattcaggctactatagcacaataccatagagactgcatgacttataaacaacagatgtttattgctcacagttctggaggctggaagtccaagatcaaggcatggctgatt

SEQ ID NO: 77094 - DNA, 668 bp, Homo sapiens
aaggctagtcctgaaaataactgtgcttgatccatttggcagcttcttagtaggttacgtcgaatctttttttctgaaatatcaaaatgattcattttgttgaatgtccagcatgatgcttgagaaagaatagaagacacactaaaaacatcatctttagaatttccattgtcatcagagaaatatctgatttttctcttttactaagagggaaattataaaacagagacccatgtagataaattttataactcatataaactggtaaagaaaaccactgattgtgctaaacatgatagctatagcaaaagttgtagttgattccctttttagctatttacagaaaggcacaatgaagaaaaatgtaataatttgtaaaatggaaaacatctttttttgccaaatatgatttcyatagaaaaaataaactattcatattaatacccaatttggatggcacatttcatgtgaaatgcactttactaatcattgccataaaatgaaagtgaggacatgtgcagtggctcatgcctgtaaccccagcactttggggaggccgaagcagaaggatcacttgagcccaggagttgaagaatagtcgggcaacatagcaagacccctaactctacaaaaaataaaaaatagctgagcatggtagtgcgcacctt

SEQ ID NO: 77095 - DNA, 682 bp, Homo sapiens
ttacaacagtagttgttatctcattacagtttatctttgtaccaaaatattatagtaacaaaatggaatgcttgaaagaaaaatgtccgatggagtctataaaaaatcatcctcttttagtatttctgcaccgactaaagcaaaatgttggaagattaatgtggtcaaaaaaccatttggggataaattgtttgaaatatgagtgtactttacataaagtcctttctccattaaaaaaatgttcttggtcacagaggatacacaatyctaaggaaatcaaaataaccatacctggggtcctgttgtcttcaattactctatctggattggtaatgacattgagcatctttcctttgtacacttttggttccgatgtaaataaacattttcagtttttcaaatcttcaataaaatccaagccactatctgggtctcaaaggcagggctggggataacagtaagcatgttttttttgtgtgtgtgtgggccacaaaaaagctcttggcccccaaaaggtttgctaaaaaatcaccagcatgaggtagattgattaataggagaaaagacatacaaatttatttaatgtgtgtacatggaagccttcagaatggagaccccaaaccccacggaggtccagaagcttaaatacagtcttgaggttgtagaaagaatgggggcttgg

SEQ ID NO: 77096 - DNA, 682 bp, Homo sapiens
ttacaacagtagttgttatctcattacagtttatctttgtaccaaaatattatagtaacaaaatggaatgcttgaaagaaaaatgtccgatggagtctataaaaaatcatcctcttttagtatttctgcaccgactaaagcaaaatgttggaagattaatgtggtcaaaaaaccatttggggataaattgtttgaaatatgagtgtactttacataaagtcctttctccattaaaaaaatgttcttggtcacagaggatacacaattctaaggaaatcaaaataaccatacctggggtcctgttgtcttcaattactctatctggattggtaatgacattgagcatctttcctttgtacacttttggttccgatgtaaataaacattttcagtttttcaaatcttcaataaaatccaagccactatctgggtctcaaaggcagggcyggggataacagtaagcatgttttttttgtgtgtgtgtgggccacaaaaaagctcttggcccccaaaaggtttgctaaaaaatcaccagcatgaggtagattgattaataggagaaaagacatacaaatttatttaatgtgtgtacatggaagccttcagaatggagaccccaaaccccacggaggtccagaagcttaaatacagtcttgaggttgtagaaagaatgggggcttgg

SEQ ID NO: 77097 - DNA, 577 bp, Homo sapiens
tccaacctagtcccccttcactgtgatcaaaaacatttaactaactcataataggtatcattttcctaaatctagatttctttatttttatttaaattccaacattattttacacacttagtgactgcacaaaattttaatggcatttctagtatctcaaatgctatgattaaattatcaaaacgtaatcgtaataataatattacctaaatctcaaatcagaattttataaatgaaactgtgagtaacgacttagagtcatttcagttgatgaaattcaacatatcatttattgttagtcattctgtcattattcatcaccagtaaagaatgttcatcactctttggagtcagcaaacaaatagtgctttgccccaaattatcttccactgtatgcctgaaggtatttaaatgtatgaaaacaatgtattttacatttcagtgcagatgaaaaagttttagtctatttaaatcgtgttcatatcgttcaaagaacaagctgagttttatgctstcatatacattttcaatattaaacaaaaataaataggaattccactaactttagttgaataga

SEQ ID NO: 77098 - DNA, 1528 bp, Homo sapiens
ccaccctccctccctgtcttcctcctgctctaggcacgtaggatgtgcctgcttccccttcactttctaccatgattataagtttcccaaggcctctccagccatgcttcctgtacagcctgcagaaccaagcacccatcaaacctctttgttttataaattatccagtctcaagtagctctttatagcagtgtgagaacattcatggcagaaaaaaaaatttctattctgcaagctaagatctcacctatataaactggagaaagaagaacaattacacagaaagcaaacaaatggaaagaaacaataattagaaaagcaaaaaatcaaagaaattaaaaacataaacaaaacacaaaagcaaaaagataatattaaaagattgacactataaaaaaactaaaacagttaaatggttaatcatccatgtaatattaccaatgaggaaacaataacaaaataatacaaacaaatcactatcagaaagaaaagaggggacatcactaaggatccaccagatattaacatagaatcaagagaatactacaaaaaatctcgtacttcaaaaacttaggtgaaactgagcaatttcttgaaagacacaattatccaatctcaatcaaaatactatcttcaatgttttatgcatgtacttttgaatgattcgacagatacttcttaatctctccactctcatgcaggttagatgtgcagctgggaaacaaacaagatgatttcagagagtagcagagacacaggagagtataatgggatattgactgcaagggttactccgtaatagatagtcaggcaaagcacgtctgagaaggtgacatttgagctgaaattcttaaatcatgaaatttgaaaggaagatgacagcagatgatgggggttttccaaaagtagaagcattaccagaaaaggagtcccaatccagactcccagagagagttcttgaatctcatgcagagaggaattcaaggtgagtaacagagtgcagtgagaagaaataacttattaaaagctactgcattacagaataaggcgtcttcagcaaacaagtggaggaatgtcctgtctttgttttaagtttttcttatctagaggtcttgcctrtgcaaagaaaatctaagctgtgcttacatgcaggtgggctgacagcatgacaaaatgtattatcctattgatttaaagaaaactatccttgacattttcgcatgtaactacagcaaagcataactataataatcttgaaagcatatattgttatgggttttgagacatctgaactttctgtcgagggagtttgttctcgctggcactaccaagctgttttcttagccataaatatcttaagaccatgggtcatgactagcaaggaatgttccttgttagtcttaagatggaggagtactattaatatgacattactctggctctcctaggctccttccctaaaagaaggaagaccactatattcttgtccaagagcaactctgataagatgagctcattattgtgcagg

SEQ ID NO: 77099 - DNA, 1279 bp, Homo sapiens
cgggtgcggtggctcacgcctgtaatcccagcactttgggaggccgaggtgggcggatcacaaagtcagcagatcgagaccatcctggctaacacggtgaaaccccgtctctactaaaaatacaacaaattagccgggcgtggtagcacgtgcctgtagtcccagctacttgggaggctgaggcaggagaatcgcttgaaccagggaggcagaggttgcagtgagccgagatcatgcaactgcattccagcctgggtgacagagcaagactccatctcaaaaaaaaaaaaaaaagaaaagaaaagaaaagaaagaatgtttattttgctgttatgtaatttccctgatgcctcaaattttggatagaaaatagaaaagacattaagtaattttgaatcaagtaagaatcatataaattatcagactactttcagtacgtaaagcacctcacatttctgcatgtgtgtgtgtaaaaataatcgtaatgttataaagatttggaacttcaagcaattatggcaggtgtccaaattttctctatataaaagggttaatcttaattggggtcagcccagtttaaaagctttaagttgttagtttattctatctataatgccttttgtaacactctattctacttagtctacaatgaagacaccctaaagctgtgtctgctcttgaaaatacattatttttaagagttatttttcacrtttgagtaattttgttctgttgggattacatctagaatgttacatataggatgatgatctcaactttatgaataaagttattgtgattgattaccatgataagcataggttataattatagctaaattaatgtgatgacttactattagctagatcctctccaaatgccagtaaatggaatattaaactctcagcagatctctgaaaatgactatatattgagcagattgaaattaattatgtttagagaaattttggaactagctcaagatcactgactgagtcgaaattcaaaattgattttatccaaatatttagcacctctaatacctttaaatatagtgaaacacacacacacatatatagaaacagatacacacatacatacacatttatacaattatctcatatacagaaattttgttacatatttttatttaaagtctcttgcagaagtgatgattcctgttcagatagaaaattgtgtaagccatttgttcttctgagttgatcagttatatcatgatagctttgctaaacctattggagagcagagactgcaaaaa

SEQ ID NO: 77100 - DNA, 1279 bp, Homo sapiens
cgggtgcggtggctcacgcctgtaatcccagcactttgggaggccgaggtgggcggatcacaaagtcagcagatcgagaccatcctggctaacacggtgaaaccccgtctctactaaaaatacaacaaattagccgggcgtggtagcacgtgcctgtagtcccagctacttgggaggctgaggcaggagaatcgcttgaaccagggaggcagaggttgcagtgagccgagatcatgcaactgcattccagcctgggtgacagagcaagactccatctcaaaaaaaaaaaaaaaagaaaagaaaagaaaagaaagaatgtttattttgctgttatgtaatttccctgatgcctcaaattttggatagaaaatagaaaagacattaagtaattttgaatcaagtaagaatcatataaattatcagactactttcagtacgtaaagcacctcacatttctgcatgtgtgtgtgtaaaaataatcgtaatgttataaagatttggaacttcaagcaattatggcaggtgtccaaattttctctatataaaagggttaatcttaattggggtcagcccagtttaaaagctttaagttgttagtttattctatctataatgccttttgtaacactctattctacttagtctacaatgaagacaccctaaagctgtgtctgctcttgaaaatacattatttttaagagttatttttcacgtttgagtaattttgttctgttgggattacatctagaatgttacatataggatgatgatctcaactttatgaataaagttattgtgattgattaccatgataagcataggttataattatagctaaattaatgtgatgacttactattagctagatcctctccaaatgccagtaaatggaatattaaactctcagcagatctctgaaaatgactatatattgagcagattgaaattaattatgtttagagaaattttggaactagctcaasatcactgactgagtcgaaattcaaaattgattttatccaaatatttagcacctctaatacctttaaatatagtgaaacacacacacacatatatagaaacagatacacacatacatacacatttatacaattatctcatatacagaaattttgttacatatttttatttaaagtctcttgcagaagtgatgattcctgttcagatagaaaattgtgtaagccatttgttcttctgagttgatcagttatatcatgatagctttgctaaacctattggagagcagagactgcaaaaa

SEQ ID NO: 77101 - DNA, 988 bp, Homo sapiens
tgtgcagaaaaaggatgacaggtctaatagaacatggaaatactttgctctgtgaccatatgaaagagtagacactggatctatcatgtctaagcaaaaagccccagagtgctgaaaaatgactatgtgattacagtgtttggaagtgtgtcaacgatattagagttgaaaaagtctagagtagggcattaaccaacatggtgccctgagtgccaaattaatgttgttagtagcaatgtttaccaattatctaccatgtattagaaattgaatcactgcaatgttatgatgcacagattagaggttgtgttgagaaatggaaagaatctgaaaatttagctcctaaacacatggggttttcacagaataattcttattgagtgctattggaaattcttctaaattctcaagtatttacttctcaataataattatcctctttttccagtctgaactgattttttcttcagacaatttgccatcctaaagcttaccttcactgtttcctgaattgaatccattatttcttggaacctgggttgtatttatttgatgattttgctttttttcctgtagagtattctgtgaaaatcccacgtgtgtaggagctaaattttcagattctttccaattctaaaagaraactgagttatccagcaagacacatgactaaagttggtatcagcaccattttgcattgccttctgccaaggctctagccatcccacctctctttttatttatctccactcttcatttgatttgtgccccccttatcttgtttcagatttactaaaggactaagaagattaagtatcaattaatgaagtagctctatttggctcttcataggttcctggataattttttttttcttacttaacaatttaatactgtcaaatgtggctggctcacccgacactactctaagtagaaaatacagagcttccatctctcctgaaatcagcattttaattagcaggccctc

SEQ ID NO: 77102 - DNA, 1222 bp, Homo sapiens
ctcttgttttaagtggcagccaatgccctgctgcagtagtatatttatttcattgtgaaaatgaaatgaaaatagcactgcaaagccctagggagtctatcaaaaagtcaagaacaagtgaaggataagataagttacatgatgctttagtccagcaactaaaattggaataaatttgacacaaacttaaagtacatcaccaaacttctagtgttatcagaattgttgttattttatttaatcagcagagagaaagggtgaaacagaagttcaggaataaaattagggccgaagaggtgcttaatgcaattaattactcaataagaaaaacaaaagtttgctggaaacaaagtttgtggttgctcaataacagtatcagaaaatcgtgctctgtttgatctgagaataactttgaggtcaatcatttttgtgattaatcccaamtctcgagtccatgtccctgtgaatttccacacatattcgtgcaactatactttagcgtttataccccagctctgtggatggacttgcaaggtctcttcccactccctgtaagtgtatacccttttcaacttcctcatctaaaataatgtcatgaataagttatggagagactgagctgttactctctagggagcatctcctactcatcccaagttagataagattccagattcccttagagcatcatttgctcactctgcttatagtccctgtctggcgtgttttgagcgtcttagtacttgtctgctacctatccaggatgagagctcctggaatttcaggttgacatttaactaacactgaaacatgaaaagcccatctcagtgtctggttggaagaaaatatatatatatttcccaagggattaagtcaataaatacatgattattacctttcatttttacctaggggtatttgttttagtctcactctagaatccaaagacctctcctacagaacagctattgctccactataaatgagtgaatgagctcatcctcacctataaattgttctcaccaagaacctttgagactctacaggacctattagagaactagcttcaatgcaagagattattaatgctcacaaattcataaaaatgaataacctagatatgttgcgtgactgaaaagggttgcctcatcagcacctggcagagtagccagttatgatgcaaaattaatgcaagctagaagaacatgtgtctaatagatgc

SEQ ID NO: 77103 - DNA, 1222 bp, Homo sapiens
ctcttgttttaagtggcagccaatgccctgctgcagtagtatatttatttcattgtgaaaatgaaatgaaaatagcactgcaaagccctagggagtctatcaaaaagtcaagaacaagtgaaggataagataagttacatgatgctttagtccagcaactaaaattggaataaatttgacacaaacttaaagtacatcaccaaacttctagtgttatcagaattgttgttattttatttaatcagcagagagaaagggtgaaacagaagttcaggaataaaattagggccgaagaggtgcttaatgcaattaattactcaataagaaaaacaaaagtttgctggaaacaaagtttgtggttgctcaataacagtatcagaaaatcgtgctctgtttgatctgagaataactttgaggtcaatcatttttgtgattaatcccaaatctcgagtccatgtccctgtgaatttccacacatattcgtgcaactatactttagcgtttataccccagctctgtggatggayttgcaaggtctcttcccactccctgtaagtgtatacccttttcaacttcctcatctaaaataatgtcatgaataagttatggagagactgagctgttactctctagggagcatctcctactcatcccaagttagataagattccagattcccttagagcatcatttgctcactctgcttatagtccctgtctggcgtgttttgagcgtcttagtacttgtctgctacctatccaggatgagagctcctggaatttcaggttgacatttaactaacactgaaacatgaaaagcccatctcagtgtctggttggaagaaaatatatatatatttcccaagggattaagtcaataaatacatgattattacctttcatttttacctaggggtatttgttttagtctcactctagaatccaaagacctctcctacagaacagctattgctccactataaatgagtgaatgagctcatcctcacctataaattgttctcaccaagaacctttgagactctacaggacctattagagaactagcttcaatgcaagagattattaatgctcacaaattcataaaaatgaataacctagatatgttgcgtgactgaaaagggttgcctcatcagcacctggcagagtagccagttatgatgcaaaattaatgcaagctagaagaacatgtgtctaatagatgc

SEQ ID NO: 77104 - DNA, 1222 bp, Homo sapiens
ctcttgttttaagtggcagccaatgccctgctgcagtagtatatttatttcattgtgaaaatgaaatgaaaatagcactgcaaagccctagggagtctatcaaaaagtcaagaacaagtgaaggataagataagttacatgatgctttagtccagcaactaaaattggaataaatttgacacaaacttaaagtacatcaccaaacttctagtgttatcagaattgttgttattttatttaatcagcagagagaaagggtgaaacagaagttcaggaataaaattagggccgaagaggtgcttaatgcaattaattactcaataagaaaaacaaaagtttgctggaaacaaagtttgtggttgctcaataacagtatcagaaaatcgtgctctgtttgatctgagaataactttgaggtcaatcatttttgtgattaatcccaaatctcgagtccatgtccctgtgaatttccacacatattcgtgcaactatactttagcgtttataccccagctctgtggatggacttgcaaggtctcttcccactccctgtaagtgtatacccttttcaacttcctcatctaaaataatgtcatgaataagttatggagagactgagctgttactctctagggagcatctcctactcrtcccaagttagataagattccagattcccttagagcatcatttgctcactctgcttatagtccctgtctggcgtgttttgagcgtcttagtacttgtctgctacctatccaggatgagagctcctggaatttcaggttgacatttaactaacactgaaacatgaaaagcccatctcagtgtctggttggaagaaaatatatatatatttcccaagggattaagtcaataaatacatgattattacctttcatttttacctaggggtatttgttttagtctcactctagaatccaaagacctctcctacagaacagctattgctccactataaatgagtgaatgagctcatcctcacctataaattgttctcaccaagaacctttgagactctacaggacctattagagaactagcttcaatgcaagagattattaatgctcacaaattcataaaaatgaataacctagatatgttgcgtgactgaaaagggttgcctcatcagcacctggcagagtagccagttatgatgcaaaattaatgcaagctagaagaacatgtgtctaatagatgc

SEQ ID NO: 77105 - DNA, 1222 bp, Homo sapiens
ctcttgttttaagtggcagccaatgccctgctgcagtagtatatttatttcattgtgaaaatgaaatgaaaatagcactgcaaagccctagggagtctatcaaaaagtcaagaacaagtgaaggataagataagttacatgatgctttagtccagcaactaaaattggaataaatttgacacaaacttaaagtacatcaccaaacttctagtgttatcagaattgttgttattttatttaatcagcagagagaaagggtgaaacagaagttcaggaataaaattagggccgaagaggtgcttaatgcaattaattactcaataagaaaaacaaaagtttgctggaaacaaagtttgtggttgctcaataacagtatcagaaaatcgtgctctgtttgatctgagaataactttgaggtcaatcatttttgtgattaatcccaaatctcgagtccatgtccctgtgaatttccacacatattcgtgcaactatactttagcgtttataccccagctctgtggatggacttgcaaggtctcttcccactccctgtaagtgtatacccttttcaacttcctcatctaaaataatgtcatgaataagttatggagagactgagctgttactctctagggagcatctcctactcatcccaagttagataagattccagattcccttagagcatcatttgctcactctgcttatagtccctgtctggcgtgttttgagcgtcttagtacttgtctgctacctatccaggatgagagctcctggaatttcaggttgacatttaactaacactgaaacatgaaaagcccatctcagtgtctggttggaagaaaatatatatatatttcccaagggattaagtcaataaatacatgattattacctttcatttttacctaggggtatttgttttagtctcactctagaatccaaagacctctcctacagaacagctattgctccaytataaatgagtgaatgagctcatcctcacctataaattgttctcaccaagaacctttgagactctacaggacctattagagaactagcttcaatgcaagagattattaatgctcacaaattcataaaaatgaataacctagatatgttgcgtgactgaaaagggttgcctcatcagcacctggcagagtagccagttatgatgcaaaattaatgcaagctagaagaacatgtgtctaatagatgc

SEQ ID NO: 77106 - DNA, 1069 bp, Homo sapiens
aatgacttaaaaaaagattaatcaaagtcctcagacacattgcagaactttgggggatgctcactccaactgactgctgtcaccttcatcggtctagtttttttaaatcctgagtcaatccaaaaacaaaacaaaacaaaagccttgccaatcttgttttttgcccatagataggttttggcaagaaagggtataacgcaactaagtaacagtctgcctagaggcatttgcagcggacagcggaggggctggactcgtattcccgcttgctgatccacatctgctggaaggtggacagtgaggccaggatggagcctgccctggattctgacttcaattcctaactcccctctccttgctctttctgcttcagcccaagtgacctgcttaacgtgccagggcacacggcaggacagggactttgcacttgctgtttcttcagtctgatggctcctctccagctatctgcatgactcgtccttgcttcctccaggtctttgttcaaatgtcatcctcttagtgaggcctcccctggccgctctgtctaaagttcgccttgcacccggcactttctgttctccttccttgctttatatttctcccacatatttattgctatactataaatatatacatactgtattttttagttttggctcattttagtgttgatcttcccaggcagaatgtgaggacagaatttttgtttgttttgctctctgttgcattagggcacatgacaagtatttaatataaatttttgaatgaatgaatgaatgaatagggtccaggttctctgctggtcacaactgatcaagtcaaatatggtttttcattgcaaggagtttatgtctcatgaggatggcagatatttaagtaattaaaatgtgtccacacataaacctgcatacagatgtttatggcagctttatccacaattcccsaaatttggaagcaaccatggtgtccttcagtatgtgaatggataaataagcttgaggacatccagacaatgaaatatttattcagtactaaaaatagctatcaagccatgaaaagatgtggaaca

SEQ ID NO: 77107 - DNA, 695 bp, Homo sapiens
aaaggatggtccgagacgccaacagcagctggatgttctcatcagtcctccctgttctgttctgctctgaagttgtcagaggcatggaagtattccctgatgagccactggttcccacagttgatagtctaatatttaagaaaagccactattatgaggtctttcctgtaacttagcatggttactaaatagacctgtagcactaatatttacatagtaaccagtggcttacagaagaaagtatatgcagacaraagttacttttttatgacaccagttaattctgtctctcattttagtttttaaaaatctcaaaaagcaaatgattcttgctcatttagtttcagttttcttgtctataaaataaagcaatatgagatggtctttaagatcctttcaaaaccccaaaaacgtggatatctacatttggattttctgaagagctaagatttgggtactttaccttaattttgaatacttcataatgaagcctttctaaagtattctccttcacctgctgtcatacacagtgtaggcaaaacactgtgaatcttttcttggtgggccaggatcaggtgtatgggaacacccgtggggctgaattctgcaccagtggcgatgtcctcagggattaaaacaacattcagaccactggctttttgagttattgtatcagaagtgatatattccgaaaa

SEQ ID NO: 77108 - DNA, 734 bp, Homo sapiens
gaaatgccttccaacttccaagaggggagaaatagtcatattacataatggtagattgttaaaagtccagggaatcctctgaattgattatgaaacataagcccacaactgtttggtctggaataatttaaaatattgaacaatttttattatcagggaaaattggaacccataactaccatatcctggtaagctatgctcccatactccactccccactcactggattctcgttataccttccagcattggtttctttagaaatttttcgagttgttctaatataaggaagcaaagagccaggggtccaggacctgtgtcctggacacaggacatctttgcttggctgccaacttgcaggtgaccttggaaragtcatttcatctctttggctttcagtttcctcatctgtaaaaaaaagaagtagttgaaatagtagtctgtataccccttctatgtataacactccacattcccttaatatattcaggatatttttaaagaacttgctaacctttccatgaaagacaaaataaaagtccactatttagagctagtgatatttttataagacctaggagaattctcctaacagtaaacaaactaatggctttagtttccctatcattttgctaatgctgtgagcaaaccacccagttttaaacaatagaaatttattttcttatgatcctggaggctagaagcccaagatcaagatgtcacctgggttggtt

SEQ ID NO: 77109 - DNA, 734 bp, Homo sapiens
gaaatgccttccaacttccaagaggggagaaatagtcatattacataatggtagattgttaaaagtccagggaatcctctgaattgattatgaaacataagcccacaactgtttggtctggaataatttaaaatattgaacaatttttattatcagggaaaattggaacccataactaccatatcctggtaagctatgctcccatactccactccccactcactggattctcgttataccttccagcattggtttctttagaaatttttcgagttgttctaatataaggaagcaaagagccaggggtccaggacctgtgtcctggacacaggacatctttgcttggctgccaacttgcaggtgaccttggaagagtcatttcatctctttggctttcagtttcctcatctgtaaaaaaaagwagtagttgaaatagtagtctgtataccccttctatgtataacactccacattcccttaatatattcaggatatttttaaagaacttgctaacctttccatgaaagacaaaataaaagtccactatttagagctagtgatatttttataagacctaggagaattctcctaacagtaaacaaactaatggctttagtttccctatcattttgctaatgctgtgagcaaaccacccagttttaaacaatagaaatttattttcttatgatcctggaggctagaagcccaagatcaagatgtcacctgggttggtt

SEQ ID NO: 77110 - DNA, 687 bp, Homo sapiens
ggatccactttgagtctatttccaggtacccgcctttgtttgatcaaatttgttaaagagcctcttccttatgatttggcttgccagctagatccatctacagggagagaagaagctggagtatttttgttcctgtgacagttatacctcactgtaaattttttaaaaggagagtagattgggccaggtgcagtggctcacacctgtaatcctagcactttgggaggctgaggtaggtggatcacgaggtcaggagattgagaccatcttggctaacatggtgaaaactccgtctctactaaaaatacaaaaaattarccgggcatggtggcaggcacctgtagtcccagctacttgggaggctgaggcaggagaatggcatgaacccgggaggcggagcttgcagtgagccgagatcacgccactgcactccagcctgggtgacagagcgagactccgtctcaaaaaaaaaaaaaaaaaaaaaaagagtagattgtattagcatggagagggaatttaaagggatagaatgtactagagaaacagtgaagggtagaggaggggcagaaaattgggccaaaagggcatcacttcgtaacccttagagaaatttcatggggcatgggaatacaagttggaggttattaatatgtctgtgttgctggtttgtccatacacacttggtgc

SEQ ID NO: 77111 - DNA, 1290 bp, Homo sapiens
tttaaaaaatctttccctttcaagcattagcagagctgcaagcacaggatggcccaattttgtgaaattaggcctttgcccatgtttctaattcagaattggatgtactttaaatgtccccctgagtgtagcagctgagagtcctcttctctcctgggtactgtaatctttggtggggtcactaaaaggagggatatgtcacaggtaaccttctaccacttgctatggggaagctttcttttgtgttctttcagatttgagtaaagttgccaaacatgataaaactgcttgatgatggcagaattgttaagtctrctcttaaccctgtccaccagtttaccaatgaaaaggtcagtggcatgcaaagagaggaattctttatagctgccaaacaactggtttaattcacctgtgttccaccctagaagtactcggagatagctactggaaggtcaagaaataaatccttgtagttgggaagtcataattttcaacaatcatcttcaatttattttgaagcaattatttaaacctgaattagttgttaagtcacatataagataggtagttagcttgtatggtataattattcaaaggtaatttgtaattaattatgaaatacctttactagaaaaataagtcctatataaattgaactaatttttatggtactagtaatattactatacctattagaggtggagcctatattaactattaacattaattaatgttacactaataacattaacattaataacaattaataacattaattgttgttacaggataattttagatttgcaaggatcctgagaagttatccaatttagctttttaccttcagagagaattaagctaaagctccacctgttccttgaaaatgattccttctgccctaaaccttggagaagcttttcttcctttgaattctgtgctgtatctgtgctggacatttggaatttagcattgattactctgtattgcaattttatgtatgtgtcctatctcctgaaccaaagtgtcagaccctttcaaattaaagactggaattgaacattttggcccacttcccgcatatgctaaggcagtggtctatgatggaagatgttcagtatgcactgaggagattgatctaaatttatcttgaaaatcatgttagtccttaacaatcttctcttggtatttgatcaacaacttgaattagaaagtatcagagatgtttgggacattagatatactctaatctaatccctgttttacagatcacaaaactgagtaagggccaga

SEQ ID NO: 77112 - DNA, 649 bp, Homo sapiens
ttctattccctctgcagcgtgctctccccatacattcagatttggctattttattttcattcatccattcaataaatatattttgagctcctactgtgtggcagtcatgtggaagtcatagtgagtttgttaaagctttgattataattcattaccaactaattccatgtgggaaaagaaaaagtagacaatgcagtcattaccatggtcaggcccctgctgctactgcttaagagtaaaaaactaactaaataaaagtgattactggagtatagctattatctctgagccattcaggaatacagggtagagcttgtcatgttgggtcaatagaacaccagtgaatgtcattttccagagaytcccagagctcaaccacaggtggaaatggttctcgaatccccataggctgtggaggtagaataaaataataaatgtgaaagcacctcctttgtaatgtggaaagcccttaaacaatctaacgacaaatatttattttacccccactggaaactaggttctgtgctttagtatcacatagaagccataaacgaacaaaaaaaaaaatatgtcgtctacaatcacagtgtttacagacaagcaggaaagatggttattaaacaaatatacaaaaaagtcacacatttca

SEQ ID NO: 77113 - DNA, 1812 bp, Homo sapiens
ctgaaatggtctattgcaattttaatctcaaatattttatatttttggtttcatttggttccttctcaaatgagtttggacttctttctttagttgcttgctctttacccatgtatttaatctcttttattcttgtaagcatgttcaacatatttgttttataccctcttttgctaatttcaatacatgaagtattttgaagtcagaatatgttggttttaatagcttgtttcattttgctttttgtacttttgaaatgagaattaatatttatgaaaactttgtaagaattcttttagagcttgtttaaaggtggatttctctggggatgatttatatttgtttctgccacatattttgaaccattagaatcaagaaccacacttggcctgaatttttcagaccacccacatagagtatgttcaggctacaaatcttgcaaatgctggcttttgtttgtgaatgaacacaagagattttgttccactctgcatttgtaacaaggttccagagcagccattcttgcatgttctgggaggtcacatacaagggaatgttacttcacccttgcactgacagtctaatcttttacgtcttgatttaacaggaccactcccattacacatcttgcttttggtaaggcatggggtttgtcttctgtctattgcactcttaactcaaattcacacgaggttcaacaatatcttcagtatgaaagctgcctttaatacacgcgtcgtctctgagttcacttcgtttttgcctttaagagtttgttactaatttgctagttcatcaatgcatgtgctctgccacactagacagaagcaggaggtttttttctcaaagcaaataggataaatcactagagcagcaattaaataagcctttagagtaggagtttttatttaccactgctctgaagacaagaagactcctggaataaagtagaaatgagaaacagacaggtttctacaaatattaagtgaaatcaaacagtgttagaaccaaatgtcaggttactttatctaactagcaatgggacagaatacttaaaactgggacttggaagtctggtattgtcatcattgaactgtacttatattgtaactgttcactttatatagtataatgtgtatgatacttttaaagtatgtattagatcacagcaattaaactaatgtatgacccttatttattttwaaaaaaaagtattctattcgttaaggctgagcctaataaactagttcaggagaaaatgataaaatttagtcagccatttagtacctggttccaaatcatctttcctaaaatttattcaagtaaataattatgccaggatatagacataccctagatgactgagcatacttaattaattcatggaataaaaacagaatgagacttaacatagccgcctagcattttattcagcggtccccacctcaacagcttgccttctttgtaagcctgtaaaagccctcaatccaaaagaataagaagtaaacatatttccctacatcagtgaatttagaaaagatcaagtggatctcctaaaattgataaatttaaccagtaggtgtataaaataacaaccaaccttttttctctttaaaaaatcactttaaagtgatttttctggacattagcccagacttcctatttcacataaggccgctgagtgcctttgctaaactcattcaaaaatcatactcagctatgtttggcagaatcaaagatccttaaaaatgaaattgctttacaaactatgacactgatacaatgccccacacttgtgaatcatttcaaaag

SEQ ID NO: 77114 - DNA, 1023 bp, Homo sapiens
aatgttcattgaggttaaaaagacttaaacatatggagaaatatcacgtgcttggcttggaagacaaagcatcataaagatgtcaagtatttataaattaacctaaatttagcatactctcaactttaaattccaaaaggatttttaattaaacaagcggattctaagccacattgaaaagtaagtatgaaaatgaagagaaatgagcaaaaacttgacctatcaagatggaatactatgcaaccataaaaagaatgcaagaggctatttatgtactcatatggaattatcttccaagatatatcgttaagaaggaaaaacaggggtcaaagtggtatcatattgtgctgccaggggaatakatagaaactattctatcaaaaaatggttagcttttagtagggaaattcagtatctgaggagtaaaactgaagtatgactatgaacattgagaatactctgttcgtttaatggagtgttgtctgtcttcttagtttcaaagcatagtccaacaatgtttgagtaaagtccaacaatggttgagtagcttggtctcacctttttatttatttatttatttttatatttatttatttatttatttattttgagatggagtctcactctgttacccaggctggagtgcaatggcgctatctcggctcactgcaagctccaccccctgggttcatgccattctcctgcctcagcctcccaagtagctgagactacaggcacccagctaattttctgcatttttagtagagacagggtttcaccatgttagccaggatggtctcgatctcctgaccttgtgatccactcgtgttggcctcccaaagttctgggattacaagtgtgagccaccgcccccagccctcatctcttttttgactgcatcaaaaacaaatctggatcattaaagacagatcatctatttcattagagacagatgatcatctagatcattaaagacagatcacctatttcattcaaaagtctcaaattacacataactccaaa

SEQ ID NO: 77115 - DNA, 627 bp, Homo sapiens
tcattactattggcctctcacagttcaagttacttaaaaactgtgcttctgagttaggagaaattcacagcctgttgggtgtaagacaatcaaataggtaagatatccctgatcattaatctctataaggaaatataaacaagtatctgggtttttaaaaaaatttaattttgtttcctggaaattgaacttttatattcaaatgctctcttatcctttctgtgttcttatctcttttctttcttttttttttttctttgagacggagtctcactctgtcacccagggtggagtgcagtggcacaatcttagctcactgcaacctctgcctcccaggttcaagcgattctcctgcctcagcctcccragtagctgggactgcaggcatgtgccaccatgcccggctgatttttgcattttcaatagagacagggtttcaccatgctggccaggctggtcccaaactcctgacctcaggtattctacctgcctcaaactcccaaagtgctaggattacagacgtaagccatcgcgcccagctgtgtttttatctcttaaagcacagggatggttcactgaccacgagtatttaatttcatctgtgctaattaatgaaggacgtatgct

SEQ ID NO: 77116 - DNA, 703 bp, Homo sapiens
  misc_feature (1)...(703): n = A,T,C or G
tgagacttgctgtgaacntcccctccctgcgagctcgccccttgactccagcctccaaaaccggcccagcaagaccccactayaccctcgcccgcgcggctcacttaccgccgctcaacttccggcaaccacagctctctctgagcgcgcgccccgatgacgcaagcggtcctgcccgcgcctgccactgggaagcggcgcgcgtgcgcaaaggagcagaggcatgccggggaaatgcgcccctagcaccgagctaagtgggaggaacttgagtcgtgaggagggcggggcatcagggggcggtgacgcccctgggggaagcgatggagagcgtctcccttaccagatgtcggaatgtctacattcccttcaggcttttaagaaagtgcccacgttctctcttttgatttcagaggatgacaggaatgatcaccatggtcattctccaggagaggcggcatcaaacgcagcacaggggccatcagggtggcaggtgtggagagccaggagatgagaattttagtaggaaaaggccagtgaacgtcgacagtgaccaacctgccttttctaaaccagccatcattctcacagctcctcactgtcagtgagataaagttattccctctcaatacttggttagatactctgcgcgtgcaaagcactggacaggtgttgaagatacagcagtgattatgacaagttt

SEQ ID NO: 77117 - DNA, 703 bp, Homo sapiens
  misc_feature (1)...(703): n = A,T,C or G
tgagacttgctgtgaacntcccctccctgcgagctcgccccttgactccagcctccaaaaccggcccagcaagaccccactataccctcgcccgcgcggctcacttaccgccgctcaacttccggcaaccacagctctctctgagcgcgcgccccgatgacgcaagcggtcctgcccgcgcctgccactgggaagcggcgcgcgtgcgcaaaggagcagaggcatgccggggaaatgcgcccctagcaccgagctaagtgggaggaacttgagtcgtgaggagggcggggcatcagggggcggtgacgccccygggggaagcgatggagagcgtctcccttaccagatgtcggaatgtctacattcccttcaggcttttaagaaagtgcccacgttctctcttttgatttcagaggatgacaggaatgatcaccatggtcattctccaggagaggcggcatcaaacgcagcacaggggccatcagggtggcaggtgtggagagccaggagatgagaattttagtaggaaaaggccagtgaacgtcgacagtgaccaacctgccttttctaaaccagccatcattctcacagctcctcactgtcagtgagataaagttattccctctcaatacttggttagatactctgcgcgtgcaaagcactggacaggtgttgaagatacagcagtgattatgacaagttt

SEQ ID NO: 77118 - DNA, 1330 bp, Homo sapiens
atgcatgcaggaacaggaatgaggacattaagtctaatgatactcctgtcttcaggaagcatcaatcctcaatcccaaccctcaatcccaactcctacgatgatttgtatttttgtgttgttgtaaacatgtaaacgtggtgtacattctgttttctgtcctgctcttctttcttaaggtgtttttccacgttgctgaagtctctgtagcctccagttgtaatggttgcataaggttacatcaactgcttttgcctcattgacttaacatttcccaattgctaaacatttcaatttcatctcatttttcctgttattaaaatgtgtgatgcaaagctttcctgtgtataacatagaaaataattctttaaggggatgttgttcaagccaagtcagcaaagagatacaaatggacagaaaatgtttgggggaaaaatagccaccttcattaataagtaaattaaaattaggatacacgtgaactatcgttgtttaactttatcaaattggcattcaattttttttaattgacaatatctagcattggtaagaatgcaatcaaagcataaagcagcatggcttttaaggagagcagattgattatatgtaaagacctttaagaatatccatgccttttgattctgtaattccacttgtaggaagttataaagaatcaggccaggtgaggtggctgacacttgtaatctcaacaccttgggaagccgaggcgggtggatctcttgaagcctggagttcgagaccagcctggccaacatggcacaaccccaggcatggtggcaccttagaaggctgaagcacgagaattacttgaacccaggaagtggaggcagcagtgagctgagattgygccactgcactgcagcctgggtgacagagcaaaaccctgtctcagaaaagaaaagaatgaatcagatacacacccaaagatttatatataaggacgtgcattacaattctatttatattaaaaaatgagaaacactcttgaatgttcaacaataagttaatggttaagtaaattatggcaaatctgtatgatagaaattttaggtagctattaaaagtcatgttcttgaaaaatatatgatgacacggaaaaaagctcacaatgtcgtgtttagtgaaaagtagaggatataaaaccaagacagccaaaacggcatcatcctaattttagaagagacgtatgttaacagatcaggtccacagaaaaaagtaggtgtctgttttgcccttcttctttaagatctgaagtgcttcctgaagacaggagtatcattagacttaatttcctcattcctgttccttca

SEQ ID NO: 77119 - DNA, 1309 bp, Homo sapiens
ggcatggaaaccaggtaatcaataaatcagtcataacccaatttccatactagtgaaccttaagcaggtctgttagggactgcatactctgatcattctgtgctaaagatgttttagtgtatggtagagttggtagccagaggtcctgacacaaattctgtagccctcccttctagctgtctgggtttctttcagataggattttcctactgctgtcattctccatttttcttaaccctaaaataattaaaacagaggatatcttaaaagccaatatacatttgaaaagatgcccaacatcatgtcattaaggaaataaaaattaaaaccataatgagmtgctactacatatccaccaaaagtatttaataaaaatgtctgtaccaagtgttgtcgaagatgtggagcaaatactgctggaaaaatgttgggcagtatctaccaaaattaaaaatatctatggctcagcaatgttactctcaagtatattactcactgaaatacctacatagatagaagcaaaacacatatacaagaatgtttacagaagcattattctcaataaccaaaagctgggaatagttcacacgttcttcaataatgaaatgaataataagtttaagtatatcccttatgatgaaatgtcatataacaatgaatctgagtgaactattaatacagaaatcagcatggctgaattttaaaaacataatattaagtgaaataagttggacctaaaataatacatactccatgattccatttatgtaaagttaaaataggcaaaaccaatgtatggacttagagtagttgttacttttgaaggcagtggttaatgactgagagaaggcataagacagccttctttatacttgggatttgtgtaatgtgtctgctttacttaaataaaaatgtttatttaaaaatatgaagatagataaattatagattgttctctgagggagacaatccacaattatccaggtggtaagtctacacagtgcaaatgggcttcctaactactgactgaggtactgctgcttaatatggaagttcagatggggagagcagagggaaccaaaagaacccacgtcctagaggattttttctaaatgtcttgtgagcattttttccgcatttaaaagatttacttgtcggaattatttatgtgcaatatgattgtagaaagaaatcacctagaaagaaatcacagccaattcatttttcagcctctaaacacttggacagaggagccatatatgaatatgttcaaaagagttaaggccatctcctgtgggtatcagagagg

SEQ ID NO: 77120 - DNA, 1309 bp, Homo sapiens
ggcatggaaaccaggtaatcaataaatcagtcataacccaatttccatactagtgaaccttaagcaggtctgttagggactgcatactctgatcattctgtgctaaagatgttttagtgtatggtagagttggtagccagaggtcctgacacaaattctgtagccctcccttctagctgtctgggtttctttcagataggattttcctactgctgtcattctccatttttcttaaccctaaaataattaaaacagaggatatcttaaaagccaatatacatttgaaaagatgcccaacatcatgtcattaaggaaataaaaattaaaaccataatgagatgctactacatatccaccaaaagtatttaataaaaatgtctgtaccaagtgttgtcgaagatgtggagcaaatactgctggaaaaatgttgggcagtatctaccaaaattaaaaatatctatggctcagcaatgttactctcaagtatattactcactgaaatacctacatagatagaagcaaaacacatatacaagaatgtttacagaagcattattctcaataaccaaaagctgggaatagttcacacgttcttcaataatgaaatgaataataagtttaagtatatcccttatgatgaaatgtcatataacaatgaatctgagtgaactattaatacagaaatcagcatggctgaattttaaaaacataatattaagtgaaataagttggacctaaaataatacatactccatgattccatttatgtaaagttaaaataggcaaaaccaatgtatggacttagagtagttgttacttttgaaggcagtggttaatgactgagagaaggcataagacagccttctttatacttgggatttgtgtaatgtgtctgctttacttaaataaaaatgtttatttaaaaatatgaagatagataaattatagattgttctctgagggagacaatccacaattatccaggtggtaagtctacacagtgcaaatgggcttcctaactactgactgaggtactgctgcttaatatggaagttcagatggggagagcagagggaaccaaaagaacccacgtcctagaggattttttctaaatgtcttgtgagcattttttcygcatttaaaagatttacttgtcggaattatttatgtgcaatatgattgtagaaagaaatcacctagaaagaaatcacagccaattcatttttcagcctctaaacacttggacagaggagccatatatgaatatgttcaaaagagttaaggccatctcctgtgggtatcagagagg

SEQ ID NO: 77121 - DNA, 817 bp, Homo sapiens
ctgctgtataaacaacatagcattgagtctttcaataacaggaatgttaattccytaacctcttcctgcttcagagactacactcatgcatatcttctaaaacttttttattttctctctaatctcacactgcacaaatatagttgcagcagatcacatagggctattgaaatttaatattaaattaattaaaataaaacatgtagttcctctgttgaaatagccacttttctttttcagtgcatatatttaaggtgtctagtgtgatcttttgatatacatattaaaatggttactatggtcaagtaagttaacatatccaatatctaacatagccacactttgtgtgtgaggttcaagcacctaaaatctacttcttagcaaattttcagtatgcaacacaatattataactattatatgaattggcaggtatacatggggttgctagacctagtcatcctaaacagctgcaattctgtgccctttgacccacatctttccttgtgcctcccttcgctgactatggtagccacaatttcattcgtttttacataatctactttcctttttagcttccacatataaatgagatcatgcggtattgtttttgttccatgactggctaactctatttagcataataaaaattcatccatgttgttgcaaatggtagtatttcgatgatttataaagttgattaatactgattttgtgatcagtagctccatgtggctggagggtaccgtgatggacagtggagccatggaacgttccatcatcaccgtgcgttctgtggagattactgacaattcttt

SEQ ID NO: 77122 - DNA, 1895 bp, Homo sapiens
cagatatttctttttagctgcgtgaaaacagactaatacagtcttcctgagataggattccaaattccaagggacggagagggaaatccacatttatttaagcatcccatgttagaggtaatataataagtactttaaatgtagtttatatttaaaataatgtctatatacttatatgtactatagttwctaatttacatccacaggaattttacaatatagttaacatcccccttttacataaaacaaatatcaaaaaccaacaatggcttattgaagctaatatgttaaaaattttagctaaactctgactggacttcaaaatccatgtttttcttaccataccagttacctcctaaattgtataatagggaggatttagttcccagaggaaatgatgacttgcttaaagctgtttttttcccattgaacaaatatgcatcaaacactacctgtgccaggcactattgtaggtgctgagaatcccatagtaaaaatggttttgcattcagagagcatatgtttgagttgtgggattaataatctgttctcttatatccagtgcacatcagaattacacatttttttcagacagagtctcactctgtggcccaggctggaaagggcagtggtgatcctggctccctgtagctccaacctcttgagttcaagtggtcattctgcttcagcctcctgagtagttgagactacaggcgtgtaccaccacacatagccaattttttatttcttatttatttttagagatgggatctctctatgtttcccaggctgatcttgaacttctagtctcaagagatcctcccaccttggcattccaaattgccaggattacaggcatgagccaccacacccaacctggaattacacatgttatatgcattattattatatccccagatgctttggaagtattcaattaaaaagaaaacaaatggaaagaatgaatctaattttagaattcctactgaactactgccacagaggactgactggataacttcctttctgcctgctaatgctttgctggtgttctcccccagctccattccatggtctagtccaggctactccgaaatgaaatgcttaatcacatattgagtaagccaatctgctctcttagtttttcccaaacccctgcaaccagactggttttaacttttgtatttcttgttctatctcagctgctgctggagtttcactgtgattctgaggagtgctgtcactcaggggtctcccgatcctatctagtgctgatcttccatggatttcccggaagactgaataggcttaattttgcaactgctctagaatacaagtgtgctggtctcctggacgcttcatgggggaaaaaaagacaaccctctagttctgctcagatttttttttcagctctgcctcctgcaaagatagtccatctcatccagccagttctgaggaagtatgtgagtcatgtccctttttctgatgaaaacttccagtattgactactagaagttttctagatcaacaactatcaagcctttggaaatataactaatatgtaccaatatgtaaaaaataatttctatttttttaatgaaatagtttcctaaggcccaaatgtaactttcaaaatgatatgtgtggcacaaattctctctactaccggggcgacgaagggagcacagtgcacaggctggaggtcagagcctccctggacatagtttggccccaaaaagaatcagggaagaagaaacttgacaaagagcctcatagatgtttcctaaagcagagaccctctgaaggtgatgcatgactattagagaatctgtgctataaggagcttcttggtttccatttctgtcacatgaggaaaagtaaaagctaacaaaatc

SEQ ID NO: 77123 - DNA, 1895 bp, Homo sapiens
cagatatttctttttagctgcgtgaaaacagactaatacagtcttcctgagataggattccaaattccaagggacggagagggaaatccacatttatttaagcatcccatgttagaggtaatataataagtactttaaatgtagtttatatttaaaataatgtctatatacttatatgtactatagtttctaatttacatccacaggaattttacaatatagttaacatcccccttttacataaaacaaatatcaaaaaccaacaatggcttattgaagctaatatgttaaaaattttagctaaactctgactggacttcaaaatccatgtttttcttaccataccagttacctcctaaattgtataatagggaggatttagttcccagaggaaatgatgacttgcttaaarctgtttttttcccattgaacaaatatgcatcaaacactacctgtgccaggcactattgtaggtgctgagaatcccatagtaaaaatggttttgcattcagagagcatatgtttgagttgtgggattaataatctgttctcttatatccagtgcacatcagaattacacatttttttcagacagagtctcactctgtggcccaggctggaaagggcagtggtgatcctggctccctgtagctccaacctcttgagttcaagtggtcattctgcttcagcctcctgagtagttgagactacaggcgtgtaccaccacacatagccaattttttatttcttatttatttttagagatgggatctctctatgtttcccaggctgatcttgaacttctagtctcaagagatcctcccaccttggcattccaaattgccaggattacaggcatgagccaccacacccaacctggaattacacatgttatatgcattattattatatccccagatgctttggaagtattcaattaaaaagaaaacaaatggaaagaatgaatctaattttagaattcctactgaactactgccacagaggactgactggataacttcctttctgcctgctaatgctttgctggtgttctcccccagctccattccatggtctagtccaggctactccgaaatgaaatgcttaatcacatattgagtaagccaatctgctctcttagtttttcccaaacccctgcaaccagactggttttaacttttgtatttcttgttctatctcagctgctgctggagtttcactgtgattctgaggagtgctgtcactcaggggtctcccgatcctatctagtgctgatcttccatggatttcccggaagactgaataggcttaattttgcaactgctctagaatacaagtgtgctggtctcctggacgcttcatgggggaaaaaaagacaaccctctagttctgctcagatttttttttcagctctgcctcctgcaaagatagtccatctcatccagccagttctgaggaagtatgtgagtcatgtccctttttctgatgaaaacttccagtattgactactagaagttttctagatcaacaactatcaagcctttggaaatataactaatatgtaccaatatgtaaaaaataatttctatttttttaatgaaatagtttcctaaggcccaaatgtaactttcaaaatgatatgtgtggcacaaattctctctactaccggggcgacgaagggagcacagtgcacaggctggaggtcagagcctccctggacatagtttggccccaaaaagaatcagggaagaagaaacttgacaaagagcctcatagatgtttcctaaagcagagaccctctgaaggtgatgcatgactattagagaatctgtgctataaggagcttcttggtttccatttctgtcacatgaggaaaagtaaaagctaacaaaatc

SEQ ID NO: 77124 - DNA, 1895 bp, Homo sapiens
cagatatttctttttagctgcgtgaaaacagactaatacagtcttcctgagataggattccaaattccaagggacggagagggaaatccacatttatttaagcatcccatgttagaggtaatataataagtactttaaatgtagtttatatttaaaataatgtctatatacttatatgtactatagtttctaatttacatccacaggaattttacaatatagttaacatcccccttttacataaaacaaatatcaaaaaccaacaatggcttattgaagctaatatgttaaaaattttagctaaactctgactggacttcaaaatccatgtttttcttaccataccagttacctcctaaattgtataatagggaggatttagttcccagaggaaatgatgacttgcttaaagctgtttttttcccattgaacaaatatgcatcaaacactacctgtgccaggcactattgtaggtgctgagaatcccatagtaaaaatggttttgcattcagagagcatatgtttgagttgtgggattaataatctgttctcttatatccagtgcacatcagaattacacatttttttcagacagagtctcactctgtggcccaggctggaaagggcagtggtgatcctggctccctgtagctccaasctcttgagttcaagtggtcattctgcttcagcctcctgagtagttgagactacaggcgtgtaccaccacacatagccaattttttatttcttatttatttttagagatgggatctctctatgtttcccaggctgatcttgaacttctagtctcaagagatcctcccaccttggcattccaaattgccaggattacaggcatgagccaccacacccaacctggaattacacatgttatatgcattattattatatccccagatgctttggaagtattcaattaaaaagaaaacaaatggaaagaatgaatctaattttagaattcctactgaactactgccacagaggactgactggataacttcctttctgcctgctaatgctttgctggtgttctcccccagctccattccatggtctagtccaggctactccgaaatgaaatgcttaatcacatattgagtaagccaatctgctctcttagtttttcccaaacccctgcaaccagactggttttaacttttgtatttcttgttctatctcagctgctgctggagtttcactgtgattctgaggagtgctgtcactcaggggtctcccgatcctatctagtgctgatcttccatggatttcccggaagactgaataggcttaattttgcaactgctctagaatacaagtgtgctggtctcctggacgcttcatgggggaaaaaaagacaaccctctagttctgctcagatttttttttcagctctgcctcctgcaaagatagtccatctcatccagccagttctgaggaagtatgtgagtcatgtccctttttctgatgaaaacttccagtattgactactagaagttttctagatcaacaactatcaagcctttggaaatataactaatatgtaccaatatgtaaaaaataatttctatttttttaatgaaatagtttcctaaggcccaaatgtaactttcaaaatgatatgtgtggcacaaattctctctactaccggggcgacgaagggagcacagtgcacaggctggaggtcagagcctccctggacatagtttggccccaaaaagaatcagggaagaagaaacttgacaaagagcctcatagatgtttcctaaagcagagaccctctgaaggtgatgcatgactattagagaatctgtgctataaggagcttcttggtttccatttctgtcacatgaggaaaagtaaaagctaacaaaatc

SEQ ID NO: 77125 - DNA, 595 bp, Homo sapiens
taatgaaatattaatatgctgctttagattttatataactgccttttgttcccaggtactgttccagtttgtcagtcaaaggggtcaggtgtgaaaggacacagaaccaatgtggtcgagggggaaatgagagctctgtggccccaaagatgctgggctgcagaaaggactcactggagcattgcagcagacagtcccacgggcctcccctgacagccacagcctcagctgccccagctggagaaatcctagtggggcaaagctttttttcttttctttcttttttttcctcccccrggctgacagacactaaatgtcagcaatcatcaagatacaatcagagctggttttataatatctataagtggttttgaagtctgcagatgccagacggtttgaaaatctcagagaaattgcatctcataggtagtctacagacgagacataggccccacgtattttttgttttatcaaaccaatcactcagagccacaatgcgaaatggatgacacggtttggaagctgtgtgtgtgtgctagcgcgtgcacatgtgtgtgcccatgtgtgtgcatgcacatatgagaatttgctttgt

SEQ ID NO: 77126 - DNA, 595 bp, Homo sapiens
taatgaaatattaatatgctgctttagattttatataactgccttttgttcccaggtactgttccagtttgtcagtcaaaggggtcaggtgtgaaaggacacagaaccaatgtggtcgagggggaaatgagagctctgtggccccaaagatgctgggctgcagaaaggactcactggagcattgcagcagacagtcccacgggcctcccctgacagccacagcctcagctgccccagctggagaaatcctagtggggcaaagctttttttcttttctttcttttttttcctcccccaggctgacagacactaaatgtcagcaatcatcaagatacaatcagagctggttttataatatctataagtggttttgaagtctgcagatgccagacggtttgaaaatctcagagaaattgcatctcataggtagtctacagacgagacataggccccacgtattttttgttttatcaaaccaatcactcagagccacaatgcraaatggatgacacggtttggaagctgtgtgtgtgtgctagcgcgtgcacatgtgtgtgcccatgtgtgtgcatgcacatatgagaatttgctttgt

SEQ ID NO: 77127 - DNA, 1340 bp, Homo sapiens
atcaaatgtaattgaatgggcatctcagaatagtgcatatggaacaaatactcttttggagtccacacatgcaggcacaaaaatattttaaaactctaagaatgaagatgcaaaagcaggacatgggttccccttggagtaaggtaggacaagtgaagtggaggtgtgtgcacaaaaggatacatggatgagcattttcctagtttttaggttgtgggctgtattttggaatgctcattttgttgtaatatttcctaatttaaagtgctacacacctcattttggatgtgttacatatttaaaaaagaagaaaaatatggttacttcataaagctattgctaagaaataatgcttggcaaagatgcagctactatctggcacgtaataagtatttcaaaaatgtcagctccatatatttacctaccagagtccaaagattaccagtaaaatgttgtccctgctttcacaaactcgcagacagttaaggaaagtgaatcagaaagcaattctgtaataagtctctcaatctgatttctcaggaccctggattcttttcacaatcaaagagagcctttgcaagaattttaaaaagagaatgataggcttaagcttgatttttggaaacataactgtcaacaaaatagagaatagatttggaagggttgaatacagagggtaaggaataagcagtgggactaattacatggatcccaagagagatggggctggaagtgtgggaggaacatgcgaaggccagcaggagaaaatgtgtaagatgttcaggaatggagtctgacaggtgtggtgtctccaggaaaaggcctacatgtctcagaagattggtctgtagaggctgagccaggctggggatggaggtggggctgtgtgggaagccctgcctagcasggggtagagccaaagagtcctgggcctgcaggggaaggagaagccacccagggaaggcacaggagacatttctttccaaatctgggagatgccaaggaagactaacagggaatgtgtggtgggaagaaatgaaccaagaacacagtgttgccatttctaagcccaagctgtccctcccaggtctccagccaatcacccccaggccctgctctcatataggtagatttttttaaaacagctatatctggcatttatacaggttgcatttcttattaaattagcacattttaaatattttttgaacctcagtttaatatttccaaaactgcatcctacttgtattaatctgttttcacactattgataaagacatacctaagacaatttacaaaagaaagacatttaatgaactcagagttccacatggccaggg

SEQ ID NO: 77128 - DNA, 691 bp, Homo sapiens
atatcattatcagcattttggtaaaagccattcaacaagtccctacaaacttacccacattttcctgtcttcttctgagccccccaaactgttccaacctatgcctggtacccagttccaaagttgcttccacattttcaggtaccttttcagcagcaccccactctcctggtaccaatttattgtattagtttgttttcacactgctgataaagacatacccaagactggtcaatttacaaaagaaagagatttaatgaatctacagttccacgtggctgggaaggcctcacaataatggcagaaggtgaaaggcacatctcacatggtggcagacaagagaagagagtttgtgcaggaaaactcttctttataaaaccatcaggtctcgtgagactcattcactatcacaagaaaagcacaggaaagaccygcccccataattcaaacacctcccactgggttcctcccatgacatgtggaactatgggaatttctattcaagatgagatttgggtggggacacagccaagccatatcactagtcattaaaaaatttttttttaaagaaagaaaaaaaaatgggggaagattccccatttcagaacagcttgctgtttggaaatgaaaattctcttcatgtttactgtgtgatttgtgttcataaaatttgaaacaggtaaacaaagga

SEQ ID NO: 77129 - DNA, 691 bp, Homo sapiens
atatcattatcagcattttggtaaaagccattcaacaagtccctacaaacttacccacattttcctgtcttcttctgagccccccaaactgttccaacctatgcctggtacccagttccaaagttgcttccacattttcaggtaccttttcagcagcaccccactctcctggtaccaatttattgtattagtttgttttcacactgctgataaagacatacccaagactggtcaatttacaaaagaaagagatttaatgaatctacagttccacgtggctgggaaggcctcacaataatggcagaaggtgaaaggcacatctcacatggtggcagacaagagaagagagtttgtgcaggaaaactcttctttataaaaccatcaggtctcgtgagactcattcactatcacaagaaaagcacaggaaagacctgcccccataattcaaacacctcccactgggttcctcccatgacatgtggaactatgggartttctattcaagatgagatttgggtggggacacagccaagccatatcactagtcattaaaaaatttttttttaaagaaagaaaaaaaaatgggggaagattccccatttcagaacagcttgctgtttggaaatgaaaattctcttcatgtttactgtgtgatttgtgttcataaaatttgaaacaggtaaacaaagga

SEQ ID NO: 77130 - DNA, 1699 bp, Homo sapiens
ctatgcagcccttgatgggactagttgtaaggttgcttcttcagttttagttgatcgccacttcttctgcacaacagcagagttctatgggactgaataatgcaactaaacacaatttgattggacacacatttttcccagagccatagttcagcctgtcactgctatgtcatgaaacttctctgtctccatcctaacccttcccatgccccactcacaggcacgctgggcttcagtcacaccgactgtctgccattcccacatcacaacaggcttgctcagatcacttgcccattcatttatgttagtctctctgcctggaacttccttccttctcttttccacctagaaaatgtgtatgtctcccttaagctaagcataaaagacatctagttctggccaagattcccaagtacagttagtgactctcctttttatgctcctgtagtactgatcagtgatggcatttatccagcctgtatgaattcttctagaatgtaaggtggacttaggtctttttttttccccacaatgttgtagacatagtacctaatagtggttgaagtaatacatctatggctgcatctgacattccatgctcttaaaagagtatagtgccaggaggtttcagaggctctggctattggaggtggccttctcactttggcccacttggagaagggctcagccctcagagagaccgagagaccaggcagcctttatcaacctctctctctctttttttttttttttttgagacagagtctcgctctgtcgcccaggctggagtgcagtggcacgatcttggctcactgcaagctccgcctcccaggttcacaccattctcctgcctcagcctcccgagtggctgggactacaggcgcccgccaccacacctggctaattttttgtatttttagtagagacggggtttcaccatgctagccaagatggtcttgatctcctgacgttgtgatccgcccgcctcggactcccaaagtgctgtgattacaggtgtgagccactgcccccggcctatcaaccactctttaagacacaagaggagctggggagggacaatgctctctttacagacaagcaaaggctgtcggatcctgcactagaaaaccttatgctataatataaaaaattataaaaaatgtctctgttttcctgttgttaaaaagaagtcttttttgacacaagtcattaatcttcaccccttcttgttgctctcatctaccaaactcccccgcattcctggtcatcccctgtccagggcttctgcttccctctccaccatgtctacaagcatctttccaggtgacttgagtatgaaataaattatctattygattctcactctttcacaacctcctcctctgtgatctttcttccacacccaactcagccacccactgtcatgggtatgcctgaactttgtcaaaagatttccaagatgatggctgtccattttcatttctttctttatcttttttttttttttttttttttttttaagacagggccttactatgttgttccggctgacctcaaacacctggacttgagtgatcctctcgcctctggagtagctggactactgggccactagcatgcctggcttcaaccttttatttttatgctctcaattctccttgctcctgttctcacacgctctgatttagaccccaccgtt

SEQ ID NO: 77131 - DNA, 713 bp, Homo sapiens
gtaaaattacatagtcaaaatatataaagctttcaaaaatttgtgataattatttcaaaattcccatctttcaaagcttgtgatacaatggacttattctcagttatgtgtctttctgaaaacaatagacacaatcaaaaactaatttaaaaactaattcaaagatgttttttggtattttcaaacaccacaaacatttcaggtagatcgaaataaattataagatgttagtatgctcaactatgtagtatagtaataatactgtcatgatgtattagtctgttctgaaattgctataaagaaataaggagactggtaatttatttaaaaaaaagaggtttaattggctcacggttctgcagactgtataggaagtatagcagtttctacttctgaggaggcctcagggagcttccaattatggtggtggaaagcaaagagggagggagacatctcacatgaggggagcaggggtgaggagaggggagaggtgctacactttaaataaccacatttcaggagaactcactgccaggaggacagtaccaagggggatggtgctaaaccattcatgagaagcttccttatgatccaaccaatcacttctcatcaagccccaccttcaacagtggggattacaattctatatgagatttgggtggggacatacatccaaatcataccacatgwtatattttaaacctgtaaaatgt

SEQ ID NO: 77132 - DNA, 883 bp, Homo sapiens
tgcataaattttccaatcctgcggctgctgcagaggttaaaaaagtctaccaagaaaacattcaccatgaactctcgtgattagtttctttgtgtattgctccagagtaaaacaaatcagcactagaaggaaaatctgttctgcgaggtcccacactgctggtctaatgacctatccccacaagaggattgaatagagtagatccactgtggcttcccaaatggctgaggctggcagcctctggagatgaggaacaacagctgaggtgatagagaaaataaaatgttctgcttgaatgcaagttatatttgcctgtcttcctcaaccctctttcaagaaatgttgccatttcagaccaggacagctgctatttttttcatttttagtttttcagtcaaagcttcatggaaaaactagacttggatcaatgagacttatcttcttgggccaattaatttcctgtccacagtctcttaaattcatctcaaatctaaacttccttcagaaagcttccctaccgatgaggtaacatcacatgtcttcttggcaaggttaggaagcagggaagccatatgtccacacccgcttccttctctgcagatctcatctaggattgaggataaagagagggtgtcccctatattttaattcaacttttcatctgtttattaaacttagtcttatgtctttctttcagttatcatgattttacccttactgttaacttcttataggagacatctatgtctcataaataattatattaaattcattagatatyagattcataaattagtagatattatacacaaaagttatttagcattgattcctatacgttagagagcagattaaaaatatttaaaaagatacacaattgtgg

SEQ ID NO: 77133 - DNA, 684 bp, Homo sapiens
tgttattttatttgttggtagctccatacaatcttattggatatattaaaatcagtatgtgtcatttgtaatagtacaaattgccaggaaaaaaaaataagatttgtattacagacagaataaaatatcaaacaagcaaatccttttctgttttgttctttyacagtcatacaacataaaacaatctaaatcaatcttctggaaaattggtaaagacaaccattgctccagagctcctatttggtattccaagtttcagcctggaccgaatttttactgaaaccatagtaaatggagttttaaaatagaaatgcaaacagaacctaagcaatacatctggaaactgtgttactatttgaagacagtttttcagtaatagaatttcagtttttacaccctagtatttctatgtttagtattgtagttttatgagagaagactgttaacagatagtcatcaaaattaattaactacaaaattctaatacccattttcaagagacttacagagacaaaatatttcctctccatcccctacaaataaaagtttgtgaatattttgtttccttcttcaaaacacagtatttccctaggtgtttgtcacattacagtttttatttttcttgagaaaatatattttggtatttgatagcgttcacaatttgataccactcactactggcct

SEQ ID NO: 77134 - DNA, 563 bp, Homo sapiens
ttctttgtcctcatatttttccccgcccttctgaattaaataaggatatgctgaacttgaattattccttgaaatatgagaatgaagaccacaccctagcagtgatagaatgaatctgggtccccrgataggcaatggattagacccactttgccaccctttactgcctttcttcagtgttcttgaaaagagggagaaacaaaattattttaatcaaaaccaaacctaattctaatggacatagttgtgatagtaatggtcatcctctgtcctgaatataatgtaatgccacttgtattttactacttattatatttaccattggtttttatgtatactgtttctcatatcaagaaagtttccttctaaccctaatttactataagtttgtttgttttttgttggttgttgttgttgttgttgtttgtttgtttgtttgtttgagatggagccttgctctttcacccaggctggagtgcagcggcgtaatcttggctcaccgcaacctccacctcccgggttcaagcgattctctcgccacagcctcccaagtagctgggact

SEQ ID NO: 77135 - DNA, 426 bp, Homo sapiens
tctcctaccccaattatatgatactatgatagcagaaaacaattgtacactgactcaggtatgtttgagtatagtagcctatatccttgtatatattaatccaaggtggggcaggtgacccaacaaagttaattgagwcctgtcttgtaatatgtagtattgtatttatgggaaaaggtctcttctgggttgctaaatggcaatggtgtaagcctagaactgggtatggtcacagctaccctctcccacatagatgaagctgatctgcaataagagagagagaactcagagagggataggggggtggggttggtatacagtgacaaagacagacacacacacacacatacacacacagttagaaacctctgactgaccaagaaatggagactgagacaggcagagatgcataaggcatagaactta

SEQ ID NO: 77136 - DNA, 1487 bp, Homo sapiens
tgcatgtgaatgtgccatacacatatgctgacatacatggttatacacacatttaaaaattcaacatgtttttttaccaatgtatgaaacaaacacatataacaaaataaagcctttaatgaatgatatctgaactacagtttatcaatttggtttcagctaactgccaaaatagagaataatttttattaattaaccttaattctcattcagaawctgacttaaagaaaagtcaagcagtaaagcacagctttggaaaatgtgccccctgtacttgacatatactggtaaattgacacactgaggtacctcagattcattacaaaccagtttgtaaattaccctattattattattattattattattattttactgtttaagtagtggttgaacaatcaagaacaaacatgaatcaggtaggcaccccaatggaattaactcttttattggccattctctgggataaaacaagcattggtgatgaaaccagataagagagaggcaaatatagcagaatgttacacccttattgcaattgagtcaattgcatagaagaataaaaaatggaaaaagaaattagacttttcactagtggaaaaaaatgactaggcaactctgggatatgttacaacaagcttctgaataaaataaataggaagtatttttcaggctgtggggattgaatgaatgcaatcaatcttccttgcgcgggaactgcatcactcctacccacaacctccctctcgtgaattaaaatctcacagcaactcaccctataggcagtagtcaggcttgagcaatggccacttaaccaggacaatacctggcatataacccagtcagacccacaatagcagtgcattttgttatgatcctttcctgcagtaaacaattttccagacatattctctgtcttccctacattaggtatattggacatatatgcataatcgctctcgctttagtaataagaacgttgcattatttccaacgtcaaaagctgaccatattttcttttcaatttttttttttaagatcctaactctatatagtatagttatctgtgtccctgggacatatatcttagttagacgtgttataaatatgatagaatttattaaatagatccaacacaggtggctggctttgaaacacttctgcattcattccattcaacaaatatgtattaagcataccatacaaaaaacatgtaccacaggccgtaaagatgaggtattaattgccttggattccaacatatgcataatgctgttatgagtgacacacatcattatgatgaaaggcaaaacagattttaaaaattatagacaaaaaattatatttctggaaacacaattgtaagtatttacaatgacccttcttcctgctactggaaaggaaggttctcatatctgaattgatgggtcactggctttggcctaagtggtacaatggaaagacttgcaccactggggaagcccagg

SEQ ID NO: 77137 - DNA, 579 bp, Homo sapiens
tggagatgttctgtccctcatgaaggagaaagaaaagttgccccaaatggggactctttaccttcagcatcttgaaactccttcaccatttgaagtattaaaatatttaatcaacatcaaatgctgctgcccctatttatacaagtgctttattatcctgtacattataccacaacctgcctggctcttaatgtgacctgaagagctagtsggcatttattacaaatgcgaggcagtaagcttctggctgagcaattaatcactgacaccaaggaatttcttctcttcaggtggggaacccatccaaaaactaagaaaaataatcgggctaattaattcttatctgcaaagagcaattagataaatgacctcaaaaaagacttgtcacccctagtgagacactcactttctaaatagaatgtgtcgagcctcttttcactgggcaagtgatactgtgaaatggagatgacagaaatgaacgggagggaaatgagaagggagcaggttaattagaatgaaggctgatgagagagggtggggggagagagagagagaggaagagagggagagagatagaaa

SEQ ID NO: 77138 - DNA, 714 bp, Homo sapiens
tctatggggcagcatccaagtgtccacctttggggcacagagtggagtctgtccactgcccggttttcggagtggaaccttataccttatagcccagacaatccccaccaccagtagtctagccacagatttttgctgccacaacccagactttggctggcacctggtaaacagctttcttgggtaacctatgatgaaagayggctgcagcatagctgtctattccatgtcactctcttctgtgtaccataatgttgttctcattctcttcccacacaggcggagtctaagcatacccctaaacagcatcctttcttacaggaaagccctcttggacttctttccaaccacattcccactctccaggctattcagagaagaaagatacatcttacttggaagtggtaatcttctcactgcttgagaagaagatgaccatcttattgtctgcactgctcccttctcttgtatagcagtcattccaaccttgcctgcaattagaattacctggggagctttaaaaaacatcttattgccaagagtggcaccagaccaatcagatatctctataggaggcatctaggcacaagtagaagcctgattttgccatctcttaatcctggcagatgttgggtgctatctgcagctattgacattctaaaacgttctaaaacgttaggatacttctgtcctgtcgtttccagtcatggatcc

SEQ ID NO: 77139 - DNA, 714 bp, Homo sapiens
tctatggggcagcatccaagtgtccacctttggggcacagagtggagtctgtccactgcccggttttcggagtggaaccttataccttatagcccagacaatccccaccaccagtagtctagccacagatttttgctgccacaacccagactttggctggcacctggtaaacagctttcttgggtaacctatgatgaaagacggctgcagcatagctgtctattccatgtcactctcttctgtgtaccataatgttgttctcattctcttcccacacaggcggagtctaagcatacccctaaacagcatcctttcttacaggaaagccctcttggacttctttccaaccacattcccactctccaggctattcagagaagaaagatacatcttacttggaagtggtaatcttctcactgcttgagaagaagatgaccatcttattgtctgcactgctcccttctcttgtatagcagtcattccaaccttgcctgcaattagaattacctggggagcwttaaaaaacatcttattgccaagagtggcaccagaccaatcagatatctctataggaggcatctaggcacaagtagaagcctgattttgccatctcttaatcctggcagatgttgggtgctatctgcagctattgacattctaaaacgttctaaaacgttaggatacttctgtcctgtcgtttccagtcatggatcc

SEQ ID NO: 77140 - DNA, 714 bp, Homo sapiens
tctatggggcagcatccaagtgtccacctttggggcacagagtggagtctgtccactgcccggttttcggagtggaaccttataccttatagcccagacaatccccaccaccagtagtctagccacagatttttgctgccacaacccagactttggctggcacctggtaaacagctttcttgggtaacctatgatgaaagacggctgcagcatagctgtctattccatgtcactctcttctgtgtaccataatgttgttctcattctcttcccacacaggcggagtctaagcatacccctaaacagcatcctttcttacaggaaagccctcttggacttctttccaaccacattcccactctccaggctattcagagaagaaagatacatcttacttggaagtggtaatcttctcactgcttgagaagaagatgaccatcttattgtctgcactgctcccttctcttgtatagcagtcattccaaccttgcctgcaattagaattacctggggagctttaaaaaacatcttattgccaagagtggcaccagaccratcagatatctctataggaggcatctaggcacaagtagaagcctgattttgccatctcttaatcctggcagatgttgggtgctatctgcagctattgacattctaaaacgttctaaaacgttaggatacttctgtcctgtcgtttccagtcatggatcc

SEQ ID NO: 77141 - DNA, 682 bp, Homo sapiens
ggatcccaagacacaagtgacccttataacattattgtttcttcttattttaaaatatattgcaacactgtttataatttattaaatgggtttataactgctgagggagatttgagttgaactgttgaaaacctttataaataaaaataaactaaaaaacatagcttttttaattttaatgatcaacccccattaacagaagatatatttgtttctaaaggttttataaattttcaagccattctaaartcattaaaatacacataagtttgttttgttatttagtcttttttaaaatctgattaagagtcctctatagaggaaaagcattagtatctattacttaaatgacacttaaaaaatgcataattttttacattgaactattcactactagtaagaaagacaatggcttccacttaatgaacacctatgttccatgcttttcattttggaaatgaattccaagaagtataattatcatcagtgcacaaaacagacaagacaactggaaatcaaagacactcggtcattagctcaagttatggtaactaacaagagctaaaagttacctcagagaaaaaataataattttttcccaatatatacctgaaaaagaacacattgatgtaatctttaaagtttacaaagaactagccataatactaaaagaaagatagtt

SEQ ID NO: 77142 - DNA, 2122 bp, Homo sapiens
agagtctccagagaaatgtatcatctttgccagtcgttcgctttgaatttgccttgctgccccagtggcatagcattggtgctacagggagggttggggtcttgacataacagccataggcttctaaaacctggtgctgctatttcagttaggagtagggagatggttacaacagaaaggggagacaagcagaatatctaagttcatattccccatgggcaaatgaaaccaaagaacaaaatatgtgacaggcaaagctgccagttgtcatactccaaggaattactaaacattaatatgcttactttctacttatttttttctattagtattttaatgaaattgatactttaggaagctgagacagaaagatctttactgaatcaaagttatttataaacacaccccagatccctgtgtgctaraagcagtggttttcagtttcattgcgcaaaccagcaccatcagcatcacctttgaacctaatagaaatgcaaattttcaagtcctaccccagaaatatttaatcagaaactttaaatacagagccctggaagtttgtgctttactaagccttccaggtgattgtcatggacagataagtttgagaaccactgctgtaaagaaactactcagctttttgaaggtgggaacctttcaaaggtgattgagtttcaaagcaaagcaaaaacaactcgttaacactggtgagcatacttactggctcacttttccccattctgcctgcttgtctgtcatcgtgttagcatcccctgcatgaacaatgccacaaggactccagtgttcatcagatgtcctcaggagttcccttcaggaatcagcattcctacaggagaagcatgatgcattccccctcacccatgattcttacctgcccaggaacacctacctttgccttcagccttcttctttctaccccatggccatgagccttaggaggaaatgaagtttattaactccagacactgtgtattcatctctttcccacctttcctccctgtcctgttcaggattccttcaggcatccctttatggcctgacttcagcaggaagctgctgtttaaatgtgggtcatgcagcgagtagtgtgccgctgggagctatgctactctgcttactttgtaccctgttgatttcaaatgatcctactctcaattttgctccaaacctctaggtgatgcttccctggcacacaatggctgagacagctcaactctgccatgccttctgagaatctgttaaatacagagaatgggtatcgggctttagtccaagaaggatttaggaacattttccttatttgtcatatacacaaaatatccctatggcatgcacccctgcacagtaatttctttagtaggtatttgggtacttgctgtaacaaatgtatttaaatcttttcgatctgtggattcctaggttgttttccttttgttactcactcagtgtgcctaacctttgccaaacaactgcagagctatgtcctggccacaggttttatttgctgcctttagtcattttcaattgcttcatagaagaaaatatgagggtagaagtcaatggaaagcaggtttaggtaagctccatttggtctatatatattgccaagaatacagcatgtacttgaagcaaggaagggatttctgttctgatttggaacactataaatcaaataactaaggttcagccacccccaagactgcagacatggttccctcccaatatttattgctaaatgtcagaacttacaaatgccaacttgagtatgctgcctgcatctggaaaattatttctggtttgtcagaaaatccaggggctgcttttgtttgatgttagtgctgttcagttcttgtttctgggctgtttgaatgacaatcttctcatagcatatcctgtcagaaagggtgagagtcacctggagaagctgtagacctcatattgcatgacacttgtctccataaatgccaactgacaagcatctcttcagaggtgccaacatttaaatatttcaaagaaagaggtagtgagtgaggagatgttttcacagctatctggtattgttacttgagttgttactttctgtgagtgagaaaatgatgca

SEQ ID NO: 77143 - DNA, 690 bp, Homo sapiens
catgtacctggcaccgaattgagctgacatgacaaatccaggcacgtgtatttcctgagaaagactatgagtttgttaagtgtagggaattttctttttcatttcaataataaaataaatgaatacttaaatatgatatattaaataattattttctatgaaaagtagagtttgttaattttcctgtaataatttttatggcttcactgcttcatgggttagtgtcacgaatttgggtgagtataaaacattcatgtaattatattgactgaaatgatgtggggcattgactaaggtctagaaaacttttggtaatatttaaaaactatatgacagtgagatgcaatatgttttcaacatgccagaagaaagattagaaggaaaagtgccccagttggtcctactgaactgatttacgctctgggtttcgccatacacatgtatccttgtccaacacaggagaccatcttctttgatcagttcctgattcagtttctcctctgcgcactctgccatgttttgtacctccgtcataaccattcactgcatcctgacttactgtattcaagcaaaataggatgcttcctagacaattacagttttcttagggaacataaaggcaataaacatgaaatagkggcaaaacatgtagccaagatgaaatgcaaaattgtggaaagcaaatgtaag

SEQ ID NO: 77144 - DNA, 577 bp, Homo sapiens
gatggagtttcaccctttttgcccaggctggagtgcaatgcgcgatctcggtacaacgcaacctccacctcccaggttcaagcgattctcctacctcagcctcccgaatagctgggattataggcatgcaccaccatgtccagctaattttgtatttttagtagagatggggtttctccaygttggtcaggttggtctcgaaccccaacctcaggtgatccacccgcctcggcctcccaaagttctgggattacaggcatgagccaccatgcctggccaacactcatcctttgttacctgaaaataaggttattccaggtctgattctctgcagggatgcagattcctccacacaaccacacctaggatgtcccttctgggtgtgctttgctattaaatatgattcattctgcaacccaactggattctcagcttctcactgaagtactccctgaccagcacaggaatcccatttctcaatgcttacagttctatagtaatattgaacactgtctaattttgtttgccagtctttaaggtaatatttctaactctgaaatcaacccataacttcctc

SEQ ID NO: 77145 - DNA, 577 bp, Homo sapiens
gatggagtttcaccctttttgcccaggctggagtgcaatgcgcgatctcggtacaacgcaacctccacctcccaggttcaagcgattctcctacctcagcctcccgaatagctgggattataggcatgcaccaccatgtccagctaattttgtatttttagtagagatggggtttctccacgttggtcaggttggtctcgaaccccaacctcaggtgatccacccgcctcggcctcccaaagttctgggattacaggcatgagccaccaygcctggccaacactcatcctttgttacctgaaaataaggttattccaggtctgattctctgcagggatgcagattcctccacacaaccacacctaggatgtcccttctgggtgtgctttgctattaaatatgattcattctgcaacccaactggattctcagcttctcactgaagtactccctgaccagcacaggaatcccatttctcaatgcttacagttctatagtaatattgaacactgtctaattttgtttgccagtctttaaggtaatatttctaactctgaaatcaacccataacttcctc

SEQ ID NO: 77146 - DNA, 577 bp, Homo sapiens
gatggagtttcaccctttttgcccaggctggagtgcaatgcgcgatctcggtacaacgcaacctccacctcccaggttcaagcgattctcctacctcagcctcccgaatagctgggattataggcatgcaccaccatgtccagctaattttgtatttttagtagagatggggtttctccacgttggtcaggttggtctcgaaccccaacctcaggtgatccacccgcctcggcctcccaaagttctgggattacaggcatgagccaccatgcctggccaacactcatcctttgttacctgaaaataaggttattccaggtctgattctctgcagggatgcagattcctccacacaaccacacctaggatgtccctyctgggtgtgctttgctattaaatatgattcattctgcaacccaactggattctcagcttctcactgaagtactccctgaccagcacaggaatcccatttctcaatgcttacagttctatagtaatattgaacactgtctaattttgtttgccagtctttaaggtaatatttctaactctgaaatcaacccataacttcctc

SEQ ID NO: 77147 - DNA, 662 bp, Homo sapiens
atttggtgggacaattctgaagtggactccacagttctcagagggttcccagaggaattgagctccaagaagaaggtgatggtggcataaaccaaggtggtagcagttgaggtagggggagttactatcaactgagatgattggaggggagtagttttgcctgttagtctttgttgagcactgtcagattgggtaattttgtctgtttcaatattgtggtaggttaaagatttttacgagttctttgccactccttccttccatsaagagcagtgtaagcctcctcctgcatgagctttgcacttggcctttgacttcttctggccaacgggacatcagcaaatttgacacaagcagaggctttataaatgtgtctgcattggggctttctctgagattgccatgtaagaaaactggatcacctactggcagatgagaagcccaggaaggagaaccaagatgtcccagctgacagccagcaccaaatgtcagatatgtgagtgaagccaatttgaatattccagcttctgctaaactccactgactgtagccacttgagtaagcccaaccacttggtaaacaaaatcagcagaagaacttctaagtcaacccacagaattgctatatacatattgagttgttttaagtcactatgttttggg

SEQ ID NO: 77148 - DNA, 662 bp, Homo sapiens
atttggtgggacaattctgaagtggactccacagttctcagagggttcccagaggaattgagctccaagaagaaggtgatggtggcataaaccaaggtggtagcagttgaggtagggggagttactatcaactgagatgattggaggggagtagttttgcctgttagtctttgttgagcactgtcagattgggtaattttgtctgtttcaatattgtggtaggttaaagatttttacgagttctttgccactccttccttccatgaagagcagtgtaagcctcctcctgcatgagctttgcacttggcctttgacttcttctggccaacgggacatcagcaaatttgacacaagcagaggctttataaatgtgtctgcattggggctttctctgagattgccatgtaagaaaactggatcacctactggcagatgagaagcccaggaaggagaaccaagatgtcccagctgacagccagcaccaaatgtcagayatgtgagtgaagccaatttgaatattccagcttctgctaaactccactgactgtagccacttgagtaagcccaaccacttggtaaacaaaatcagcagaagaacttctaagtcaacccacagaattgctatatacatattgagttgttttaagtcactatgttttggg

SEQ ID NO: 77149 - DNA, 984 bp, Homo sapiens
tgtggaaaatagcatctattttggtgaagtaagatgtgagttgatttgcaaagtgaaatggacaaagattaggttggggactgaaaaaagtggtgttccaggatcttaccccaagtgtgattcttctctggaatactttttttcttgcctactgctgtgtgaactgcagagcagtcacctgttctcagaagtcacatgccttcttcttgtgctgaatgtcagcatgattatggactagccttggagaaatcctgggcacaaggaccctcttaagttcagaaactctcctttcttctgaaccccttcattccacatgatctggcattaggccgtacatcactcctcttgcctacagctcttcaagccctcgcccctggtacctgcaggtgaaaacactccttcctctgaaactcccgcatcccagtcctgtcacctttgattttccttgcactcttgtaaccgagcacctggtcactgcccctaactcaactgagaagttcagtctctttctcctggtctttctctcctgtcctgctcccgtcatcatcctgccagcctccgtgtccaaaagatgacctggccaacagtggctgcaaagctccttatcctcttgagctcagggagaatcaccactctcacccattctcacagccataccctggaccttatcatcatgtgaaagcaaaggccaaaatgcccacttctgaccaaagcccctattccttctgaccagctcattccctcaggtccagtctactttcttgtcatgacatcccatcaaaccttcagtttttcagctagtctctttgccatttattcatcgtcttttgcattactatgaatcttttttttrttatttatttttattttcattttaagttccagggtacatgtgcaggatgtgcaggtttgttacataggtaaacatgtgccatggtggtttgctgcacctatcaacccatcacctaggtactaggcccagca

SEQ ID NO: 77150 - DNA, 638 bp, Homo sapiens
caagtgcttttaggcagggtccctgaattccaattttctgttcactaggtaatcttgcttaccttattgttattctttccaaagggaacatcatctatgtagtcattaacaagcagtgaaacattttaagatcaaagaacaccatgctcatatatgaactgtaatttgaactggaggaaaagctgcgtgttagaaataacagcagttgactgacatataagaatatatggtttcacaataaatgtctcaaaatgctctctgtaggactcttgttagtagaatgagaactaagggatatcttccaggctagaaattttgagtgtccaaagcccagtcactcaaaccatagcatggtagttcccatgtatagcagtagatcttgactgggctgatgtaataaatacrtgaggtaggtggtcaactgccagtgctatttagatgctaagcaggtttccctctgccaaataactcccaacagctgattttggtacctaaaagttcaacattagtgatttagtcttttgaatattgccctattaaaagataaacatccacagagtgataacaggtgaagatttttgttagccaacctgctccttcctgaagaagacatctgtagggctgtgtgatataatgga

SEQ ID NO: 77151 - DNA, 769 bp, Homo sapiens
agctaagccattcccagattcctgatacacagaaactgtgagataacaaatgtgtgttattttaagtcaatgcatttttggtaatttgttatagagcaatagaaaagtaataaaaaagaaatgtttaagtcgtaatatgtaagagttctattgaatcctacaatagtactagatctttgtttgtttgtttaaaaagcaaaactttgcctggctaaagtcaacatgtcttttaaaaagacttctatgccaccctgggaagaataatttttcagatttagtcagatttttaagaggacacattaattccagaggaaataatccaggaaaattggcatgtgccatatcagagtagataggaaaatgaacagttatctccatyaatcttcaaatttcaaagcaagtttgcatcctgggatacttggtcactagatattatcctttttatgtatcgttggaattgatttgctaaagttttaagaattttttcatctatgtctatgatagatattgctctatggctttcttgtaatgtctttgtgtggttttggtatcaggacaatgttgttctcacagaattaattgaaacatatatcctctgcttcaattttctgaaaaactccatgtacaactagtattatttcttcctcaaatgtttcataaaattcatcaaagcctacaggagtattcaggttatctatttcttcttgagtgagctttggtagtttgtctttcaaagagtttatccatctcatctatgttttcaaattta

SEQ ID NO: 77152 - DNA, 1375 bp, Homo sapiens
agtgttcctcagtagttgaatgtataaagaaaatgtggtgcgtatatacaatgaaatattacttgccgtaagaaaaaaaggaaattctgctgtttgggacaatatggtgaacctaaacgacattatgccaagtgaaataagccagacacagaaagataagtactgcatggtctcactttatatgggatcaaaagaagttaactcacagaaacaggagtaaaatggtggtctccaagggctagagattgagggaaatgaaggaattttgttccaagggtacaaattttagttataaaatgaatgagttctagagatttgatagacagcataatgattacagttaataacaatgcactgtaaacttgaaatttactaagagaatagatcttaactgttctcaccacacacacaaaaggtaactatatgaggtaatggatacattaatgagcttgagtgtggtagtcacttcacaatgtatacacgtatcaaaacatcgcatgatacatcttaaatataaacaatttttatttgtcaatatatatttatttgatagggaaaaataaaaaagattcagtgaacggtggaagcaatgaggactataggaataaaaattacagataggaaataagtttttagctgtgagctgggaatttgcatccccttggggtcattctaaaccggaatgcagttttggaatctgaaataggacaaacctactgacagacaggatccttatgaaagacagaaaaacaagaggaatttttgatggtcccacagtgaagagtcacaaaattggagcactggagaatcattcacagagaaaatttatccttccatattttttgttaaattttgaagctgtgatagataggaggtaaaaacaactagagatgaatttcttgcagtctcacaggattaatgaacaaaagacccatttacagtgattcctcagggatctagaactagaaataccatttgacccagccatcccattactgggtatatacccaaaggattataaatcatcatgctgctataaagacacacgcacatgtatgtttactgcagcactattcacaatagcaaagacttggaaccaacccaaatgtccaacaatgatagactggattaagaaaatgtggcacatatacaccatggaatactatgcagccataaaaaatgatgagttcatgtgctttgtagggacatggatgaagctggagaccatcattctcagcaaactatcgcaaggacaaaaaaaccaaacacygcatgttctcattcataggtgggaattgaacaatgagaaacatggacacaggaaggggaacatcacacagtgggaactgttgtggggttgggggaggggggaggg

SEQ ID NO: 77153 - DNA, 869 bp, Homo sapiens
ctctcaaaatggtaccgtgctgcagctgcttaagactcagtggtttgtgggacccagcatgagctctctgtctggagcaatgcccttttacagtctgcaggcagctccctgtgttattctcaaagccctcaagagtcaagggactctcctgtgcctagaattatagggaattgtagtgctgtgggtctytcattttccctttccccacattaaggatcctcttcagcctcccagctgatcccaaatgaacagcctgccttgtttccccctccttacttgctttaggtgcttcccatcacttctctgttgaattccagtgttctctcttagatgatctattggaagtgtgactctctactcattttgattcttctccattaaggaagcccctcctcagtttaccaggcattgtgtctaaatttttataactttattcctaataaacttcaagtttgaacttttctgaaaaattagagagcatgtagtctcttcacaatcatgttgtgcataaatctctcgctaaaagcatacattcatttgagcttttatagatccttagacttaggcctttaactctttggataagaaccagttctatcactcaggcataatcattgttataattttgacatagatattttcaattataatacatgttcaatttatcttgaagtgttaattgcaaacatgtattgattaaagttatagattttatgttactttatcaagagttgttttattattatttttctccaaggggagatggctgaggaggaagctcggcaatattttcttaaaacattttatagactaaaacaactggagccatgttctgcatcctgtaattttggggaacttaataattttgc

SEQ ID NO: 77154 - DNA, 747 bp, Homo sapiens
tccaagacagaattttaaagatgatattctacccctgttctctttgcattttctttcataaaaagcaagaaccagaagtttcctcatagaccacaaatggttgtgatagaggtaaaaaaaatctcatcacaactaatcacagtgcaagaaacccacaaaattatatataaaccttaaacccctggaatgttgaggagggatacaagaaaatatgtacacagcaataggataaattttacatttaaaaattattacaggctggctgcggtggctcacgcctgtaatcccagcactttgcgatctcaaggtggacagatggcttgaggtcaggagctcaagaccaccctgggcaacatggygaaaccccatatctaacaaaaatacaaaaagtagctgggcacgtggtggtgtgcgccccacaagtagtcccagctactttaggggctgaggcgggaggatcgcttgaactggggaggtcgaggctgcagtgaaccaagattgtgccactgcactccagcctgggtgacagagtgagaccttgtctcaaaaaacaatttatatatatatatatatatatataatttttataaatattaaatgtttccattcctatatatatatgcaaaagcagaaatcatgaagataaaagctgatagtttgttttatgcaaattaaaaacttttatactgagctgggaggtgatggtttgcccttgtaatccctgtgacttgggaagctgagatgaga

SEQ ID NO: 77155 - DNA, 1828 bp, Homo sapiens
aagacattactcagtgtcccttataaagggtcttccataataaaattttccctgaaattaatgccaagataaacaaaatctgccttgcatgtttctcttttgatgaagttagaactatactatgcaacagtttcccttttctgccttagtttcaggcaagtaaagctaaatccggtgctcagttggagtaactgacatctcaagtatgtactaatgtctctttctgcattccttttaattaatgtctgttatttttaacaacaaaatgttcagttatatatttagtttaattttgaaactatttaacatccttcttgcaagaattaaaccaaataactagttggcaaaaaccataattgtccttaatagttagagtttgtaacagtttgtgccttaaagatataaacttctattgtcttaaaaatgcatttatctcagaatgtaccaatgtgtgcagctccacccacctcgccatatactgttcagtttgtataaatacacctactaagacatgatgtctgggtcccaaatggacacatattaggttcatgtcttatagatgcctttacattcctgttagaaagtacttagcgtgttggtttgggagcctcatgcatgggagagaggtatacatyacagagacaatgatgagtctgtgagttctctgcagtaaaacccaccacaccctaaacttaaaggcacaaataatgttaatgaaggctggtcctgtatcagttgattgaaaagaacagtgatctacagagatccttacatagtgagcatgattaacattttttcctgctacaaaaaagtgtgaactttgaccagactatcatgtttctgctcctacctgccattaacatgagtctggtatttatatgattactccttttcccctttgccccataagtgaaaataagttcaataaatatattcactagacatcctaaatgctgaaaaggactgcttgctacatgtgacattatagttccataatcttgacaggaagcagcacccttacacaatgacctgttctctcctgatttactatagctgggatgtaacacaagtgactttgtgctgtgtaggtgaaacattcttaaaattttatgtattcagctctgaagtaaatatgacaaaatattaccatttttaaaattctggatggtaggcacatgtgtattcattgtattactctttgcacattcctgtatgttgaaatgttttttataatttttgaaactattatgtaatagagaaaaaaaaagagtccaccatggttgtttaggttgaagagtgggtaaggttagggagaggaaacagccatgcccttcacctggcaggcatggagattttccagaggtttctgtcagagaaaatcaccttaacttagtttggattacttctagatgaaaactctttttcgtagctagggaagaagtctgttatttatatttctgcatgcgatttattcatgtgtcagccctggactgagtattagagatctctccatgaaaggctgacatgtgtgcactgctagtgtcggtgtcagctgtgtgaaatcctatgcagccagactgtttgctccctgcaggccgcaaacctaaaagggtccttcaggctgtcaggtagccagcgggaactgtcaagagtctcaagcctgaggttccagttgcagaagaacctgcagttaaccagtgtgtgaggccaaattctttaaaatatgttgagatatcttatttgaagaaaaccttgtgcgtatttgtgtatgtgtgtgctcatgcacacacgtgtgcatgtacgtgtgtgtacatacatgtgtatgtgt

SEQ ID NO: 77156 - DNA, 1670 bp, Homo sapiens
taatcaaatttgtccacatttctcttcattacatttagttcagaccaactgcagttaggtgggtgaggtttgcctccctttccctccaaaatatcctgcctcccttcctcacccctcattgattggaggggtgaggaagggaggcaggatattttggagcatagaattctcgggaagaaatggaagggcaagtttggagggagaagagtataggaggccctgggacgcaacactaggagggtgaacaatgcaacatcaaccaatcgtgttctagtcaacattctgcccagggtcctccttgaatccaggaaagaaaaagttctttctctcctcctctccttcagtgcttcatcagggcatcgtacttctagcattcatctgggtattttaatccgtatcctactttagctatgttatggattaaaaagccttctgtgggctggcctcagtagttaaccactgcatgtaaaatggtttccagaggaaactatgcttcgaattttgaattgtaaaccaacctgtgggacagaatctgtttgaaactgggggctacctgtgcatggctctaggctgcaccatcaccccgccccctacaacatactcattagacactgctcaagaatgaaaacacgtatcaaaagagaaggcttgaatgcatggctcggctctgcacacaaagccaaaacatctggataaactgttgactaagtatgctagccagatgttttaaaataattggtagggcagacaacacatttgtgtgattgacatttttattttttattttattttgttttttggtgttgagtagccttggtctttgtaactgcagggttgcttactaaaacctgtctttatttctgagaagcagagagtgttgaactcagtgggtgcttctagacttggggattagtgctgggttctcttgtaagatgtggacttgatgtggaaaggtagcaaggtgagtggcctggctatatatattcttttgtatctttttcctctcttttggtactctaaaccagaggcttgatctcygttgattttagctattttaagcctcttaacttcccttcctctttctgtgaaatctgattcaaaagtaggatgcactctattgcaggttgtatctaactataatcaagggtgaccagcatagaaatacatggggtatttcgtggaaaggcagattgctaggccctcctctaactactgaatcaaaacctctagaggatacggtagtgggaaatggtcttttaaataaactccccaggtgagtctaactgcagacttaagagaactgctgcattatagcctcattctgagtcatgaaaactttcacttttcaattttattaacctgtagaatctagaaatcaagtaacataggaaaatttgtaagtcgaagtactagggtgcttctgaaaatgtaatgtaagcaagttaagaacttgataacaattcatcacagatacttgccctggaatctattcttaagcatatcaggcatttttctgtctgaaatctgattttcatagaagatcaataagggaatatttacattgccaatacggtaaccatttattatttgatttttacaaaatccttgcctctaagcaactggcatttgaaacaaatcagaccttcatcagccataataacagttcattg

SEQ ID NO: 77157 - DNA, 1158 bp, Homo sapiens
atctctgctattagagatggggtcacttccaataggaagcaacactttttcctagtgcttaaaatggagatagccctaacagatgccccaggtaatttcaatggctcaaagaattccaagtgcagtagaatccacagtaggatctggaagaagaacaaaagaaaatgggtcttgtttcaagtccaagttctctcaagtaagcacagagtaatccaatttgctagagatttaatccaacagggttagtgagcaaggcaccttcagatttaaaaaggaaaaacaaaccccgcaaaactttaaaaaatcattacttaaagcatttcaagcatgggccaagctgaggatcaggctcctggaggaaatgctgggttttgcttccccccaggctgccrtctggctgtgctctatggcatgctagatgctgtgagtgtgagttgctatctgcaggtatgtggactcactggattccacattatttttattcccatttcttcatccaacactaatcacatgtgtttgtactctggaaaccatctggcaggtatggctacctaccatggctatgtcatgctgcagcatatttagaggctctcttaaaaaatacaaatacagtagtaggttaaattgaagaggtaaatccaggttctggaccatatatccttgatcactgtcttttttcccactgctccattattaaaagtttggattaaaatttgggaatcaacccacataaccattcagaaagagaagcttccaaaaggcttaaaagaagtaaggaatgaaagccaaaaacacagaaataaactgaacattggggaaaaaaaatctatacactaaagctaataagttttgcattgtatttccaaggaaatggtggaaattttttatttttgagacgaagttgcgctctgtcacccaggctagagtgtagtggcatgatctcagcttactgcaacctccacctccccagctgaagcaatcctgccacctcagcctcccaagtagctgagaccacaggtgtgagccaccacacccagctaattttttttgtatttttaggatagatggagttttgccatgttgcccaggctggtctcaaattcctgagatcaagctactcgcccaccttggcctcccacagtgctgggattacatgca

SEQ ID NO: 77158 - DNA, 1152 bp, Homo sapiens
atatatgtattaaacacacacattaagggactttggcttaatcacagggtcagatgaagcctcctgaggaaatggtccttgtgataagatgtaaaagttaattgaagaagaagatggggccaggcacagtgtctcaagcctgtaatcccagcactttgagaggctgaggcaggcaaatcacttgaggccaggagtctaacaccagcctgaccaacatggcgaaaccctgtctccactaaaagtacaaaaattagcttggcatggtggcacacgcctgtagtcccagctacttgggaggctgaagsacgagaattccttggacccaggaggcacaggttgcaatgagctgagattgcactactgcactccagcctgggcgacaaagagagattgtctcgaaaaaaaaaaaaaaaaaaaaaaaaaggttacattcacttagaacatcagaaagagcatgtgcaacgtctggggtagagccagcttggggaacacaataaagtcaaggaaagcctgcatggctgcaggaagcagtgagaggcaaagcacagtgtggaatgagaatggaaaactgggttagaaagacaatatgcaaggtttgtaggcttttttaaggattaacatctaacaaaatgaattgtttcaatttagcatttagtttacagaatatcctggtgacattgtgagtaagctagaagagaaattagcacctacaagaaatgctttgtgtctcctttttggggagatggtgagtatatttttacatttaagatatagttgcattatgctgcatgacatagttattattgcctaaatgtgtatagttcaaatttggatgatgtgggctctgctagataatgtgtgttgatactcaatgggataatatataatcccaagggccatataaatataatacatattgcatgttttaaaatatacattgatggtgtcatgaatatgtcatcaaagatattcaaagtcatccttgcctttctaagtaaatacttccctctatcacaagaattaagagcctaaaaactgtatttgccagacacttgcaagaaattttctgagttaaattctgccaagaagatgcactctcataaaatgtggaagtttgaaaagaaagagaagcattgtcctcctccaaaagca

SEQ ID NO: 77159 - DNA, 1152 bp, Homo sapiens
atatatgtattaaacacacacattaagggactttggcttaatcacagggtcagatgaagcctcctgaggaaatggtccttgtgataagatgtaaaagttaattgaagaagaagatggggccaggcacagtgtctcaagcctgtaatcccagcactttgagaggctgaggcaggcaaatcacttgaggccaggagtctaacaccagcctgaccaacatggcgaaaccctgtctccactaaaagtacaaaaattagcttggcatggtggcacacgcctgtagtcccagctacttgggaggctgaaggacgagaattccttggacccaggaggcacaggttgcaatgagctgagattgcactactgcactccagcctgggcgacaaagagagattgtctcgaaaaaaaaaaaaaaaaaaaaaaaaaggttacattcacttagaacatcaraaagagcatgtgcaacgtctggggtagagccagcttggggaacacaataaagtcaaggaaagcctgcatggctgcaggaagcagtgagaggcaaagcacagtgtggaatgagaatggaaaactgggttagaaagacaatatgcaaggtttgtaggcttttttaaggattaacatctaacaaaatgaattgtttcaatttagcatttagtttacagaatatcctggtgacattgtgagtaagctagaagagaaattagcacctacaagaaatgctttgtgtctcctttttggggagatggtgagtatatttttacatttaagatatagttgcattatgctgcatgacatagttattattgcctaaatgtgtatagttcaaatttggatgatgtgggctctgctagataatgtgtgttgatactcaatgggataatatataatcccaagggccatataaatataatacatattgcatgttttaaaatatacattgatggtgtcatgaatatgtcatcaaagatattcaaagtcatccttgcctttctaagtaaatacttccctctatcacaagaattaagagcctaaaaactgtatttgccagacacttgcaagaaattttctgagttaaattctgccaagaagatgcactctcataaaatgtggaagtttgaaaagaaagagaagcattgtcctcctccaaaagca

SEQ ID NO: 77160 - DNA, 3371 bp, Homo sapiens
tttctctcatagtgaaagaggcaaaacaaatatttaagagccacttgtgtttctttttctatgaacttgcaattcttatcctttggctgtttttgtattggttgatcttttaccaatcaattgagaggaaaattttagttactaggaaagagttttctgtctctggtagttgtaaatctttttccagattatcatttttcttttaactttgcttatgattgttttgatatttagggttgttttttgtagctaaatatactgatcatttcttttatggttttaaaattaaaatatagtttaacagtcttcaattccgacgttataagtaatttctcctaagctgtctagttttttttttttgtaaagattgatccatttggaatgtatactgatgaatgttatgaggtaagaatctaattttttttcaggtagctacacaattattcccaatttattgagtagttcttgtttttctcacagatctcagaatttataacagcaaacattatttttcttgctctcaagactgtcacttgcagttctctagtgctaagtgggaccagaagggcttcgttctaagttcacaacctagaacctgaattaggttcagatctgttccaattgttttctaattctccttttgtatcagccgatacctgggacattttcttctaataaatcacaagagcagatgaggacaagccgaactacacagcatgtttttaatgcctctgtttatttcatattcactaacattgtcttggccaaaacragtaacatgacaaagccaacatcaacaagacgggaaaatatactcttttttgtgggagatgttacaaaaacacatgactgaaatacggatgtataatttaattcaggtaaggaggctagaattgatgacaaatattcaatgtgccatagttggttttgcttttatatccaatataaacatcttttttaatagatgtgtctaccattttatgtttattaatattactgatttatttggtcttagatttgtcacattactttattgtgtcttccctattaatagtttttctaataattttccttttgcatgtaatggtctaaagaactattaagagtcgagattttattttccatgcaagctaacaatgtagcctgccacagtttcatagatactggcaaaacacatgagaatccttagtcaaagacaaaagagagtttattactcacagcaataatagtaactagagtatcaacatttgtgccagctgtgtgatgctcaattcccagagtgtgataccaagggagccagatgatacctgcacacatggcagaatgcatgacaggcaaggaatcctgaactttggggacctgaatctttcataattcctgtctgacttttgagctggagggagacattatgtttactgtggtagagagtaagcaaacattccttttgatatgaaaggagacattatttttattttccaaggttgtttgctatgcaaacatccatgaaaatgtagtctggagcaaggtcagtcaatgctttttcttggaggacatgcagaaacacgtgaaacaaaagacccatggaaaattgtataccaatatcttgcctacttgcttttttctaaaagagtgtatggttattttaatacttaggaatatttacatttttttctagtgatttcttttggatttggaattttatgtaacatattactctcttatttcttcagataatatctctttactactataaggggttttaaaataagagatttcctcttactttctgttcttcctgtctcctctaccgcatgattttaacaaacagtattatcttcttaatgtttacctttgtaatattaaatatacatgattttcctcagctttaaatgatgttctttaacttcatagcaaatgtattataggcaaggcaatatatatgtttgcatttcctctatcctttccatttctcacttttatggtggttatactgttttttttctgcattttcagagtgtatcgattttacatctgatattttcttctgatccccatatttgttttgcttttaatttttctgtccaatatattcagctcccactaccaaaccttttaccacaattttctgtcatgtctggtttagttgaagtttgagctccagaattttcttcaagaaaaatgcacggaaacaatattttggagttcctgaatgtttaaaactgtttttcttcagttttcatacttagagaatcatttagatgaatataaaattcatcttataaaatgttgcaccattatcttttggcactggtgattgttgtgaagaaatccaatgtaagtgtaattttcaccctcccccattatagttgacctatttttttcgactgatttattacagaattttttcttcatctttgcagttcagaatttcattaggatatgtcttttgctgactcttctgggaccatgttctctgatgcatggcaagtgttgttaaaaagtcttctttttgttcagagtaaatttcctgaattaaatagttgtggccgggcgcggtggctcacgcctgtaatcctagcactttggaaggccaaggcgggaggattgcctgagctcaggggtctcataccagccttggcaacaccgtgaaaacccctctactaaaacacaaaaaaattagccaggcgtggaggcatgcgcttgtattcccagctactcgggaggccgaggcaggacaattgcttgaacccggaagacggaggttgcagtgagccgagattgcaccaccgcactcccgcttgggcgacagagggagactctgtctcaaaaaaaaagaaaaaaaaaagttcttctactccttgcattttaaagtcttctaaaaaatcttttttttgttttttatgtaatttactatttttgttttctatgtactttgttgtacattctgaagacccttaactcacccagtttcatcttcatgttggtgattcttgtaaaattctgttattttctgagttccatcattttatattttatatcctcctgctgtttttctctttcctgaaatcttgtatttctcttttgcattcttatttcataaaggagatttctttgttttttaatttataaggaaatatttgtttgttttttatctgttctatggcaaatttttttctagtaaattttatgtccctgacaaccaccattctactctgtttctatgagtttgactattttagataaacgcagaatcacatagtatttgttctgtaaccggtttattttacttggtataatgtcctccaagttaacttaccttggcacctatggcaggatttccttcatttttaaggctgaatattatttcattt

SEQ ID NO: 77161 - DNA, 3371 bp, Homo sapiens
tttctctcatagtgaaagaggcaaaacaaatatttaagagccacttgtgtttctttttctatgaacttgcaattcttatcctttggctgtttttgtattggttgatcttttaccaatcaattgagaggaaaattttagttactaggaaagagttttctgtctctggtagttgtaaatctttttccagattatcatttttcttttaactttgcttatgattgttttgatatttagggttgttttttgtagctaaatatactgatcatttcttttatggttttaaaattaaaatatagtttaacagtcttcaattccgacgttataagtaatttctcctaagctgtctagttttttttttttgtaaagattgatccatttggaatgtatactgatgaatgttatgaggtaagaatctaattttttttcaggtagctacacaattattcccaatttattgagtagttcttgtttttctcacagatctcagaatttataacagcaaacattatttttcttgctctcaagactgtcacttgcagttctctagtgctaagtgggaccagaagggcttcgttctaagttcacaacctagaacctgaattaggttcagatctgttccaattgttttctaattctccttttgtatcagccgatacctgggacattttcttctaataaatcacaagagcagatgaggacaagccgaactacacagcatgtttttaatgcctctgtttatttcatattcactaacattgtcttggccaaaacgagtaacatgacaaagccaacatcaacaagacgggaaaatatactcttttttgtgggagatgttacaaaaacacatgactgaaatacggatgtataatttaattcaggtaaggaggctagaattgatgacaaatattcaatgtgccatagttggttttgcttttatatccaatataaacatcttttttaatagatgtgtctaccattttatgtttattaatattactgatttatttggtcttagatttgtcacattactttattgtgtcttccctattaatagtttttctaataattttccttttgcatgtaatggtctaaagaactattaagagtcgagattttattttccatgcaagctaacaatgtagcctgccacagtttcatagatactggcaaaacacatgagaatccttagtcaaagacaaaagagagtttattactcacagcaataatagtaactagagtatcaacatttgtgccagctgtgtgatgctcaattcccagagtgtgataccaagggagccagatgatacctgcacacatggcagaatgcatgacaggcaaggaatcctgaactttggggacctgaatctttcataattcctgtctgacttttgagctggagggagacattatgtttactgtggtagagagtaagcaaacattccttttgatatgaaaggagacattatttttattttccaaggttgtttgctatgcaaacatccatgaaaatgtagtctggagcaaggtcagtcaatgctttttcttggaggacatgcagaaacacgtgaaacaaaagacccatggaaaattgtataccaatatcttgcctacttgcttttttctaaaagagtgtatggttattttaatacttaggaatatttacatttttttctagtgatttcttttggatttggaattttatgtaacatattactctcttatttcttcagataatatctctttactactataaggggttttaaaataagagatttcctcttactttctgttcttcctgtctcctctaccgcatgattttaacaaacagtattatcttcttaatgtttacctttgtaatattaaatatacatgattttcctcagctttaaatgatgttctttaacttcatagcaaatgtattataggcaaggcaatatatatgtttgcatttcctctatcctttccatttctcacttttatggtggttatactgttttttttctgcattttcagagtgtatcgattttacatctgatattttcttctgatccccatatttgttttgcttttaatttttctgtccaatatattcagctcccactaccaaaccttttaccacaattttctgtcatgtctggtttagttgaagtttgagctccagaattttcttcaagaaaaatgcacggaaacaatattttggagttcctgaatgtttaaaactgtttttcttcagttttcatacttagagaatcatttagatgaatataaaattcatcttataaaatgttgcaccattatcttttggcactggtgattgttgtgaagaaatccaatgtaagtgtaattttcaccctcccccattatagttgacctatttttttcgactgatttattacagaattttttcttcatctttgcagttcagaatttcattaggatatgtcttttgctgactcttctgggaccatgttctctgatgcatggcaagtgttgttaaaaagtcttctttttgttcagagtaaatttcctgaattaaatagttgtggccgggcgcggtggctcacgcctgtaatcctagcactttggaaggccaaggcgggaggattgcctgagctcaggggtctsataccagccttggcaacaccgtgaaaacccctctactaaaacacaaaaaaattagccaggcgtggaggcatgcgcttgtattcccagctactcgggaggccgaggcaggacaattgcttgaacccggaagacggaggttgcagtgagccgagattgcaccaccgcactcccgcttgggcgacagagggagactctgtctcaaaaaaaaagaaaaaaaaaagttcttctactccttgcattttaaagtcttctaaaaaatcttttttttgttttttatgtaatttactatttttgttttctatgtactttgttgtacattctgaagacccttaactcacccagtttcatcttcatgttggtgattcttgtaaaattctgttattttctgagttccatcattttatattttatatcctcctgctgtttttctctttcctgaaatcttgtatttctcttttgcattcttatttcataaaggagatttctttgttttttaatttataaggaaatatttgtttgttttttatctgttctatggcaaatttttttctagtaaattttatgtccctgacaaccaccattctactctgtttctatgagtttgactattttagataaacgcagaatcacatagtatttgttctgtaaccggtttattttacttggtataatgtcctccaagttaacttaccttggcacctatggcaggatttccttcatttttaaggctgaatattatttcattt

SEQ ID NO: 77162 - DNA, 588 bp, Homo sapiens
aatataaaagtataaagttgttttgctcacttcagcagcacgtgaactaaaattggaatgatacagagaagattagcatggcccctgcacaaggatgacacacaaattcatgaagcatttcattttaaaaataagtataaaattgtttaaacaagcgttttaggactggaaatcaaccaaaagcaaataataaactaaaaagggtctattcatgaaatctacccaaatgtcatataagaacagcaagagtctgaacttactgattatttccttctatcatctcacatctatagacatagatagatgagtagaaattatcctttctgcagccaggcgaggtggttcacacctgtaatccctgcactttgggaggccgaggcaggtggatcacctgaggtcaggagttcgagaccagcctggccaacaatgatgaaaccccacctctactaaaaatacaaaaattagtcgggcatgatggcgggtgcctgtaatcccagctacttgggaggctgaggcaggagaatcacttgaacacaagaggcagrggttgcagtgagccaagatagtgccactgcattgtgggcgaca

SEQ ID NO: 77163 - DNA, 842 bp, Homo sapiens
tgaggtgggaggattgcttaagcccaggagtttgaggctgcagtgagctatttcagcctgggaaatagagaaccatcccaataagaagaaagaaaagaaaaagagagagaaagaaagagagggagggagaaagaaacagaaagaaagagaaaggaagaaagagaaaagaaggaaaggaaaggggaaaggaaaacagaaagggaagggaaagggaaagggaaagagaaagagaaagagaaagagaaagagaaagagaaagagaaagagagaaagggaaagagaaagagaaagagaaagagaaagagaaagagaaagaatttatttctcacatttctggatgctaggaagtccaagatcaaggtgccagccaggtaggattcattttaagccctcttttcttggctcatgggaggccaccatctcacaatgtgcccatataacctcttctttatgcagacgcaaggaggcaagggcagggaggggaagagagagagtgcacgcatggaagggagagaacacttttgtgtctgttcttataaagacacaaatcctattggatcaggacccaacccttgtgacctcagtaatcttaattacttccttagaggtccatctccaaatgcagccactctaggggataggaattcaacataagaatttggaggtgggrggacacaaacattcagtccataacaaacattcaactgtttgagtaattcagagtggggctcaaaatgtaaaacattttgatgaatcacgttaattgtcatgttgataatgtgccacatcatacattttaatgtagcattatttgtgattaattctcttacctttgttttttt

SEQ ID NO: 77164 - DNA, 691 bp, Homo sapiens
ccctcttcccttctgaggacagtaataaaaaataaaaatggagtgatcttagccacataccttggggtggctgtgcagagccataaagatgaaagaaaggcctgcctgtctccctccttccttcctttccttgtttaaaaaaaaaaaaaagtattttggatacttaaaaacactaaaaacatgcagaataatttttaattttcaacatttctgaaaatgtcagtcctttactatttttaacagctaggycccttgtcgtaacttcaacttttatttttagaattataaagagcacaatacataaatacattctcactgttcttactgtcaaagatccaagcaagactgaagttagatatatattaaaaatattaaaggctttctttatattctctttccactttcatcctcagacttctaaaaatgtgctatgggtcctcttacttctaaaaatgtcctctttttgtgtgcctttgctgcacggatactcacacacactgcgttagagtctattgctacataacaaatgaccccaggacatagtggtgtaaaacaaccaatacttattttctcagagtttccgctggtcagaaatctggatggagcttagctgggtgcatctgactctcatgaggtttcagtcaagctgagagctggggctgttgtctcatctgaaaactcaactggaaga

SEQ ID NO: 77165 - DNA, 691 bp, Homo sapiens
ccctcttcccttctgaggacagtaataaaaaataaaaatggagtgatcttagccacataccttggggtggctgtgcagagccataaagatgaaagaaaggcctgcctgtctccctccttccttcctttccttgtttaaaaaaaaaaaaaagtattttggatacttaaaaacactaaaaacatgcagaataatttttaattttcaacatttctgaaaatgtcagtcctttactatttttaacagctaggtcccttgtcgtaacttcaacttttatttttagaattataaagagcacaatacataaatacattctcactgttcttactgtcaaagatccaagcaagactgaagttagatatatattaaaaatattaaaggctttctttatattctctttccactttcatcctcagacttctaaaaatgtgctatgggtcctcttacttctaaaaatgtcctctttttgtgtgcctttgctgcacggatactcacacacactgcgttagagtctattgctacataacaaatgaccccaggacatagtggtgtaaaacaaccaatacttattttctcagagtttccgctggtcagaaatctggatggagcttagctgggtgcatctgactctcatgaggtttcagtcaagctgagagctggggctgttgtctcatctgaaaacycaactggaaga

SEQ ID NO: 77166 - DNA, 935 bp, Homo sapiens
agagctggcttcaaaccccactgccatggtcataggaggagaaaaccctcccttcagcatgtgctagatggcaggtgaaattcaacaatcaccatctgaacccatcacatttttggcagtattttttctgtcacttctggtccttacactatcaattttgggggccatcctggagtgtcccctggggtgaaggaggtcctggaggcctacctaccaccccacagtagaccagcagagggagagaagggcaaacaggggccaggcttccaccacccttgcgaagcctggtatgcttaggaagaagaacttcacttgggcctttatcaaccattatagtcaaggtcaggactatggtgcaagcagaatttaggrctgccccaagtctcaggaatcaaataatattgtaatgtagtagtttagaaaatcagattaatgaaggaaataacaaaatttgaagtaaagatacagtcaggatgactcattttttttctttttttctttttgcctcagaatccaacatgggtctgtgctgctcctctcagcttgaggtttgggttgagccatggaattgcccctctcctgatagataagataggaaaacagtggctcagagatattaaatgacttgttcaaggatatgaggcaggttttgggaaaggacaaaatttgtccagtctgctaatacctcattcaaccatactggcagaaaggggaggtcaaaagagagagctcagagaaaagaaagaagaccccacagcacacctgcctggggaaagatccctgtgtgccctgaacacaaagggtaggggactgtcctgcagtgaggaatgacagtggtgccccaagatcatgcatgttggcaagtctggcccaggcaaggttgacccttgttcttggctccatatactctggaaggcattgctggcatccaggca

SEQ ID NO: 77167 - DNA, 1263 bp, Homo sapiens
aaaatgtggtctagggtttggtgccaggggccatctctccctgagtccctgagtgttcctgtggtgcagactgagaagtctcacccccaaagaaaacgggccaggtgaagttaggtaaacagaagaagaactgcacggtacagaccccatttttgctcctcttgtcacctgcctacagcctgtgagagattatcccgtgcattggggctgtaaaatattcattgatataaaaccttctggagtttgaagttcatagcctaattgaatcaaggagaaaccatccctggaatgttgttggaggttggggttactgtgaatcttgaagctgcttcagaggacgtctctgcttcgccttatttatgcctttgtgaattcttgttacatccccacagccaagttctccatttccayagagagtttcccaaaagttatccagctttgtcttggcctttccttgactcaagttcaccccttctgcagtgaggcagatgcaggcataaaacaacggacctccaaagagccaaatgggtcctctgggaggtcagccaaccttgatgttgcctcagaggtcacggcaaatgaactgtcatgctggctgagcacggctgagtgcatccagtgccagcagcgagcatcttttggagcggttcagaggtgaacgggcatggatccggcaactctggtgtgcagcgggcccagcgtttactcagtccagaagcacaggcagctgggaagccggtggtttccctcttctctccccttctccacggcaagctgcagttccctcacctcctgtttgtgccaagcaaccccccactcctgcagcatgagggagcacctcattacctaatactttttaggcaagtgaaagctttaaaaagtcactaaagagcattagagaacactttttcaaatgtcagcctatataatcccatcatcctagtggagcgccgttcttacgttatcttcagcctgcaaatttgcttgacattggggtgtattattgttcattcttttttcacaatattacaacacatttctccaggtttctgtggtctttcttcaccctcttaaagttgctgtcgttgtaatgtgattcatcagaccattggcctaatagtagacagtcaagtcatttctgtttgttggctaatatagatatgcaaagggaaacatctataaggatatagcttttagtttgtttaattattgacttagagttaattcctaaggagttgccgaatcaaaggatgtgaatctctt

SEQ ID NO: 77168 - DNA, 1263 bp, Homo sapiens
aaaatgtggtctagggtttggtgccaggggccatctctccctgagtccctgagtgttcctgtggtgcagactgagaagtctcacccccaaagaaaacgggccaggtgaagttaggtaaacagaagaagaactgcacggtacagaccccatttttgctcctcttgtcacctgcctacagcctgtgagagattatcccgtgcattggggctgtaaaatattcattgatataaaaccttctggagtttgaagttcatagcctaattgaatcaaggagaaaccatccctggaatgttgttggaggttggggttactgtgaatcttgaagctgcttcagaggacgtctctgcttcgccttatttatgcctttgtgaattcttgttacatccccacagccaagttctccatttccatagagagtttcccaaaagttatccagctttgtcttggcctttccttgactcaagttcaccccttctgcagtgaggcagatgcaggcataaaacaacggacctccaaagagccaaatgggtcctctgggaggtcagccaaccttgatgttgcctcagaggtcacggcaaatgaactgtcatgctggctgagcacggctgagtgcatccagtgccagcagcgagcatcttttggagcggttcagaggtgaacgggcatggatccggcaactctggtgtgcagcgggcccagcgtttactcagtccagaagcacaggcagctgggaagccggtggtttccctcttctctccccttctccacggcaagctgcagttccctcacctcctgtttgtgccaagcarccccccactcctgcagcatgagggagcacctcattacctaatactttttaggcaagtgaaagctttaaaaagtcactaaagagcattagagaacactttttcaaatgtcagcctatataatcccatcatcctagtggagcgccgttcttacgttatcttcagcctgcaaatttgcttgacattggggtgtattattgttcattcttttttcacaatattacaacacatttctccaggtttctgtggtctttcttcaccctcttaaagttgctgtcgttgtaatgtgattcatcagaccattggcctaatagtagacagtcaagtcatttctgtttgttggctaatatagatatgcaaagggaaacatctataaggatatagcttttagtttgtttaattattgacttagagttaattcctaaggagttgccgaatcaaaggatgtgaatctctt

SEQ ID NO: 77169 - DNA, 1263 bp, Homo sapiens
aaaatgtggtctagggtttggtgccaggggccatctctccctgagtccctgagtgttcctgtggtgcagactgagaagtctcacccccaaagaaaacgggccaggtgaagttaggtaaacagaagaagaactgcacggtacagaccccatttttgctcctcttgtcacctgcctacagcctgtgagagattatcccgtgcattggggctgtaaaatattcattgatataaaaccttctggagtttgaagttcatagcctaattgaatcaaggagaaaccatccctggaatgttgttggaggttggggttactgtgaatcttgaagctgcttcagaggacgtctctgcttcgccttatttatgcctttgtgaattcttgttacatccccacagccaagttctccatttccatagagagtttcccaaaagttatccagctttgtcttggcctttccttgactcaagttcaccccttctgcagtgaggcagatgcaggcataaaacaacggacctccaaagagccaaatgggtcctctgggaggtcagccaaccttgatgttgcctcagaggtcacggcaaatgaactgtcatgctggctgagcacggctgagtgcatccagtgccagcagcgagcatcttttggagcggttcagaggtgaacgggcatggatccggcaactctggtgtgcagcgggcccagcgtttactcagtccagaagcacaggcagctgggaagccggtggtttccctcttctctccccttctccacggcaagctgcagttccctcacctcctgtttgtgccaagcaaccccccactcctgcagcatgagggagcacctcattacctaatactttttaggcaagtgaaagctttaaaaagtcactaaagagcattagagaacactttttcaaatgtcagcctatataatcccatcatcctagtggagcgccgttcttmcgttatcttcagcctgcaaatttgcttgacattggggtgtattattgttcattcttttttcacaatattacaacacatttctccaggtttctgtggtctttcttcaccctcttaaagttgctgtcgttgtaatgtgattcatcagaccattggcctaatagtagacagtcaagtcatttctgtttgttggctaatatagatatgcaaagggaaacatctataaggatatagcttttagtttgtttaattattgacttagagttaattcctaaggagttgccgaatcaaaggatgtgaatctctt

SEQ ID NO: 77170 - DNA, 1263 bp, Homo sapiens
aaaatgtggtctagggtttggtgccaggggccatctctccctgagtccctgagtgttcctgtggtgcagactgagaagtctcacccccaaagaaaacgggccaggtgaagttaggtaaacagaagaagaactgcacggtacagaccccatttttgctcctcttgtcacctgcctacagcctgtgagagattatcccgtgcattggggctgtaaaatattcattgatataaaaccttctggagtttgaagttcatagcctaattgaatcaaggagaaaccatccctggaatgttgttggaggttggggttactgtgaatcttgaagctgcttcagaggacgtctctgcttcgccttatttatgcctttgtgaattcttgttacatccccacagccaagttctccatttccatagagagtttcccaaaagttatccagctttgtcttggcctttccttgactcaagttcaccccttctgcagtgaggcagatgcaggcataaaacaacggacctccaaagagccaaatgggtcctctgggaggtcagccaaccttgatgttgcctcagaggtcacggcaaatgaactgtcatgctggctgagcacggctgagtgcatccagtgccagcagcgagcatcttttggagcggttcagaggtgaacgggcatggatccggcaactctggtgtgcagcgggcccagcgtttactcagtccagaagcacaggcagctgggaagccggtggtttccctcttctctccccttctccacggcaagctgcagttccctcacctcctgtttgtgccaagcaaccccccactcctgcagcatgagggagcacctcattacctaatactttttaggcaagtgaaagctttaaaaagtcactaaagagcattagagaacactttttcaaatgtcagcctatataatcccatcatcctagtggagcgccgttcttacgttatcttcagcctgcaaatttgcttgacatwggggtgtattattgttcattcttttttcacaatattacaacacatttctccaggtttctgtggtctttcttcaccctcttaaagttgctgtcgttgtaatgtgattcatcagaccattggcctaatagtagacagtcaagtcatttctgtttgttggctaatatagatatgcaaagggaaacatctataaggatatagcttttagtttgtttaattattgacttagagttaattcctaaggagttgccgaatcaaaggatgtgaatctctt

SEQ ID NO: 77171 - DNA, 1263 bp, Homo sapiens
aaaatgtggtctagggtttggtgccaggggccatctctccctgagtccctgagtgttcctgtggtgcagactgagaagtctcacccccaaagaaaacgggccaggtgaagttaggtaaacagaagaagaactgcacggtacagaccccatttttgctcctcttgtcacctgcctacagcctgtgagagattatcccgtgcattggggctgtaaaatattcattgatataaaaccttctggagtttgaagttcatagcctaattgaatcaaggagaaaccatccctggaatgttgttggaggttggggttactgtgaatcttgaagctgcttcagaggacgtctctgcttcgccttatttatgcctttgtgaattcttgttacatccccacagccaagttctccatttccatagagagtttcccaaaagttatccagctttgtcttggcctttccttgactcaagttcaccccttctgcagtgaggcagatgcaggcataaaacaacggacctccaaagagccaaatgggtcctctgggaggtcagccaaccttgatgttgcctcagaggtcacggcaaatgaactgtcatgctggctgagcacggctgagtgcatccagtgccagcagcgagcatcttttggagcggttcagaggtgaacgggcatggatccggcaactctggtgtgcagcgggcccagcgtttactcagtccagaagcacaggcagctgggaagccggtggtttccctcttctctccccttctccacggcaagctgcagttccctcacctcctgtttgtgccaagcaaccccccactcctgcagcatgagggagcacctcattacctaatactttttaggcaagtgaaagctttaaaaagtcactaaagagcattagagaacactttttcaaatgtcagcctatataatcccatcatcctagtggagcgccgttcttacgttatcttcagcctgcaaatttgcttgacattggggtgtattattgttcattcttttttcacaatattacawcacatttctccaggtttctgtggtctttcttcaccctcttaaagttgctgtcgttgtaatgtgattcatcagaccattggcctaatagtagacagtcaagtcatttctgtttgttggctaatatagatatgcaaagggaaacatctataaggatatagcttttagtttgtttaattattgacttagagttaattcctaaggagttgccgaatcaaaggatgtgaatctctt

SEQ ID NO: 77172 - DNA, 1263 bp, Homo sapiens
aaaatgtggtctagggtttggtgccaggggccatctctccctgagtccctgagtgttcctgtggtgcagactgagaagtctcacccccaaagaaaacgggccaggtgaagttaggtaaacagaagaagaactgcacggtacagaccccatttttgctcctcttgtcacctgcctacagcctgtgagagattatcccgtgcattggggctgtaaaatattcattgatataaaaccttctggagtttgaagttcatagcctaattgaatcaaggagaaaccatccctggaatgttgttggaggttggggttactgtgaatcttgaagctgcttcagaggacgtctctgcttcgccttatttatgcctttgtgaattcttgttacatccccacagccaagttctccatttccatagagagtttcccaaaagttatccagctttgtcttggcctttccttgactcaagttcaccccttctgcagtgaggcagatgcaggcataaaacaacggacctccaaagagccaaatgggtcctctgggaggtcagccaaccttgatgttgcctcagaggtcacggcaaatgaactgtcatgctggctgagcacggctgagtgcatccagtgccagcagcgagcatcttttggagcggttcagaggtgaacgggcatggatccggcaactctggtgtgcagcgggcccagcgtttactcagtccagaagcacaggcagctgggaagccggtggtttccctcttctctccccttctccacggcaagctgcagttccctcacctcctgtttgtgccaagcaaccccccactcctgcagcatgagggagcacctcattacctaatactttttaggcaagtgaaagctttaaaaagtcactaaagagcattagagaacactttttcaaatgtcagcctatataatcccatcatcctagtggagcgccgttcttacgttatcttcagcctgcaaatttgcttgacattggggtgtattattgttcattcttttttcacaatattacaacacatttctccaggtttctgtggtctttcttcaccctcttaaagttgctgtcgwtgtaatgtgattcatcagaccattggcctaatagtagacagtcaagtcatttctgtttgttggctaatatagatatgcaaagggaaacatctataaggatatagcttttagtttgtttaattattgacttagagttaattcctaaggagttgccgaatcaaaggatgtgaatctctt

SEQ ID NO: 77173 - DNA, 502 bp, Homo sapiens
tgccccgaggcctggggagcccccagctcacccatctgtagctccctcaaagtcagggcccaccccatctgaggcagagaagactygagtccagcccccaggaagcctgctcccctctctggcccatggtcctgcttcatgctttgggtcaggaggccaaagctgatgttcaggccccacccactccctacagtcctcagaccaaggaggggtttgggtagtaggcccgagctgcattgccggccttcctcgggccaactggcagcccaggagtggggaggctttggccagggatgctgccacttgtgcgtgagtccgcggctggcccttggaggtgaccatccaggcaggcctggctcagactggaagggctggggaccgagggctcccctgcctctgttctcctttctgacccactgggatttgctagcaggctgccccagccccatcaccgaaacacatactcaagagctcaaataccactgctcccaccagcgtacgg

SEQ ID NO: 77174 - DNA, 1959 bp, Homo sapiens
caaatgtaatttgtttgtaacacaaaggataaatgcttgaggggatggatacctcattctccatgatgtgcttatttcacattgcatgcctgtatcagaacgtctcatgtaccccataaatatttacagctactatgtacccacaaaaattaaaaatttaaacatttttaaaaattaaaatgaaaacaaaatgtcagatgcaaattgtcagcaagttaagaattttgtataatgctaataaatggaagacccagacttggactttaggatggcaaatgcctttgttaaactctgaaagtaatggccctgctattttatccttctagagaatgtgatcttcagccatccatgacaatcaatactctacttcagtaaaggcaataatctgtgtgctcatcagttcatccttcaccagccgtctcacacataccctctctttttacatgacaaagagtaattgccctactgagacttccctgggatttctttgcttggtcaatagcatttaccggtggtggcagagcaagaaaagtatcttagaaacagaactctctcaaggcctgtgatgctaacggccaccacctcccaaggctagaggcattattaactagaggtaagcaggaggaaatgaaggtagattagtagttgccaggagctggggatagggagtttccttaggggtgatgaaagcattctagaattagatagtggtgatggttgcacaaccttttgaatgtactaaaaatcactgaattgtacactcaaatggatacattttattgaattatatatcaattaaaaaatttttttaaagaactgaataacaagagaggtcaaataacacttcagaaagacttatcttattggtcatcgttggatttcttttttttttcagcttttaagtttaggggtcacatgcacgatgtgcaggtttgttaataggtaaacgtgtgccatggtgatttgctgcacagatcatcccatcacctaggtattaagcccagcatccattaactatttttcctgatgctytccttcctctgaccctcaacccccagtcagctctactgtgtgtttttcccctctatgtgtccatgtgttctcatcattcagctcctacttctaagtgacaacatgcggtatttggttttctgttgcttcattagtttgctgaggatagtgacttccaactccatccatgtccctgcaaaggacataatcttgttcttttttatagctgtatagtgttccgtggtgtatatgtaccgaattttttttttatccagtctatcattgatgggcatttaggttgattccatgtctttgctaggatttcatttttatttttgtcccctaaattgtggagttttctagttcatcagtaatgtggcatttgatgtgatggattcatttagtaacagggttgctagtagtaatcaaagctttcttctctggctaaaggtaaccagtagaattggtcattgtgattgtggttaattcagtctgctcagcacagcactatcagaagtggaagcttcctctttggaataatgtagagtgaaccagggtaggatattatattctgttcttgtaataggaagcttcatttttaagaagtcagttgtgttttcagagagaatccatacttgtcttttaaaatattttgtcatcagttctagcaaaagtctaaatcagtagtttctaaaggatttcttcaaaggctaaaactcagttgagagtaatatattaagccattcttgcatgctataaagaaatacctgagactgggtgatttataaagaaaagaggtttaagtggctcacagttctgcaggctgcacaagcgtggcaccagcattgctcaccttttggaagacctcagggagcttttactcatagcagaaggcaagacaggagcagggcatatcacactcatagacaaccagatctcatgtgaatt

SEQ ID NO: 77175 - DNA, 2061 bp, Homo sapiens
cctctagatcagaggtcggtaaactttgcccataaagatagaaaatattttaggctttgtgggccataaagtgtctgttgcaactattcaactttgccaaaagcagccacagacaatacataaacaaatgggtgtggctgtgtgccaatagtactttgtggacaccraaatttgaatttcacatcattttcacacatcatgaaatatcctgctttttgaatttttccaaacattccaaagtgttaaagccattcttatcttgcaggccatacagacaataggcagtgagctgattttggcttgaagacagtattttcgagccttggctctagatcagtggtttgtgcactcctttgaccgtgactgtgagcaaataatttaattgttttttttttgtttgttttttttttttttttgagacagagtcttgctctgtcgcccaggctggcgcgatctcggctcactgcaagctctgccccccaggttcatgccattcccctgcctcagcctcccgagtagctgggactacaggcacccgtcaccatgcccggctaatttttttgtatttttagtagagacaggattttatattaaacctagaacatacgtaaacacacatacacatatgtaattaaagctgaagtttcataaaacagttcttatgttttctctgaactgtaaactctggtgttctcattttcatcctccttgattttgttttgaaatgctgtcgtgatccattgacttgtttctccagtccccaatgggtcatgccgcttctggttggaaagccctgctgtggatccattgaagtctgtgctcttggtggtggcgggtttgcagtcacagtggctgttttgtattcatcagctctgacgttacttggaatttgtcagtaaataacataaagaccaaaaaaagatgctatcacaaacctgtcaagggcagcatgacaggattgcctgcctcaacctgcctggcaccaggtgtttcaggaaatttcagatggctccctgtcgttcttgatgtgtgatgcatgcatttcatttgaactgagcagaattcagagcaaagagagaatttaaagtaactgcaagtcccagcctgaaacctcgcgtttggcaattttgaagagactgtgggccatttacattatagccatgtttgtcaccagctgaggtatttgaaaagtgtgacaatttcaaatagcagccctctggtatatctcagccaagtattaaggtagactagaccatggttggctttaaaaaaaacaaaaaaaaaaaacaaaccttcactgtgattagaggacaaaagctcgaatgctcagtatatttttcgaatccaggacagcttcgcacacctccccttgcagttcagggttcaggactcagctctggaaaacagggactagatgaaacttgcctttgtcatttcccactgtccatttccctcttgtcactcttctctgacctctcagtcttgccttcctatctagattttaaaggtgtggtgagggaggcagggagggaacactttgaaatccttttaaaaggccaggcaccctggcacatgcctgtaatttccagcagtttgggaggccaagctggggccattgcttgaggccaggagtttcagacaagcctggggaacatagcaagaccccatctctacaaaaattaaaaaataatgaaattcgcctttggcctcattgcactcctgacagcaagatgggtcaccagcagctatactggagccacctgtgaaaattcagccagggttctcattcttgtcgtgtctgttcaaacgggcatggtctgatctggaaatatggcctcaatatgtgccgccagtgtttccgtcagtaagcgaaggagatcggtttcattaagttggactaaatgatcttccttcaaaggattatccaaggcatctactcaatgaaaacccacgatagttcttgtacttaaaataaacatttgaaaaaaaataaataatgcaattctattgaaagacttcatgcttattcctattctcagtattctcctcccatctcccatt

SEQ ID NO: 77176 - DNA, 2061 bp, Homo sapiens
cctctagatcagaggtcggtaaactttgcccataaagatagaaaatattttaggctttgtgggccataaagtgtctgttgcaactattcaactttgccaaaagcagccacagacaatacataaacaaatgggtgtggctgtgtgccaatagtactttgtggacaccgaaatttgaatttcacatcattttcacacatcatgaaatatcctgctttttgaatttttccaaacattccaaagtgttaaagccattcttatcttgcaggccatacagacaataggcagtgagctgattttggcttgaagacagtattttcgagccttggctctagatcagtggtttgtgcactcctttgaccgtgactgtgagcaaataatttaattgttttttttttgtttgttttttttttttttttgagacagagtcttgctctgtcgcccaggctggcgcgatctcggctcactgcaagctctgccccccaggttcatgccattcccctgcctcagcctcccgagtagctgggactacaggcacccgtcaccatgcccggctaatttttttgtatttttagtagagacaggattttatattaaacctagaacatacgtaaacacacatacacatatgtaattaaagctgaagtttcataaaacagttcttatgttttctctgaactgtaaactctggtgttctcattttcatcctccttgattttgttttgaaatgctgtcgtgatccattgacttgtttctccagtccccaatgggtcatgccgcttctggttggaaagccctgctgtggatccattgaagtctgtgctcttggtggtggcgggtttgcagtcacagtggctgttttgtattcatcagctctgacgttacttggaatttgtcagtaaataacataaagaccaaaaaaagatgctatcacaaacctgtcaagggcagcatgacaggattgcctgcctcaacctgcctggcaccaggtgtttcaggaaatttcagatggctccctgtcgttcttgatgtgtgatgcatgcatttcatttgaactgagcagaattcagagcaaagagagaatttaaagtaactgcaagtcccagcctgaaacctcgcgtttggcaattttgaagagactgtgggccatttacattatagccatgtttgtcaccagctgaggtatttgaaaagtgtgacaatttcaaatagcagccctctggtatatctcagccaagtattaaggtagactagaccatggttggctttaaaaaaaacaaaaaamaaaaacaaaccttcactgtgattagaggacaaaagctcgaatgctcagtatatttttcgaatccaggacagcttcgcacacctccccttgcagttcagggttcaggactcagctctggaaaacagggactagatgaaacttgcctttgtcatttcccactgtccatttccctcttgtcactcttctctgacctctcagtcttgccttcctatctagattttaaaggtgtggtgagggaggcagggagggaacactttgaaatccttttaaaaggccaggcaccctggcacatgcctgtaatttccagcagtttgggaggccaagctggggccattgcttgaggccaggagtttcagacaagcctggggaacatagcaagaccccatctctacaaaaattaaaaaataatgaaattcgcctttggcctcattgcactcctgacagcaagatgggtcaccagcagctatactggagccacctgtgaaaattcagccagggttctcattcttgtcgtgtctgttcaaacgggcatggtctgatctggaaatatggcctcaatatgtgccgccagtgtttccgtcagtaagcgaaggagatcggtttcattaagttggactaaatgatcttccttcaaaggattatccaaggcatctactcaatgaaaacccacgatagttcttgtacttaaaataaacatttgaaaaaaaataaataatgcaattctattgaaagacttcatgcttattcctattctcagtattctcctcccatctcccatt

SEQ ID NO: 77177 - DNA, 682 bp, Homo sapiens
ggatccaacacacattggtaaccagggccattatagcactcaagcttctggtatatttctttattccagtccatcttgctgaatccctctgtttcctacctgtgagtgcccctctatgaatgctgatttgattccaggtactatactaggctgtggagtcagagatgaccaagatacagccttgctctcagtattttttgatggaagaatgatgatatgcacatacacgaatacagagcaaagcagtaggtggcaagtgattaagcaagycactaaatcttatgaaagcacagaggggaatatttagaagtaaactctataaaaataaaaattctgaactacctaataagaatattactaactctaccaagttgaccaattaaattatttaatcagttaatatttgattctgtttttaaccttcccttaaatatatggcttaaagactaaacttccagtaaattttttctaagtaatgtactctttctctgactcattatttcatttattgatatcttattttgactctagcaatgtctgtaaccattaaagttctgtaaataaatgcagtcttttgactatagtacataagacaacatccctctttgtaaataccccaaccccttattagaaactatattgaggccaggtgcggtggatcacgcctgtaatcccagcactt

SEQ ID NO: 77178 - DNA, 877 bp, Homo sapiens
gtgtccctgaataaaggttctggatctattctgagtatcccagactcaaactgcatctcgttaacatctttcatttgaactgttaaaatctgttaacaaatagttaaagacaaactaatgtataaatacaggtttccacttgcaaaatgggcctccacaaagattaccagttttattcaattttttgaaatattaagtaattttctaatgagaattaatggcctgcccaaatattaccaagccaataatttcagttcaagttattaaaaactgatatggtaggctgggcatggtggctcatgactgtaatcccagcactttgggaggctgaggcgggtggaccacaaggtcaggagtttgagaccagcctggccaacatagtgaaacccccractctactaaaaatacaaaaattagccgggcatggtggcgcacgcctgtagtcccagctactcgagaggcttaggcaggagaattgcttgaacccgggaggtggaggttgcggtgagctaagttcaggccactgcactccagcctgggcaagacagtgagactctgtctcaaaaaataataataataaataaacataaaaataaaaactgatatggtaatgcctaaaatatttttaggggataaggccacaaaataacctggattttcatattaagccaccaactcttcatgtagaagagagtaaaggtggttaaaaaaaagggggggaatgcctaaacacatgggcaaaattattttcccctttaagatctaataaggctaacccaaaaaacctagagactgtatgtgtgcatgtgtccaaatgataaaagttagagacttgcagatccaatttaaatgaagcaggaggagtttgtgctatgca

SEQ ID NO: 77179 - DNA, 1012 bp, Homo sapiens
cttttcaaattaagtttttcatccagccctgtttgtacaaagcmctttggcagaggtgctctcttctatctcagggaaaatccaaaaagctttgtttaattaacagatattaaagggttcagatgatgaaaacataaattcagtgaaagcatcgttgtcgtgatgcagtcagatcagctaaaccctcggctgtcatcagctcaatttcttagtatgtttggttggggtcctatctcttcatttttatagattattttcttacatctactatcctatgactgttatgggaaagacttcttaggtataagatatcacccccttattctaatgtaggaactgcttctgaccctttcattccattcttgccagcattcacagcatgaaatgtgattattttattacttaattcctttctttccacacacccatttccacttctattttcccatctttcattttgtcctcacatatttgttactttgtgttttatcttcttgtgagttctaagtgagacagccaagtagaaccagatggttaaaaatagtttctgacattatttgtgattcttcagaggtagtcttgcaaatcactttttctcatttgatttttacctaacatgctgacagtgctccaatcttgtttcttgattatcctattacatagtgccttcctttgcatttagtaaaaacatacaagcaatggttctgtttggatagtgcaacctagttatcatttacaattttatggaattagaaaggcaagaggaggaaaggattgagacttaaattattatttaaaaggaaaagcatgaattaactacattggtgataggtggaaccattctttgtaagcaggcctataattgagccatctttgtgatcatgcaatggaagagcattctttttcttacctagaaagagcactgttcctcatataaaggagcaatgcaattgaaatgcagccacaaagaggtagacaaactcaattggctgcccactgggatacaatttca

SEQ ID NO: 77180 - DNA, 1012 bp, Homo sapiens
cttttcaaattaagtttttcatccagccctgtttgtacaaagcactttggcagaggtgctctcttctatctcagggaaaatccaaaaagctttgtttaattaacagatattaaagggttcagatgatgaaaayataaattcagtgaaagcatcgttgtcgtgatgcagtcagatcagctaaaccctcggctgtcatcagctcaatttcttagtatgtttggttggggtcctatctcttcatttttatagattattttcttacatctactatcctatgactgttatgggaaagacttcttaggtataagatatcacccccttattctaatgtaggaactgcttctgaccctttcattccattcttgccagcattcacagcatgaaatgtgattattttattacttaattcctttctttccacacacccatttccacttctattttcccatctttcattttgtcctcacatatttgttactttgtgttttatcttcttgtgagttctaagtgagacagccaagtagaaccagatggttaaaaatagtttctgacattatttgtgattcttcagaggtagtcttgcaaatcactttttctcatttgatttttacctaacatgctgacagtgctccaatcttgtttcttgattatcctattacatagtgccttcctttgcatttagtaaaaacatacaagcaatggttctgtttggatagtgcaacctagttatcatttacaattttatggaattagaaaggcaagaggaggaaaggattgagacttaaattattatttaaaaggaaaagcatgaattaactacattggtgataggtggaaccattctttgtaagcaggcctataattgagccatctttgtgatcatgcaatggaagagcattctttttcttacctagaaagagcactgttcctcatataaaggagcaatgcaattgaaatgcagccacaaagaggtagacaaactcaattggctgcccactgggatacaatttca

SEQ ID NO: 77181 - DNA, 693 bp, Homo sapiens
cctagtccatttctacaactgtgcatatgaaataatatttataccatcacattggtctaagaaaagtacatgactccttgcagcatttttacgttgtggcctttacaacgtcaataacaatcttcaagtgtattcattcaaaacatacatgtctgtttagtaaccactatgtggaaagtcctccaccatccattagagatatttaaagatgaatgagatgcaatctttgccatcaggcaggtaaacaactagcttgaatgcaatcacccagcacaaatggtggtaactggcagagtcttcaatgcagaaatgatttatctggtataagtgtatactgtgtcacagcatataattcctaagtgccctgttctgctctgctgagagatttctaatcaaaatctgctttgttctcatttaagtagaaggtagatttgctacaaaactttgctcgaatggagctggatttatgacaatgtcaataaaataatgcaaaggaaagtccagagcaagaggagctgcaactaaggtttctaactgagaagaaattccmcagttccctcacatttactcttccctctccattccaagaaaaaggaaaagaaaaaaaaaaaagtgactctgaattgctttctttccctcaccagcaattcattcaagaaacattcatcaagcacctcctttgtgtcaagaaat

SEQ ID NO: 77182 - DNA, 693 bp, Homo sapiens
cctagtccatttctacaactgtgcatatgaaataatatttataccatcacattggtctaagaaaagtacatgactccttgcagcatttttacgttgtggcctttacaacgtcaataacaatcttcaagtgtattcattcaaaacatacatgtctgtttagtaaccactatgtggaaagtcctccaccatccattagagatatttaaagatgaatgagatgcaatctttgccatcaggcaggtaaacaactagcttgaatgcaatcacccagcacaaatggtggtaactggcagagtcttcaatgcagaaatgatttatctggtataagtgtatactgtgtcacagcatataattcctaagtgccctgttctgctctgctgagagatttctaatcaaaatctgctttgttctcatttaagtagaaggtagatttgctacaaaactttgctcgaatggagctggatttatgacaatgtcaataaaataatgcaaaggaaagtccagagcaagaggagctgcaactaaggtttctaactgagaagaaattccacagttccctcacatttactcttccctctccattccaagaaaaaggaaaagaaaaaaaaaaaagtgactctgaattgctttctttccctcaccagcaattcattcaagaaacattcatcaagcacctcctttgtgtcaaraaat

SEQ ID NO: 77183 - DNA, 664 bp, Homo sapiens
cctcaaacttctgggctcaagagatactccagtctcagcctctagagtcactgggattataggcatgagccactgcactgggctttttgctcattttagaaggccatttttaattcaagttcactttagcaatatttatatccggccgggcgcagtggctcacgcctgtaatcccagcactttgggaggtcaaggcgggcggatcatgaggtcaggagatcgagaccatcttggctaacacggtgaaaccccgtctctactaaaaatacaaaaaaaaatacaaaaaaattaaccaggcatggtcggcgggcgcctgtagtcccagctactcgggaggctgaggcaggagaatggcgtgaacccgggaggcggagcttgcagtgaacggagatcgcgccactgcactccagcctaggcgacagagggagcctccatctcaaaaaaaaaaaaaaaaaaaaaaaaaatttatatcctaccaatggactgggaccccaaaatgtgctgtgattgctctatccacatggtggaggaattggggcaaagttttagtttgttcccatgaaaggactaagaaaatgcagagcaaaatacagaacaaaacttaaagmcctggatttgattcaccaacctctgtatttataaaacacattacctgattttaaga

SEQ ID NO: 77184 - DNA, 856 bp, Homo sapiens
agctagcattgagtggtaagcaaactgcaaaacttggaggagaaatgccagtgtcagtcacaaatgagggattgaaagctaagctctgaggctgctgcaggccctgtgtcctaattaaggaggctaaagctgtcccttgttgttagcatacgtaattccagaaatatataaattcaaatcccttttgaggaaggtgtcattaattcaggatttcaggattcctatagactatgtgaaaccaaatggataattatgatgaaaaaatccccaaatatacaaagaaacaaaagacataatgatgatatgagttaggactaagtttagcctcacacagcagaacaaacaaataatggtggcttagacacacacagttttatttgttttcatctaaaagacgtcatgagataggtgtccaggacagattcatcagaaattcatcagggacctgtttctttacagtttatgaatcatctcagatctacgttatgctccttgttcttgtgacccaagatggcagctagagctccagatgctcacattccaggccaattgtggaaggaaagggatgaagggcaggcctatttaaaaaaaaamaaaaccaaaacattctgaagtttgcacacagtactgccacttaaaatttattgtcaaaaatttaaccacaatgatcacatcttgatgtgaacaaaaactagggagttttaactggccaacaataagcttgactaaaaattagtattttccttactagcaagggagttggggaatggatgcttgttgtcaactgagtctctgacacagtaagtgtgtaatgagctagaaaatggcacccctgaatatctcagtcctaagccct

SEQ ID NO: 77185 - DNA, 844 bp, Homo sapiens
tcatttccttgatactatctaggaggcctgaggatcagtttcctgagaaaggaactcagataagacaaatgtaaatttcaagctttaagaccaagagggtcaatttctatgtctatccaaagaccataagcatcagttatatggggatattgggccagtttcagaaatacccagtaaacatgagggttaaactgaggtaaatgcaaacaaatattgtctggatgtgacttatagtaacaataatamcaataataatgtacaaatacaaactgaaaccaaatgagatatcattttgctcccactaacttagcaaacactaggaagcctgacaatatctatttttggtgagtatgtggagcaacaaggactcttacaacatgagtgaggagtgtaaatgggtataaaaactttggaaaataatttgacattatctcataaaattaagcatgctttaccaccatgcagtaccccagggaaattcttgcacatgtgcacccattggcaagttcaagaatgtttatagcatcattgcttgtaacagcaaaaactggaaataacccaaatgctcctcaatgggagaatgtataaataaattgtggtctatttatacaaatggactctgtgaaaatgattaaagtacagctaactgatacaacattaacaaattttaggtaaataacattgagttaaaaaaagtgacaaattgtatatagaagattgaccccattttatggaagctcaaaaaacaaactaaaactaaaattttaaggatatttacctatgtggtaaagctatcttttaaaaccaagagaatgataaacacaaaattcaaaatgatggatcc

SEQ ID NO: 77186 - DNA, 917 bp, Homo sapiens
tgcataaaagtgagttggcaaaaattcaaaartaaatgattatgtttcttttctacattcttcttctatggcttcctgtgtacatggcaatatgacagatgttatgacatctgaaaatatccacattgttctgacttctaattgggtaagttgtatttaatatcagagatatcacccatatgtaactatctgacttggtttccaaattaatagacacacagaaaagccaacaagtgttcctaagttatctacgagtgatgactgacaaggcaaatgtgaatgttacgtaattcaaatcatgagcctaaaatgaatgtgttattttttagggaaaataccagtgttgttttaatttttacttttttccttattacccattttaaccattggcatgaatacactctaattttgaattaatggtttcttatgtgagttctagaatactatttctttttctttctttctttcttttgttttgagatggagtctcactctgtcgcccaggaatgcaatggcgtgatcttggctcactgcaacctccgcctcctgggtttaagcgattctccgtcctcagcctcccaagtagctgggactacaggcatgcaccaccacgcccagctaaattttgtacttttttagtagaaatggggtattgccatgttggccaggctggtctcaaactcctgacctcaggtgatccacctgcctgggcttcccaaagtgctgggattaccggcgtgagccactgtgcctggcctagaatactatttcatatacagttaagtttaattttcctgtggcaatagtgaagaggaaaatgttaaataaaattaacaaattctcaatttaatttcaacccccttgttttaattcatgttatgggactacttactaaaatagtgtcactacctacaaaa

SEQ ID NO: 77187 - DNA, 917 bp, Homo sapiens
tgcataaaagtgagttggcaaaaattcaaaagtaaatgattatgtttcttttctacattcttcttctatggcttcctgtgtacatggcaatatgacagatgttatgacatctgaaaatatccacattgttctgacttctaattgggtaagttgtatttaatatcagagatatcacccatatgtaactatctgacttggtttccaaattaatagacacacagaaaagccaacaagtgttcctaagttatctacgagtgatgactgacaaggcaaatgtgaatgttacgtaattcaaatcatgagcctaaaatgaatgtgttattttttagggaaaataccagtgttgttttaatttttacttttttccttattacccattttaaccattggcatgaatacactctaattttgaattaatggtttcttatgtgagttctagaatactatttctttttctttctttctttctttygttttgagatggagtctcactctgtcgcccaggaatgcaatggcgtgatcttggctcactgcaacctccgcctcctgggtttaagcgattctccgtcctcagcctcccaagtagctgggactacaggcatgcaccaccacgcccagctaaattttgtacttttttagtagaaatggggtattgccatgttggccaggctggtctcaaactcctgacctcaggtgatccacctgcctgggcttcccaaagtgctgggattaccggcgtgagccactgtgcctggcctagaatactatttcatatacagttaagtttaattttcctgtggcaatagtgaagaggaaaatgttaaataaaattaacaaattctcaatttaatttcaacccccttgttttaattcatgttatgggactacttactaaaatagtgtcactacctacaaaa

SEQ ID NO: 77188 - DNA, 698 bp, Homo sapiens
ttagaagtgttatttctgggtcaacagataagcagggcttatttttcagccttatgataagtattaccaaatggctctcataaatgttgtacaatttatatacccaataagtctccgaccttatctgctttgtacgcagctcttatttttatcttcactaatttgaccaatgaaaatgatatttcattaatttgcatctctttgatgactagtaaggctggacatcttttctatgtttattggccgtatgtagtttttcttttgtgacttgcctattccaataatttgcttattctcttattgatgtgttaaaatttttgttattggtgtgtgagtktattttacatattaaggatataaatcctctttaggattcaaacactagcaaatacggattttatttatagtggttttcaggagatgttcagaaaattataatttttatgtctctattttcctttatggtttctgttttcaatgctctgattagacctccttttgtgtaagctatataaatatccacttatttccttggagaaattttatgcttccatttaaaaagtatttcaatcacctagaacttattttagaatgtcattacgtttttagatctagattctttttaaatgtttaacctaccatctcagaataatttgtgacatggtccgctccttccctatggatgtgaaatgccacta

SEQ ID NO: 77189 - DNA, 2534 bp, Homo sapiens
  misc_feature (1)...(2534): n = A,T,C or G
ggcatgtggaagcagtcagtaaatgttagtttttattagcagcagcggcagcagatctctgggtaaacattcttttcttagtttttgcaaggtatacttcctcaccagtgaaaagtctgttacagatgattgtatgctgtggtatgaatcagacgtttgtgtaccatttgtaccatttttgacgctattcatttgctataagaaaccacagaaatctcacaatagtcccttctcttaaaaaattatattttaggattagagcccagacaataataatgccattattgagaagccagccattacacactgaaactaaatacaaattatgtctttaaagtaaaatttcaacttttaaaaatagaaattttattgaaaattagtttttataatttacatttagtaaattccatatattttcactgattcagtacaaaatgttcaaatcaaaatacctattgagaaagcactatagaaactttgctaggtattaacgttaaaaatcgtaaaacattacattttccatggcagaaaactgataaaatcattgagtagtcaatttctgaaatgtttcttaattttagaataatatgggtaaacagccaggtgcagtggctcacacctgtaatcccagtgactcaggaggctgaggtggaaggatcactcgaggccaggagtttaaggctgcagtgagctatgatggcaccactgcactccagcctgggtgatggagtgggactctatctctaattaaaaaaaaaaaaaaaaggaataatatggatagatgtatttaaagtacactaagaataaaacaaaatatttgttatatgtagactctgagaattttttttttttttttgagatagagtcttactctgttgcccaggctggaacgcagtgtntgggatcccagctcactgcaatctcagcctcccgggttcaagcgattctcccatctcagcttcccgagtagctgggattacaggcgtgcaccaccatgcctggctaatttttgtatttttggtagagatggggtttctccacattggccaggctagtcttgacctcaggtgacccacccacctgggcctcccaaagtgctgggattacaggcgtaagtcactgtgcccagccaagattgttttgatagaacactttgtgtctctctcaccttgtatttagaaaagttagaaaataaaggataatgtatatagaaagctttttgaagactcttaaggagttcataaatatggggcactacgactatgcatatgaaaatatttcttatcagttggcagttaccacctcttacagtggcatgaaacctcttgagttaaaccaaggctcagtgagatttggtgatttaggtagtatcactttatgaacaagcagktcttttattttattacacttctctttgacattcactccagttaaagaactctttcaaaagacctcatgcctggtctcatggagattgaaaggtgtttgagtccttccttattatccccttggaagatgctttgaggaccccagtgatgaatcgcaagaactctgtctccattatccctggtatagggcacctcatcactctggtgttatccctaaagggccttcatcataatgtgcttaaagagtcccctattatgtcctttaggatggagctttgacttgcccaaattgctatgtacatgttaaagagaggctggaactgaagttggtcatttctcactggatcagtcaacaagatttgagtactttctgtgtgctctgcatcattctgagtactttgggggacagaataaggcgtggctcctgccttcaaggagtgtggaatttaatagaagatgacaacatacatgactgtaaatctgtctacgtgagagtgcctaattgtgagattcctaataaatggcaagacatgttctgaaaacgtgaaacataaatgaggctgaagaaattgtgaaaagtttagcagaggaggaatagttcgtcaggttctttaaatacaagtaaaggggaaaggaaggaccatttttaagtttagatattccaagggttagtggtgaggttgattatggtatgtcttctcgttgatgagggaggagactggtgaatagtggaaaataaagttaaatggctagggtggggccaaattatgggctttaataaaagccaggcatagaaatttagattgggatggtagaaaaaggaaagctttaaaagtttttgagccaatgaatgacatcatacaagttctatgagcaatgatttcaggatgggagagaatggcatcaggaagacccacttgaatgctggtaagtaatgttaccaacagtgccattagtaacattaatgttactagggcctggactgatatgctgatggaagtgagaatgaagaataaggtgggatgaaagagattttgaaagaggttttaaagaacctgaaatgggaatgggagagattaactaagcctgcttgccatggacagcaatggggttgctagaagattagctgtggggaaaaagttatgc

SEQ ID NO: 77190 - DNA, 2534 bp, Homo sapiens
  misc_feature (1)...(2534): n = A,T,C or G
ggcatgtggaagcagtcagtaaatgttagtttttattagcagcagcggcagcagatctctgggtaaacattcttttcttagtttttgcaaggtatacttcctcaccagtgaaaagtctgttacagatgattgtatgctgtggtatgaatcagacgtttgtgtaccatttgtaccatttttgacgctattcatttgctataagaaaccacagaaatctcacaatagtcccttctcttaaaaaattatattttaggattagagcccagacaataataatgccattattgagaagccagccattacacactgaaactaaatacaaattatgtctttaaagtaaaatttcaacttttaaaaatagaaattttattgaaaattagtttttataatttacatttagtaaattccatatattttcactgattcagtacaaaatgttcaaatcaaaatacctattgagaaagcactatagaaactttgctaggtattaacgttaaaaatcgtaaaacattacattttccatggcagaaaactgataaaatcattgagtagtcaatttctgaaatgtttcttaattttagaataatatgggtaaacagccaggtgcagtggctcacacctgtaatcccagtgactcaggaggctgaggtggaaggatcactcgaggccaggagtttaaggctgcagtgagctatgatggcaccactgcactccagcctgggtgatggagtgggactctatctctaattaaaaaaaaaaaaaaaaggaataatatggatagatgtatttaaagtacactaagaataaaacaaaatatttgttatatgtagactctgagaattttttttttttttttgagatagagtcttactctgttgcccaggctggaacgcagtgtntgggatcccagctcactgcaatctcagcctcccgggttcaagcgattctcccatctcagcttcccgagtagctgggattacaggcgtgcaccaccatgcctggctaatttttgtatttttggtagagatggggtttctccacattggccaggctagtcttgacctcaggtgacccacccacctgggcctcccaaagtgctgggattacaggcgtaagtcactgtgcccagccaagattgttttgatagaacactttgtgtctctctcaccttgtatttagaaaagttagaaaataaaggataatgtatatagaaagctttttgaagactcttaaggagttcataaatatggggcactacgactatgcatatgaaaatatttcttatcagttggcagttaccacctcttacagtggcatgaaacctcttgagttaaaccaaggctcagtgagatttggtgatttaggtagtatcactttatgaacaagcaggtcttttattttattayacttctctttgacattcactccagttaaagaactctttcaaaagacctcatgcctggtctcatggagattgaaaggtgtttgagtccttccttattatccccttggaagatgctttgaggaccccagtgatgaatcgcaagaactctgtctccattatccctggtatagggcacctcatcactctggtgttatccctaaagggccttcatcataatgtgcttaaagagtcccctattatgtcctttaggatggagctttgacttgcccaaattgctatgtacatgttaaagagaggctggaactgaagttggtcatttctcactggatcagtcaacaagatttgagtactttctgtgtgctctgcatcattctgagtactttgggggacagaataaggcgtggctcctgccttcaaggagtgtggaatttaatagaagatgacaacatacatgactgtaaatctgtctacgtgagagtgcctaattgtgagattcctaataaatggcaagacatgttctgaaaacgtgaaacataaatgaggctgaagaaattgtgaaaagtttagcagaggaggaatagttcgtcaggttctttaaatacaagtaaaggggaaaggaaggaccatttttaagtttagatattccaagggttagtggtgaggttgattatggtatgtcttctcgttgatgagggaggagactggtgaatagtggaaaataaagttaaatggctagggtggggccaaattatgggctttaataaaagccaggcatagaaatttagattgggatggtagaaaaaggaaagctttaaaagtttttgagccaatgaatgacatcatacaagttctatgagcaatgatttcaggatgggagagaatggcatcaggaagacccacttgaatgctggtaagtaatgttaccaacagtgccattagtaacattaatgttactagggcctggactgatatgctgatggaagtgagaatgaagaataaggtgggatgaaagagattttgaaagaggttttaaagaacctgaaatgggaatgggagagattaactaagcctgcttgccatggacagcaatggggttgctagaagattagctgtggggaaaaagttatgc

SEQ ID NO: 77191 - DNA, 321 bp, Homo sapiens
tgacccccattttacaggaaactgaggaacagagaagtaaagtatctttcccaaggtcacacagttagtgagaggcaaagctgggattcaaattcacagagtctgcttccagaggccatgctcctaactactgtgctattccgctagctctgtttaatgcttcttcactcccatcctcctayattcatgtatagacacttcagggtggatcttttagaagtagatcattttggccgggcgcagtggctcacgcctgtaatcccagcactttgggaggccaaggcgggtcgatcacctgaggtcgggagtttgagaccagcc

SEQ ID NO: 77192 - DNA, 2381 bp, Homo sapiens
tgtatgtaaataagtttcctgactcaataattttcaactttacaatggtgggaaaacaatgtacatttaatagatactgtattttgagtacccatataaccattctgtttttcatcttcagtatagtattcaataaataatgtgagatagctgatactttattataaaataggctatctattgggtgattttgccaaattgtaggccaatataagtggactgagcacatttaaggtaggctaggctaagctatgatgttcaagagtttgggtgcattaaatgaattttcaacttacagtattttcaatttacggtaggattattggggtgtagccctatcataaattgaggagcatctgtatttcattttgactcatgtctattttattaaatgggttataatccattattccccttacttaatttgatgctcaaattgtccttggttttatcaatgagagttccatcaggtgcacttctgtgttattttgaatgtccacagcattctttgaataactccttattttatggcatgaaaaagatgtcaccttgttccttccttgcaatcctcatgggaagatctccctcaccctgctctggctccttccccttatgcagaaccaccaacctgatcagcagctctccatcaccactcggacttcaacgcccccacaggctgccttcccacatgagtattctcctcacccctcttgagcttccataccctgaaccagaagcctgcctttatcactgaaccttctccaacctccacacggaaatctccttgctctgcttaggtcactttctggagagtacacacaacctcccccactcaagctctgatactcctcatcacattgcccttccatgaggttgcttcacccaccctgaacaggctccaacatcatgcccgggcaaccctcctgcatagacaacctcatccccaaacacagctctaacactccacgccaagtggggctgccctgctcactccatgtagataccttcttcaccccagttgtgctctgccaccttcactctgatggggattccaagcttcctgggtccacctaatggatttaggagtaaattgttcgggaagggaaaggaatgaaaggaaaaggaagggaaggaaaaaagggaagaagcagggagagaagaggaggaaagaagagagaaacagagggaaaaatgggaaaataagtagaaaaggtagagctttatttttaaagcttgttaaactaaaatgcatgttgaaaatttgaggttaatccttaaaaggatagagatcgagtgtgtaacatcaaagctagtagaaaaaaaatggaataagaaggaaaaactaaaacaatgcaaaagaaggcaagaaaagaasaaaacaagaagcaaagaaacaaaaagagacaaatagaaagtgctaaatatgttggtagaatttaatctaaatatgttagggatcaaaatcattgaaaaagattcaaattatctaattaaaagataaagataattagactggacataaaaacagacttccaactatatgcagttcacaggccagacctgaaacatcaggatacagaaagtttgaaaaggtcctggaggctgcagtctgcagtgagccaagattgcaccactgcactccagcctgggtgacagagcgagactctgtctcaaaaaaaaaaaaaaaaaaaaaaaggtcctggaccccgtttcccccttagactttggaggagcaagaggtcccagagtccaagtgatggaggagtctctgctcaggatggcggccctgcataagaccagctgagctggatgagagggtctcctgcagggccgcaaggaaagaacaagatgagcctgaaacatcttttttgtgccattaagtaagaaagtgctcaaagaatactagggacatgtcaaaaggacatagaagccagtgtgaaggggctcctactgagcaaatctcagtgatgctgatgcccaatagctgctttccccaggtcaactggtttccgtctaagttccgtcaatgggaggctgagtttggactatcagtggaagaccgtgcccaggggtttcctctctttcagggagtctccagctccagaggtctttcctgcattgttacagcttctctgtggttctaggtaatgtgggtgaccatgactcctgggctctactatcactttctctcacctttgtttccccacccgcttcatggtagcaacttcttgctgttgctcatctttacattgcttcaccatccccgttgagtttctctgaatgcctatcatttgtgtatcccatttcctgaattaaattctctatgtttagatatttaaggaggtttctgtttttctaattcgacccctactgatgctcta

SEQ ID NO: 77193 - DNA, 729 bp, Homo sapiens
ccatttgtcataaaagaaagaagcctttgtatcatgaaattggctggcagttcagtctgcgtcccacagggtcatgcctgggttctcactagttcccccacctcctcaacatataggtagtctcatgaaatttaggataattcccacctctatgcctttactccaacgataatgaacacttgttttgctatgtcccttgtacaaaagtaattgttrtcccccaatcttgctctcattcagttcaagcctctctgctaagtgtttaagaccctccaagatttgactctaacttttatctcctactgtttctaacacatcctttaccttatttatagccatttgttcatttcagaaatgaaaagctaattcagaattattagtgctataatagaggcatttataacaagcatagagatggcctaaaggaagatgtaatcagtttttttctggggagtcagagaagacttcacaaatgatatgatgcttaaagctgagtcgtaaaggttcaaaagttgtccatcagaaaaacatggtccattgaggaggggaagagtaattttctgagtaattttctgagcagggccctgatccttgtcttgggggacggtgactagagcttttcttgtagcctcattatccctgcattctgccataagtttgaatggggctgaccacaccaggagctcacgctcagagaaaggagtgtagctcagaataacatctcataga

SEQ ID NO: 77194 - DNA, 1511 bp, Homo sapiens
ccacacttatttttgtgttctttcatttttaaatttattagttactcctttagggactcctattgagttaatataaatgttgggattgaaagaatttgttagatctctccaacttcagtggccatgtggattctcagggattttatagaatgccaaggtgaatggaatggagctaaggcacaagtcccagtccaattgggtggtaacaggtcatggaggttcctcttcccacaatgccagcagacgttagcttggggtatataaaaagccgagtagttgcctttgttttactcaccagtaacatttagaatgtgggtccaagttgagaattttcccatgggcttattgaactctgccccctgcctagataggaaagaagaatggttcacattctctatggagaatgaggggattgctctaggatctgacctcagtaaggcaggaaacaacaataataaaatttgcaagtcccatttccccatgcatctctgtcctggtgtagagccaacatgccacacattcctctgggattggtatcccttcctaggggaaacggaactacctgtacctgaggccgcccaagagagcatgcataacagttgctcttattaagagctagtactgaaaatttgacccattcaatccaggcgtttacatccccatatccagtctcaatttctaaagtctgcttcaagtcagttatyttaattatatttactctcttagggtcattgtctggtggattaaaggaagtagagggaccgggagttataataatcctgggtgggcttgggatggagttggtgactagcctaagagctaaccatgctacaggatcctttcctgagatatctgttcctaatctataccttcaaggttcctggtctatagtagctgggttgtttatggtaattaacatatgattgcattttaaattactacagttatgtagtatagggcccttatacaaatatattttgttctttaagggtttgtttttggaagaatgacttacccagcctcaaaattgggtggtccaccagacctcattccagctagaacaggtctttccccaatagtgacaaatttcaggacatagatatttgtttgcttgtgacagctgcctttggttccctaaattcccacaaagtaagacttggcaggcattaaattatatagtttgggggcggagtagaggtcttagttatgttgactattagtttgattgtatattccttactttctacccctagtactgggctctattcaatacttaggttttcttttaccccttgtgttaggattaatcctaaccatatccacccccaatgatgaaccctgcttatagcttctttttaggtttttcttagagctagctttaagtgtttcttaggtgatttatacactccacattcacccttttccctttcttccaggggttcttttaccagggttttgacccgtaggtaatatgttcacccccattcagctgtttgtacggctgtctcagt

SEQ ID NO: 77195 - DNA, 1511 bp, Homo sapiens
ccacacttatttttgtgttctttcatttttaaatttattagttactcctttagggactcctattgagttaatataaatgttgggattgaaagaatttgttagatctctccaacttcagtggccatgtggattctcagggattttatagaatgccaaggtgaatggaatggagctaaggcacaagtcccagtccaattgggtggtaacaggtcatggaggttcctcttcccacaatgccagcagacgttagcttggggtatataaaaagccgagtagttgcctttgttttactcaccagtaacatttagaatgtgggtccaagttgagaattttcccatgggcttattgaactctgccccctgcctagataggaaagaagaatggttcacattctctatggagaatgaggggattgctctaggatctgacctcagtaaggcaggaaacaacaataataaaatttgcaagtcccatttccccatgcatctctgtcctggtgtagagccaacatgccacacattcctctgggattggtatcccttcctaggggaaacggaactacctgtacctgaggccgcccaagagagcatgcataacagttgctcttattaagagctagtactgaaaatttgacccattcaatccaggcgtttacatccccatatccagtctcaatttctaaagtctgcttcaagtcagttattttaattatatttactctcttagggtcattgtctggtggrttaaaggaagtagagggaccgggagttataataatcctgggtgggcttgggatggagttggtgactagcctaagagctaaccatgctacaggatcctttcctgagatatctgttcctaatctataccttcaaggttcctggtctatagtagctgggttgtttatggtaattaacatatgattgcattttaaattactacagttatgtagtatagggcccttatacaaatatattttgttctttaagggtttgtttttggaagaatgacttacccagcctcaaaattgggtggtccaccagacctcattccagctagaacaggtctttccccaatagtgacaaatttcaggacatagatatttgtttgcttgtgacagctgcctttggttccctaaattcccacaaagtaagacttggcaggcattaaattatatagtttgggggcggagtagaggtcttagttatgttgactattagtttgattgtatattccttactttctacccctagtactgggctctattcaatacttaggttttcttttaccccttgtgttaggattaatcctaaccatatccacccccaatgatgaaccctgcttatagcttctttttaggtttttcttagagctagctttaagtgtttcttaggtgatttatacactccacattcacccttttccctttcttccaggggttcttttaccagggttttgacccgtaggtaatatgttcacccccattcagctgtttgtacggctgtctcagt

SEQ ID NO: 77196 - DNA, 926 bp, Homo sapiens
taaattcagatagaattctataaagtaaaatgtcaagtttctcatctgttcactcatatgtccacctttattctaaatctttcagcatttttatcagttattttcacctctctcttggaaaactccagcctccaggccatcctggagtctgtttctattgactgtttcctctcttggcatgagtcacatttttttgcttttctgtgtgcattataatttgggggggcgcagagaatgttttgtgtaagagatcagtagaaactgaagaaaataaaatttcttccaaaaagtaaaacattcctttttctagagtaggaacctaggcaatttgaaccatatttgaatactcagggcttttttgcactggtggttttacttggttcaccactgttttcaaatattttgaggatatgatcaacttctctttcaacagagcctggtatcagagcattggaaagattccagagactttcctgagttttagagttcagctgccaaattttggaactgtgggtgatatctgcctgcttacggcccagctggcatgattttgagtccctggagtgttttctttgctatctcaccctccccttgctttctgcacttggggagacatctttaagcctaatggtccctttcctagcttttgaagtgctgccgccttactgccctatgctctctgaagacctggaatgtcctggaagggtttctcttagcagttgaaagcttagagtgcctctctcaactcccctgctgtgtgcccygccaacactcctcaccttttgaaggggatttgactttgggcaaataccttaaagaaaaactctttctcagcttttcttgtctggtccccttactttgggcaaattacccctcatactgtgacctacttaagacctgtgagtgaaagttggcaggtagatgca

SEQ ID NO: 77197 - DNA, 710 bp, Homo sapiens
ccaaaataataatagtaatactgcatctaaatttttaaaaatcaccagtttgtttcttaaagggcaggattttccagcactgatatgggagcaagcttgaaggcctatgatgtgcatatcaaaccaaatatataactgtctcttatagaaaatctctatagattatcttcatcgcctctcccttgtgtcatgagttgacatgcaaaatcaactggtcagacagtctcgccaacaacctcttcgtacactttcagatgatctgtcaggtcaatttggaatgagcagatatcatcaagcaatatttccatatgataaagatgattctttaatgacatattttcttgtggctttacaastttaggggtatgtaatattgttttgtttttcttttccccataaaacatgatctttggcaatatatttgactaagatattgagctatatgttttaaaactggtaggtatgtgttattgcttgctttcttttctactaattatcttttttggctcaacagggagatatcgttcattcttagaacttagaattaaatatttgaactacaggtccagcccattaggactaaagattaattaatcacctcctaaattccaatgtgtatttgagaaatcacatgaatgtttgttagtacttcctgtctccaatttaatatgaaatattttttttccaccgacagagctggttaacagaaa

SEQ ID NO: 77198 - DNA, 710 bp, Homo sapiens
ccaaaataataatagtaatactgcatctaaatttttaaaaatcaccagtttgtttcttaaagggcaggattttccagcactgatatgggagcaagcttgaaggcctatgatgtgcatatcaaaccaaatatataactgtctcttatagaaaatctctatagattatcttcatcgcctctcccttgtgtcatgagttgacatgcaaaatcaactggtcagacagtctcgccaacaacctcttcgtacactttcagatgatctgtcaggtcaatttggaatgagcagatatcatcaagcaatatttccatatgataaagatgattctttaatgacatattttcttgtggctttacaagtttaggggtatgtaatattgttttgtttttcttttccccataaaacatgatctttggcaatatatttgactaagatattgagctatatgttttaaaactggtaggtatgtgttattgcttgctttcttttctactaattatcttttttggctcaacagggagatatcgttcattcttagaacttagaattaaatatttgaactacaggtccagcccattaggactaaagattaattaatcacctcctaaattccaatgtgtatttgagaaatcacatgaatgtttgttagtacttcctgtctccaatttaatatgaaatattttttttccacygacagagctggttaacagaaa

SEQ ID NO: 77199 - DNA, 782 bp, Homo sapiens
ttggggttatttcagtgagcaggatgctgattgattccaaatgggttctaggcttgtttagtatgtctctaacactacaaggggcacagtggacattagaggctcaagagaggtaccctagcatcccagagaatcactatagattgatgattcatcataaaactttctatcaagtgatttttgtcctcagttactacattttactgttattcctttctctgtcccaattttatttgcaaggtacattcctactttgtattacakgatggacctaactaggtatgacctgactgatttgagatttacattaaatattactagaaatgatggagtaatcttaccttttccagagaatagaaaagagcttagggacttttcatgcaagatatacacattgctgaaagtccaggaatattatccaaatagaaatgtctggatatgatgcttttctcactttgactaatttttcaaattccagtccctctaaatggattttactctcccccataagtaaacttaagttgcagcatgtaaagaacaagtacacatccaggcagccagtcctagggacgaagtcagcccacttccatcttgcctaatttgtcctgtaattctgactctcatcttggatttttcacaccatctcatctacacttttggagttgactcactacatcacacagtgcctgattccattaataagacccatcttgatgcaatacacattttgaatccaacattctggattgacctcagtagcatgcttctctggaatgctgttt

SEQ ID NO: 77200 - DNA, 782 bp, Homo sapiens
ttggggttatttcagtgagcaggatgctgattgattccaaatgggttctaggcttgtttagtatgtctctaacactacaaggggcacagtggacattagaggctcaagagaggtaccctagcatcccagagaatcactatagattgatgattcatcataaaactttctatcaagtgatttttgtcctcagttactacattttactgttattcctttctctgtcccaattttatttgcaaggtacattcctactttgtattacatgatggacctaactaggtatgacctgactgatttgagatttacattaaatattactagaaatgatggagtaatcttaccttttccagagaatagaaaagagcttagggacttttcatgcaagatatacacattgctgaaagtccaggaatattatccaaatagaaatgtctggatatgatgcttttctcactttgactaatttttcaaattccagtccctctaaatggattttactctcccccataagtaaacttaagttgcagcatgtaaagaacaagtacacrtccaggcagccagtcctagggacgaagtcagcccacttccatcttgcctaatttgtcctgtaattctgactctcatcttggatttttcacaccatctcatctacacttttggagttgactcactacatcacacagtgcctgattccattaataagacccatcttgatgcaatacacattttgaatccaacattctggattgacctcagtagcatgcttctctggaatgctgttt

SEQ ID NO: 77201 - DNA, 1288 bp, Homo sapiens
gcaaataaagaaatttgctgtattactccaaattcctgcatggtaacaatttcagaagaccagtttggaaggagtagttactctttagtttgctgaaattgtcacctgataaatttaattaacttaaattacctatcacttctctgtggatatttgaatctatgtctcatattcagactaatcatttaatttcacaggtgagaaattagagtttaattataattagagataggtgacctcacagaagatgatggtgatgaaaattggttagaacagaagaaatctttaagtttgatttatgtttccaccatacagtggtaattcatccattctgacagtttgaaaattataagcaatgtcttttgattattctaacacataaccacattttaaaaatataaagttaattgtcaatcactcttaagattaattgtcattcttaagaggtaccttggctaggatacacatgttaatttatttaaataatttaatgagcaatagagtaacattttgaatttctgaactttacttcaattttctaatactaatacaatgagaaggtgtaaattgctccagtgtttaatgtttggtgaattttttaaaggtagaattcagcatgcaagaatatatcaataaggcatagagcataggttttgtgttgtatagttttgcagataagagaatactccatttaggacattaattttatgttttataacaacaatttgtattagagccttactgcccagaaaagggtgacaaatggacttcccaaaaacataatatttttgaacttacttttaatgggagcagctctccattctaaagctgtactccattttagtttatcaacaaggcaaatctaagttatagataattaactattttgcttaagttcaaaaagcaatttcaacacaagaagcaaatacaaactaaaacctctgtcccataaagcttgcagccatggctcctagagttcccagtaattttattctttatccttcctctggaatctcctatcacccagttgaaatacatgtctcctaaacctttcttttttctgatttgtagataagttaatttctctctttgctcttatttattagctgatgaaatgagataatattaaatctataatgatttcatttaactttaaaatgtgttttgagatgaattttgcataaaaaaaatgttgtagaaagtaacaytttattgtatggcattatgaccagtcattaggtttggtgaattggttcttcttgctaatgtttgtgttaaattaaaaaca

SEQ ID NO: 77202 - DNA, 1349 bp, Homo sapiens
tgtacatttccaaatacaacttgagtagaaattacaagtatttgaataaaatgtaatattgtgaccataaagtggaaaagtatatgtttcacttggtttagacctaaatgaaaatgttcagaaacattgtgaacacaagaagttatacatataatagaacttcgaggacactatatgtgacaagtcatttctgttcaataaagcttacttatctgtagtcaagtctttgttatattctgtaatggagcattcataatgtggctgaaaccattaacacacccagctcagattagaatgtgtgcacaatgactcaaaaagtttactgaactgtgtgctgattgtgaatcccatcattataaataatcaagtatatttcagtttattcataatttaatgtgagttttttagctttttagcatagtacttcatagattagggattcatatttcaaaaaagtacttaatacatttttattatggttgctaaataaatttaaactatttgtagataatttttaaatwaaaaaagactgtaaaaatatatttattttatattttttcttcacagatgatgtttgtcttgtgaaaagatatatcgggctgggcgcggtggctcacacctgtaatcccagcactttgagaggacgaggtgggcggatcacctgaggttgggagttcaagtccagcctgaccaacatggagaaaccccatctctactaaaaatacaaaattagccaggcatgttggtgcatgcctgtaatcccagctactcaggaggctgaggcaggagaatcgcttgaacccgggaggcagaggttgcggtgagccaagatcacaacattgcactccagcatgtgcaacaagagtgagactctatctcaaaaaaaaaaaaaaaaaaaaaaatatgctgtttctaaaaatgggaaagtttgcttggacatttcttttaaattaggttttatgaatgtataaaacctgaactttagtgcaaaaagatatgttattgtattttttaaattttaagaccaaaatatgttataattaatataagaaatgtttcaaatgttttacagtttttattataaaataattagtttattatttgttgtaaaattccagaaaattataagaaaaaaaaaaaacaaatgtaatcttaccatgtgaaggtaaccactttctttaattattttttatttgtaattgacccaccctattgatatcattgtgaaaatgctgaaagacttagtgtgttttattttttaaataataaaccccaaatcataatatattcaaccctctatccagattaacttgacataatattgtgtacctcttttcatattaacaaaa

SEQ ID NO: 77203 - DNA, 1349 bp, Homo sapiens
tgtacatttccaaatacaacttgagtagaaattacaagtatttgaataaaatgtaatattgtgaccataaagtggaaaagtatatgtttcacttggtttagacctaaatgaaaatgttcagaaacattgtgaacacaagaagttatacatataatagaacttcgaggacactatatgtgacaagtcatttctgttcaataaagcttacttatctgtagtcaagtctttgttatattctgtaatggagcattcataatgtggctgaaaccattaacacacccagctcagattagaatgtgtgcacaatgactcaaaaagtttactgaactgtgtgctgattgtgaatcccatcattataaataatcaagtatatttcagtttattcataatttaatgtgagttttttagctttttagcatagtacttcatagattagggattcatatttcaaaaaagtacttaatacatttttattatggttgctaaataaatttaaactatttgtagataatttttaaataaaaaaagactgtaaaaatatatttattttatattttttcttcacagatgatgtttgtcttgtgaaaagatatatcgggctgggcgcggtggctcacacctgtaatcccagcactttgagaggmcgaggtgggcggatcacctgaggttgggagttcaagtccagcctgaccaacatggagaaaccccatctctactaaaaatacaaaattagccaggcatgttggtgcatgcctgtaatcccagctactcaggaggctgaggcaggagaatcgcttgaacccgggaggcagaggttgcggtgagccaagatcacaacattgcactccagcatgtgcaacaagagtgagactctatctcaaaaaaaaaaaaaaaaaaaaaaatatgctgtttctaaaaatgggaaagtttgcttggacatttcttttaaattaggttttatgaatgtataaaacctgaactttagtgcaaaaagatatgttattgtattttttaaattttaagaccaaaatatgttataattaatataagaaatgtttcaaatgttttacagtttttattataaaataattagtttattatttgttgtaaaattccagaaaattataagaaaaaaaaaaaacaaatgtaatcttaccatgtgaaggtaaccactttctttaattattttttatttgtaattgacccaccctattgatatcattgtgaaaatgctgaaagacttagtgtgttttattttttaaataataaaccccaaatcataatatattcaaccctctatccagattaacttgacataatattgtgtacctcttttcatattaacaaaa

SEQ ID NO: 77204 - DNA, 1349 bp, Homo sapiens
tgtacatttccaaatacaacttgagtagaaattacaagtatttgaataaaatgtaatattgtgaccataaagtggaaaagtatatgtttcacttggtttagacctaaatgaaaatgttcagaaacattgtgaacacaagaagttatacatataatagaacttcgaggacactatatgtgacaagtcatttctgttcaataaagcttacttatctgtagtcaagtctttgttatattctgtaatggagcattcataatgtggctgaaaccattaacacacccagctcagattagaatgtgtgcacaatgactcaaaaagtttactgaactgtgtgctgattgtgaatcccatcattataaataatcaagtatatttcagtttattcataatttaatgtgagttttttagctttttagcatagtacttcatagattagggattcatatttcaaaaaagtacttaatacatttttattatggttgctaaataaatttaaactatttgtagataatttttaaataaaaaaagactgtaaaaatatatttattttatattttttcttcacagatgatgtttgtcttgtgaaaagatatatcgggctgggcgcggtggctcacacctgtaatcccagcactttgagaggaygaggtgggcggatcacctgaggttgggagttcaagtccagcctgaccaacatggagaaaccccatctctactaaaaatacaaaattagccaggcatgttggtgcatgcctgtaatcccagctactcaggaggctgaggcaggagaatcgcttgaacccgggaggcagaggttgcggtgagccaagatcacaacattgcactccagcatgtgcaacaagagtgagactctatctcaaaaaaaaaaaaaaaaaaaaaaatatgctgtttctaaaaatgggaaagtttgcttggacatttcttttaaattaggttttatgaatgtataaaacctgaactttagtgcaaaaagatatgttattgtattttttaaattttaagaccaaaatatgttataattaatataagaaatgtttcaaatgttttacagtttttattataaaataattagtttattatttgttgtaaaattccagaaaattataagaaaaaaaaaaaacaaatgtaatcttaccatgtgaaggtaaccactttctttaattattttttatttgtaattgacccaccctattgatatcattgtgaaaatgctgaaagacttagtgtgttttattttttaaataataaaccccaaatcataatatattcaaccctctatccagattaacttgacataatattgtgtacctcttttcatattaacaaaa

SEQ ID NO: 77205 - DNA, 846 bp, Homo sapiens
attgtgtcccagggctagtaggcaagaagaagagtcatcatcttgggagagcaattgaccctgatcagcagaaggagacaaagctgctgttacacagtagggcaggaagaaataaatgtggaatagaggggttccacctgcttgcctgcaaatactcaattgcccagctgtggctataaggacaagagcagcagcaccagccttagaaacatatggttccagggtctcggaattctcaggtaaaccatcaagatgtgcaacgatggtggctgaggacaaagggaatgtatagtgaggagagacaaaatgagtaccacttggagacttaagatcaactgtagttgggggaaaggagttctagttcatcccactaatttcctataaaatgttcttcccactggaattctggagagctgcttccattccatttctgaaaggaaaattggatctgtgcagataaggyctacactggcaaccatggagggacatagctaggataccccttgaataaactataacattccgctacaggaatggagttagctgacaaacaccattttcagagccttcaaagttaaccttagtttcaagttattcccaagtagtaaccagacaatgactgagcatagcctgtatcctgggaccatttcagtcaaatgcaggaccatccaatagaaagccatgttgggagcaggccccccaaaatctggccataaactggccccaaaactggccataaacaaaatctctgcagcactgtaacatgttcataatggccctaacgcccacgctggaaggttgtaggtttatgggaatgagggcaaggaacacctggcccgcccaggg

SEQ ID NO: 77206 - DNA, 1499 bp, Homo sapiens
gatccaaccacgttttctgtttttgaggaaatgaggtcaatttcctcatctctgcaatgggaagtgtgaaagggctcttgggatgaatggagctaatatgagcacaatgtgtgacacatggaaggtgctccatacatgaaagttatgattgcataattatgtttgttggtctcacggatgttctgtattttgccattcatctgagcctctacaagcaaagtgttcaatggccacagcagaaactactctagttgtgcctgaaataataagacaatctccctgtatctgagttagcactggttatatgcatatttgccattttaaatttctgcaaactctgagtgaagagacggatttttttctcagatagcatctaaacaaccacctggtagccagaatttgcccaatttgagctcatcaaacacattcattctcaagatccttttccatttgaattcagctatcattcacagacaccctccggtgcttggggctgtttggtagacttttcatgccacgtggatttaatgctggtgaccgctggtgggtcaggtgttagtctcatcatctgacaggggaggaaatggagccatggacagatgctcattccaccaggcctggtcttccagagatgagtgagggcagagacagggcctggggaaactgcagacaggcatcgctgggtaaagtcctttgctgctctttgtctgatgtcagaaacacagagaagcctggatcagcagccaacaagagtgcattttccaggtgggagagtgattttggtctcctcacttctacaactgaataaaatgcatctgtttcctcaccctggtgagcatggttttcatttcttctttgaaaatgcttctggagcaatagctatttgataagagtcattgctgaaatgaaaactccaaggaggtgaaattagaaaatatcttctgggctagagtggagtttcttgcagtagagctggcctgctgcttgggcaatgctggggtttagtggatgtggatgaggaagaggcatggtggagacccccaactccattcacaactggcattggcacagcgtccttggcctccctgccacacacacacacacaaacacacacacaatcttacgaaggttgtattttcatctsttctcttctcaggcttttgttttgagagatgataggaggccatagttgtacaaaggtagcaactgtcttgaaacagagacactgtataatcctgagcagagaaattgtggctgacctttagaagaagggaagaggcatgagcagagagaagcctctagaagtggatgggtggatagatcaatagaaattgaaggacataggctctcaagctggacttgcaggttttggtcctgctcctcacctccctagaggtatgaccttgggaaaggtacttacctttctgtgtctcagtgaactcatctgtgaaatgggggtaatgataatagcacctgactcatcacattacttaggactg

SEQ ID NO: 77207 - DNA, 1242 bp, Homo sapiens
agatgtaggagggggtgtattattctatttccataatgctgtaaagaactgaccatggctgggtaatttataaagaaaagagaggtttaattgactcacagttcagcatggctggggaggcctcaggaaacttacaatcatgttctaaggggaaggggaagcaaggcaccttcttcataaggcagcatgaagaagtgccaagcaaagtggggaagggccccttatacaaacatcagatctcatgataactcactcactatcatgagaaaagcatgggggaaaccgcccccatgattctattacctccacctggtctttcccttaacacacgggaattatgagaattatggaggttatggggattataattcaagatgagattttaggtggggacacagccaaaccatatcaaggggggacagggagtctgcctccatggactttgcctgcatgagaggaagggtcaagtgtagcccaggtggagaggatgaggtgttgaagttttttatcatactctagactggtataaaatggggcccaaatcctggcattcataacagtatgttatttagagtgggaagggacctttgccagcctttaatccagcctcttcttgttttctattttagagctgaggagatagactcagaggtgctaagggacttgtgcagagacacaaagcctgtgggttgtcacaggtagcacgtgggccctgggtacctcgtctcccagagcacatgattcttgagctgaacctcggatttttcctcctcttttaccaaccccacgggctttagggcacccacaccacagggtgcagaggcagttcccacagggcctaaggaccacatgcctaatgaagacatggtgcttgaaaagtcagtgatctttccctccccaactarttatgaatatcagaaaaacttaagtgcagtcctggctagaaaccataaataaacccattttcctgacgctccttccctctgggttattttattatctagatgcatttggttactgagcaagagacagacaaacagaaagactttcttcttccacgaaggccctatctgctttaattctcaaatttggtcgtgaattctcagtggatgggttctgagacggggcattgccgtgatcaggttggagggagacacatggtttggagtgtgcgtgttgtgggtgatcctgcttggccaggtgaggaggacaagtctctgggccatgttgcaggatggatcc

SEQ ID NO: 77208 - DNA, 1478 bp, Homo sapiens
catccacccactattctccatccacatgattctggtggtgctgactttacccccatgcctgggctggaacataagccctctgtctaaaaatattggtacattccttcttcctggtttcagtgatgggttcagggaagagtggctgactcaagacagagggcaggcaatttaacctcagtccagcaaaccctgcatttgcccttttccaccaggtctgaccctggagggatgcacgaaggagctactgcaaccattttgccaccatgaacacaatacctgtgtagataatggagccaatgtcacaggcggtggagcaagtgtcacaggaggcccagccaagagatgatggaaggaaaaaaccaaaccccaagtcaacatctatgtctggactttttagttatttgagccaatacatttatgtttcaagccagataagagctgcattttctgttcactgcagtgctttaagagctctcaggtagcagaggatygcttctaagatgcatgcaaccagctgtggttgattgtcttcttctcgttctttctgattttgtcttattttgtcaagatgcaaagccgcaggagattccctacaatgtctaatttcaagtctgagcctgccctttacatgtggaggataagcaccttcactcattatcccccaatgcgaaaccattttccaaaaagaaattaagtttgctgttgattccataaaaggtggcagctgaaaatacaatttttaaaatagttagaagaaacattgctacaactcctgccccttccaaattgccctctcttggagatagtttggccaatctttgcctcccatcccaactaggatactggagagccttgtccacatatctctgtgtgtagggtctgttttatatctgggctccctgtcaactccctcgacctcatcctgccaggccaagcacattctttcttcccagaaatgtgcctcttatcgctacccctgtccatcactcgaggctgccaggagccgctgtatgcaatcgccagagtcttgcacaatccagaagaaaagattgatggagaggagttatgggccttgagtccatttgttcctgtgctcagggctctttgtccctgtaaatccagggtttctatgacaaatgtttatggctcacacagcccggcctgcaaaagggaattccaaccccctactgcctaacaattgtccaccccccactttacaaatctgaggccttggtctgggcgaggaaacactaggtagaatatgcaaagctgttaattcaagtggtgactcaggccaagagtgacctgcatgtcactttcctccacgttcatgatgcctctaagactctgcagacagagatctggtcctgccctcaatgcaccatggaccctctggacagttccttcctctctctgggcttcactttacctgctcagctacctcctatccagggcaggagtctcctttacaatttcct

SEQ ID NO: 77209 - DNA, 1478 bp, Homo sapiens
catccacccactattctccatccacatgattctggtggtgctgactttacccccatgcctgggctggaacataagccctctgtctaaaaatattggtacattccttcttcctggtttcagtgatgggttcagggaagagtggctgactcaagacagagggcaggcaatttaacctcagtccagcaaaccctgcatttgcccttttccaccaggtctgaccctggagggatgcacgaaggagctactgcaaccattttgccaccatgaacacaatacctgtgtagataatggagccaatgtcacaggcggtggagcaagtgtcacaggaggcccagccaagagatgatggaaggaaaaaaccaaaccccaagtcaacatctatgtctggactttttagttatttgagccaatacatttatgtttcaagccagataagagctgcattttctgttcactgcagtgctttaagagctctcaggtagcagaggattgcttctaagatgcatgcaaccagctgtggttgattgtcttcttctcgttctttctgattttgtcttattttgtcaagatgcaaagccscaggagattccctacaatgtctaatttcaagtctgagcctgccctttacatgtggaggataagcaccttcactcattatcccccaatgcgaaaccattttccaaaaagaaattaagtttgctgttgattccataaaaggtggcagctgaaaatacaatttttaaaatagttagaagaaacattgctacaactcctgccccttccaaattgccctctcttggagatagtttggccaatctttgcctcccatcccaactaggatactggagagccttgtccacatatctctgtgtgtagggtctgttttatatctgggctccctgtcaactccctcgacctcatcctgccaggccaagcacattctttcttcccagaaatgtgcctcttatcgctacccctgtccatcactcgaggctgccaggagccgctgtatgcaatcgccagagtcttgcacaatccagaagaaaagattgatggagaggagttatgggccttgagtccatttgttcctgtgctcagggctctttgtccctgtaaatccagggtttctatgacaaatgtttatggctcacacagcccggcctgcaaaagggaattccaaccccctactgcctaacaattgtccaccccccactttacaaatctgaggccttggtctgggcgaggaaacactaggtagaatatgcaaagctgttaattcaagtggtgactcaggccaagagtgacctgcatgtcactttcctccacgttcatgatgcctctaagactctgcagacagagatctggtcctgccctcaatgcaccatggaccctctggacagttccttcctctctctgggcttcactttacctgctcagctacctcctatccagggcaggagtctcctttacaatttcct

SEQ ID NO: 77210 - DNA, 1478 bp, Homo sapiens
catccacccactattctccatccacatgattctggtggtgctgactttacccccatgcctgggctggaacataagccctctgtctaaaaatattggtacattccttcttcctggtttcagtgatgggttcagggaagagtggctgactcaagacagagggcaggcaatttaacctcagtccagcaaaccctgcatttgcccttttccaccaggtctgaccctggagggatgcacgaaggagctactgcaaccattttgccaccatgaacacaatacctgtgtagataatggagccaatgtcacaggcggtggagcaagtgtcacaggaggcccagccaagagatgatggaaggaaaaaaccaaaccccaagtcaacatctatgtctggactttttagttatttgagccaatacatttatgtttcaagccagataagagctgcattttctgttcactgcagtgctttaagagctctcaggtagcagaggattgcttctaagatgcatgcaaccagctgtggttgattgtcttcttctcgttctttctgattttgtcttattttgtcaagatgcaaagccgcaggagattccctacaatgtctaatttcaagtctgagcctgccctttacatgtggaggataagcaccttcackcattatcccccaatgcgaaaccattttccaaaaagaaattaagtttgctgttgattccataaaaggtggcagctgaaaatacaatttttaaaatagttagaagaaacattgctacaactcctgccccttccaaattgccctctcttggagatagtttggccaatctttgcctcccatcccaactaggatactggagagccttgtccacatatctctgtgtgtagggtctgttttatatctgggctccctgtcaactccctcgacctcatcctgccaggccaagcacattctttcttcccagaaatgtgcctcttatcgctacccctgtccatcactcgaggctgccaggagccgctgtatgcaatcgccagagtcttgcacaatccagaagaaaagattgatggagaggagttatgggccttgagtccatttgttcctgtgctcagggctctttgtccctgtaaatccagggtttctatgacaaatgtttatggctcacacagcccggcctgcaaaagggaattccaaccccctactgcctaacaattgtccaccccccactttacaaatctgaggccttggtctgggcgaggaaacactaggtagaatatgcaaagctgttaattcaagtggtgactcaggccaagagtgacctgcatgtcactttcctccacgttcatgatgcctctaagactctgcagacagagatctggtcctgccctcaatgcaccatggaccctctggacagttccttcctctctctgggcttcactttacctgctcagctacctcctatccagggcaggagtctcctttacaatttcct

SEQ ID NO: 77211 - DNA, 1478 bp, Homo sapiens
catccacccactattctccatccacatgattctggtggtgctgactttacccccatgcctgggctggaacataagccctctgtctaaaaatattggtacattccttcttcctggtttcagtgatgggttcagggaagagtggctgactcaagacagagggcaggcaatttaacctcagtccagcaaaccctgcatttgcccttttccaccaggtctgaccctggagggatgcacgaaggagctactgcaaccattttgccaccatgaacacaatacctgtgtagataatggagccaatgtcacaggcggtggagcaagtgtcacaggaggcccagccaagagatgatggaaggaaaaaaccaaaccccaagtcaacatctatgtctggactttttagttatttgagccaatacatttatgtttcaagccagataagagctgcattttctgttcactgcagtgctttaagagctctcaggtagcagaggattgcttctaagatgcatgcaaccagctgtggttgattgtcttcttctcgttctttctgattttgtcttattttgtcaagatgcaaagccgcaggagattccctacaatgtctaatttcaagtctgagcctgccctttacatgtggaggataagcaccttcactcattatcccccaatgcgaaaccattttccaaaaagaaattaagtttgctgttgattccataaaaggtggcagctgaaaatacaatttttaaaatagttagaagaaacattgctacaactcctgccccttccaaattgccctctcttggagatagtttggccaatctttgcctcccatcccaactaggatactggagagccttgtccacatatctctgtgtgtagggtctgttttatatctgggctccctgtcaactccctcgacctcatcctgccaggccaagcacattctttcttcccagaaatgtgcctcttatcgctacccctgtccatcactcgaggctgccaggagccgctgtatgcaatcgccagagtcttgcacaatccagaagaaaagattgatggagaggagttatgggccttgagtccatttgttcctgtgctcagggctctttgtccctgtaaatccagggtttctatgacaaatgtttatggctcacacagcccggcctgcaaaagggaattccaaccccctactgcctaacaattgtccaccccccactttrcaaatctgaggccttggtctgggcgaggaaacactaggtagaatatgcaaagctgttaattcaagtggtgactcaggccaagagtgacctgcatgtcactttcctccacgttcatgatgcctctaagactctgcagacagagatctggtcctgccctcaatgcaccatggaccctctggacagttccttcctctctctgggcttcactttacctgctcagctacctcctatccagggcaggagtctcctttacaatttcct

SEQ ID NO: 77212 - DNA, 2156 bp, Homo sapiens
  misc_feature (1)...(2156): n = A,T,C or G
gccctgagaaggaccctcacccccaaaccagtatggcctttagcccagaaggctgtgtggtcaagaggagagggcttgggctttaggccaggctacaggagttgaaatcccactctaccatcacacacaagttcttttcccactgagactggctccctctccctcctctttcctgactcttttttgacaagctctattctcttttctccttcaaatttagttcaagcagcacctttcccagaaactcttggaagcccccgaaaagactcagggatttttctccctgttgcccccagcctaccctgtgttctgacaccagccacacagaattgaaaaagcctgttcagtatcagtctccctaaccacctgggagcaatttgagaggagcgacagagtcctgttcatctgcgtctccagtgcccagaatgatgcctggcaccatgaaatgcaccacaaatattggttgagctaattaatttcaaataaaaacagaaccgaaaccaactggctggatgctagaaaccgtcacaggctggagaagaaggaggaaagggaacaggaatgggctgtttcttgaacccagaagaaacctggaccaggtgtgacccagattctagtccaggctcagccacaaactgctttgaccttgaaaaaaggcaactctagtcactggatccagcctctctccctacaaattcaatcctctctaagttccctttcatttctaaagcactttgtagaaggaggccattgactaaggtcagggttctagtcctcccatcttcctttcagctcaggaccaagcctttctaggaaaaaacacacctccaggagagggcatattgttatctccccagacaagcctctaatgggctgcacagcttgaggcaaagaagagaacaattgttttaggcatgcatgcctcatgatccagccttattaccagcaggttttccatcctatttgtttccttctgagtgatttgagacattcattcagcatcagcaacacttacaagaaatatgagaggaaataaatttgccacagacactatacaccatgctgcagtaattacaaactgctgtcctgaaagcagcctggggtagttgaagcatatgaatgcataatgctggggaggaggaaagataaaaaaagagagaaagaaggaagaggaggagaaggagggaagatgggagggaaggaaaatagaccccaccgattatcagtgatctatatggcaagcacaatgccaggcttctcaccggtgcaacctcatgtaattctttcaggattcatatgaaataagatgattgttgacttcaggttatggaagagaaagagagatgaaaagtagaaaaacagatacagcaacagtagaatagaacaatgagaaatgagtcaaatcaccctgcagaagctccgaaaggccctcatgcagagcgccgggtacttaggaaggtaggagcaaggctgagggtggaattgtccggaaatgcatnnnnnnnnnnnnnnnnnnnnnnnnnnnnnnnnnnnnnnnnnnnnnnnnnnnnnnnnnnnnnnnnnnnnnnnnnnnnnnnnnnnnnnnnnnnnnnnnnnnnaatgaactcgaatgtaattgactgaatggaatgtacatgaatggaatgtaatcgaatgaaaagtaatccaatggactagaatctaatgcaataacatcgactcaaatagagtagaatgtaatggaatggagtgcagtgcaatggaatggaatggaatggaatgcaatggaatgcaatggaatggaatggaatgggatggaatggtatggaatggatagtaatggactggagtgaaatggactggaaaayaatggactcaaattgaaagggctcgaaaggaatggagtcaaatggaatggtctggaatggaatgaacacgaatgtaatgcaatccaatagaatggaatcgaatggcatggaatataaagaaatggaatcgaagagaatggaaacaaatggaatggaattgaatggaatggaattgaatggaatgggaacgaatggagtgaaattgtatgcagtagaagagaatagaatggaatgcaagcgaaaggaaaggaatggattggaatggaatggaattcattggaatggaagggaatgtagtgtaatggacag

SEQ ID NO: 77213 - DNA, 627 bp, Homo sapiens
acaatagggggccaggcctaggagttacagattattatcagctattgatattttactacatgccaagtgctttgcctgtacaaatttatttaatcctcatgacaaaggtatgaagtaggtgctattgtccacccacatcacatttgaagataatttacccgagatcacagagcttgtacatgattgagccaggaagagaacccgagcgatcasactctggagttcttgaaaatgctatgctgcatggatttccgtgatcatattggaatgttcatcaccatatgcttttctccatcttcttttttgccatttcaactcaagccaccaccatggtttgcctaggcaatggccatggcctttgaacttgacttcctctactgcctcctactcactcctagaccttgtcattacagtgactttagcccctccagaattccaacctcaagcatctctctctcagaccaccacctctcttatttgcagtccatctgctatatactacgttaactctaacaagtccttggcctcaacacaaccctataatccattgaccctaccacagttttgttgtcccctaccccactcacgtggccgcttccctgcagcctagcatagatgtcacagagc

SEQ ID NO: 77214 - DNA, 722 bp, Homo sapiens
tgtttgtttgtttttgagacagagttttgctcttgttgcccaagctggggtgcaagggtgcaatctcggctcaccgcaacctccacctcccgggttcaagcgattctcctgtctcagccttcctgagtagctgggattacaggcatgtgccaccatgcctgtctaattttgtgtttttagtagagatggggtttttccatgttgctcaggctggtctcgaactccggacctcaggtgatccacccgtctcggcctcccaaagtgctgggattacaggcatgagccactgcacctagcctrtaccactcagtttaactagatacttgcttcttcttgaattcatgttggccctatatttataaataatgataatacaaccgaaattatcaattttgaaatgcaatggtttgttttgaagtcttgctctatagtaaacgtcatgagatatacttgccaatcttttcttctagttttctgtattttcctctacaaagcaacctgaatttatttaaaaatgttaattaaattggatactagaatggagtcaaaataagcaagattcaaaaatctaagttaattttcagtttgtagtatatatttcaaaatgaagtaagtccatgcttttatgataataaaaattcctaccatttaggtagcaaacataacacaactgaattaaaattattatagtagcaattagattattctttctggactaagga

SEQ ID NO: 77215 - DNA, 722 bp, Homo sapiens
tgtttgtttgtttttgagacagagttttgctcttgttgcccaagctggggtgcaagggtgcaatctcggctcaccgcaacctccacctcccgggttcaagcgattctcctgtctcagccttcctgagtagctgggattacaggcatgtgccaccatgcctgtctaattttgtgtttttagtagagatggggtttttccatgttgctcaggctggtctcgaactccggacctcaggtgatccacccgtctcggcctcccaaagtgctgggattacaggcatgagccactgcacctagcctgtaccactcagtttaactagatacttgcttcttcttgaattcatgttggccytatatttataaataatgataatacaaccgaaattatcaattttgaaatgcaatggtttgttttgaagtcttgctctatagtaaacgtcatgagatatacttgccaatcttttcttctagttttctgtattttcctctacaaagcaacctgaatttatttaaaaatgttaattaaattggatactagaatggagtcaaaataagcaagattcaaaaatctaagttaattttcagtttgtagtatatatttcaaaatgaagtaagtccatgcttttatgataataaaaattcctaccatttaggtagcaaacataacacaactgaattaaaattattatagtagcaattagattattctttctggactaagga

SEQ ID NO: 77216 - DNA, 722 bp, Homo sapiens
tgtttgtttgtttttgagacagagttttgctcttgttgcccaagctggggtgcaagggtgcaatctcggctcaccgcaacctccacctcccgggttcaagcgattctcctgtctcagccttcctgagtagctgggattacaggcatgtgccaccatgcctgtctaattttgtgtttttagtagagatggggtttttccatgttgctcaggctggtctcgaactccggacctcaggtgatccacccgtctcggcctcccaaagtgctgggattacaggcatgagccactgcacctagcctgtaccactcagtttaactagatacttgcttcttcttgaattcatgttggccctatatttataaataatgataatacaaccgaaattatcaattttgaaatgcaatggtttgttttgaagtcttgctctatagtaaacgtcatgagatatacttgccaatcttttcttctagttttctgtrttttcctctacaaagcaacctgaatttatttaaaaatgttaattaaattggatactagaatggagtcaaaataagcaagattcaaaaatctaagttaattttcagtttgtagtatatatttcaaaatgaagtaagtccatgcttttatgataataaaaattcctaccatttaggtagcaaacataacacaactgaattaaaattattatagtagcaattagattattctttctggactaagga

SEQ ID NO: 77217 - DNA, 722 bp, Homo sapiens
tgtttgtttgtttttgagacagagttttgctcttgttgcccaagctggggtgcaagggtgcaatctcggctcaccgcaacctccacctcccgggttcaagcgattctcctgtctcagccttcctgagtagctgggattacaggcatgtgccaccatgcctgtctaattttgtgtttttagtagagatggggtttttccatgttgctcaggctggtctcgaactccggacctcaggtgatccacccgtctcggcctcccaaagtgctgggattacaggcatgagccactgcacctagcctgtaccactcagtttaactagatacttgcttcttcttgaattcatgttggccctatatttataaataatgataatacaaccgaaattatcaattttgaaatgcaatggtttgttttgaagtcttgctctatagtaaacgtcatgagatatacttgccaatcttttcttctagttttctgtattttcctctacaaagcaacctgaatttatttaaaaatgytaattaaattggatactagaatggagtcaaaataagcaagattcaaaaatctaagttaattttcagtttgtagtatatatttcaaaatgaagtaagtccatgcttttatgataataaaaattcctaccatttaggtagcaaacataacacaactgaattaaaattattatagtagcaattagattattctttctggactaagga

SEQ ID NO: 77218 - DNA, 722 bp, Homo sapiens
tgtttgtttgtttttgagacagagttttgctcttgttgcccaagctggggtgcaagggtgcaatctcggctcaccgcaacctccacctcccgggttcaagcgattctcctgtctcagccttcctgagtagctgggattacaggcatgtgccaccatgcctgtctaattttgtgtttttagtagagatggggtttttccatgttgctcaggctggtctcgaactccggacctcaggtgatccacccgtctcggcctcccaaagtgctgggattacaggcatgagccactgcacctagcctgtaccactcagtttaactagatacttgcttcttcttgaattcatgttggccctatatttataaataatgataatacaaccgaaattatcaattttgaaatgcaatggtttgttttgaagtcttgctctatagtaaacgtcatgagatatacttgccaatcttttcttctagttttctgtattttcctctacaaagcaacctgaatttatttaaaaatgttaattaaattggatactagaatggagtcaaaataagcaagattcaaaaatctaagttaattttcagtttgtagtatatatttcaaaatgaagtaagtccatgcttttwtgataataaaaattcctaccatttaggtagcaaacataacacaactgaattaaaattattatagtagcaattagattattctttctggactaagga

SEQ ID NO: 77219 - DNA, 1564 bp, Homo sapiens
atttagttgaattgtggtcagactggttgtgtctgtggacatagaaataccgatgacctgatttcccccaggagtctttcagcttcgggacaggacatggcagaagttgagtgacaatgtgagtcctrctcccatctgagccctcagggacatagtaagtgggcttctcttggaggagaagagaggaaaatgatgacaagatgagcctttaacagatgcaaagtcctggataaaggttcagagagttgagtggagctgagcaggatcaggacccctcttctggctcttttaaatggataaactctgacgttagtggtggtttagtatctctaaggctttatttccaggcctaagagtggggctacgaagagcaagcttttagggattgtagtgagcattaaaaagaacacctcagactgggcatcgtggctcattcttgtaatcccagcactttgggaggctgagacaggtggatcacttgaggtcaggagttcgagaccagcctggccaacatggcgagactttgtatttactaaaaatacaaacaaacaaacaaacaaacaaacaattagctgggcatggtggtgcatgcctgtagtcccagctactcgggaggctgagggcaggagagttgcttgaacctgggaggtggaggttgaggtgagcagagatcatgccattgtactccagcctggacgacagagcgagactctgtctaaaaaaaaaaaaaaaaaaagggaacacaaattgcattcacatccaagtctcaaccctcagacaacaagcatagggctgggtacacccacattcacccccatttgtggtacagggaagtagcgaagactgtagcttcctgagccagacagcctggggtcaagtctcgacagtgaccttgaagcagttgactcagtctagatttcaatgtcctaacctgaagatagggacttcataggttattctgagaattaaatcaatgaaaatcacggctcttaggctgacagtagaagccaggaagcaagtagaaggacgtgctggattaggtcacccaggattttaagataaagatcaaatcctattcaccaaaacaccaaagtgatgcagatctggcccaattcctactgcacagagttgctgccagggcaagaagttgtgcacaagaatgcactttgctaagagtaaaatgctctacaaatcccgaaataaggtcagagcttgtgcttgtgaccatttttatggagttgttcttattatcctggagggctgtgtttctggttcacgttttctggtttccaggaccatcctggcttctagcagaaacccagtttacccccaggcttggcccagtttgtggcatattgatgaagttccccaagagtttgctgaatttcatgtgtctgctgggtgggactagattttctaggactctgggcccttcacactctatgtggggtggaactccactatattagctgctactgtttctgctaatgatacacatatgtgcacagtgcgttgccaacttcagtattttgtgaatattcactaatattattatctgccaagg

SEQ ID NO: 77220 - DNA, 1564 bp, Homo sapiens
atttagttgaattgtggtcagactggttgtgtctgtggacatagaaataccgatgacctgatttcccccaggagtctttcagcttcgggacaggacatggcagaagttgagtgacaatgtgagtcctgctcccatctgagccctcagggacatagtaagtgggcttctcttggaggagaagagaggaaaatgatgacaagatgagcctttaacagatgcaaagtcctggataaaggttcagagagttgagtggagctgagcaggatcaggacccctcttctggctcttttaaatggataaactctgacgttagtggtggtttagtatctctaaggctttatttccaggcctaagagtggggctacgaasagcaagcttttagggattgtagtgagcattaaaaagaacacctcagactgggcatcgtggctcattcttgtaatcccagcactttgggaggctgagacaggtggatcacttgaggtcaggagttcgagaccagcctggccaacatggcgagactttgtatttactaaaaatacaaacaaacaaacaaacaaacaaacaattagctgggcatggtggtgcatgcctgtagtcccagctactcgggaggctgagggcaggagagttgcttgaacctgggaggtggaggttgaggtgagcagagatcatgccattgtactccagcctggacgacagagcgagactctgtctaaaaaaaaaaaaaaaaaaagggaacacaaattgcattcacatccaagtctcaaccctcagacaacaagcatagggctgggtacacccacattcacccccatttgtggtacagggaagtagcgaagactgtagcttcctgagccagacagcctggggtcaagtctcgacagtgaccttgaagcagttgactcagtctagatttcaatgtcctaacctgaagatagggacttcataggttattctgagaattaaatcaatgaaaatcacggctcttaggctgacagtagaagccaggaagcaagtagaaggacgtgctggattaggtcacccaggattttaagataaagatcaaatcctattcaccaaaacaccaaagtgatgcagatctggcccaattcctactgcacagagttgctgccagggcaagaagttgtgcacaagaatgcactttgctaagagtaaaatgctctacaaatcccgaaataaggtcagagcttgtgcttgtgaccatttttatggagttgttcttattatcctggagggctgtgtttctggttcacgttttctggtttccaggaccatcctggcttctagcagaaacccagtttacccccaggcttggcccagtttgtggcatattgatgaagttccccaagagtttgctgaatttcatgtgtctgctgggtgggactagattttctaggactctgggcccttcacactctatgtggggtggaactccactatattagctgctactgtttctgctaatgatacacatatgtgcacagtgcgttgccaacttcagtattttgtgaatattcactaatattattatctgccaagg

SEQ ID NO: 77221 - DNA, 1564 bp, Homo sapiens
atttagttgaattgtggtcagactggttgtgtctgtggacatagaaataccgatgacctgatttcccccaggagtctttcagcttcgggacaggacatggcagaagttgagtgacaatgtgagtcctgctcccatctgagccctcagggacatagtaagtgggcttctcttggaggagaagagaggaaaatgatgacaagatgagcctttaacagatgcaaagtcctggataaaggttcagagagttgagtggagctgagcaggatcaggacccctcttctggctcttttaaatggataaactctgacgttagtggtggtttagtatctctaaggctttatttccaggcctaagagtggggctacgaagagcaagcttttagggattgtagtgagcattaaaaagaacacctcagactgggcatcgtggctcattcytgtaatcccagcactttgggaggctgagacaggtggatcacttgaggtcaggagttcgagaccagcctggccaacatggcgagactttgtatttactaaaaatacaaacaaacaaacaaacaaacaaacaattagctgggcatggtggtgcatgcctgtagtcccagctactcgggaggctgagggcaggagagttgcttgaacctgggaggtggaggttgaggtgagcagagatcatgccattgtactccagcctggacgacagagcgagactctgtctaaaaaaaaaaaaaaaaaaagggaacacaaattgcattcacatccaagtctcaaccctcagacaacaagcatagggctgggtacacccacattcacccccatttgtggtacagggaagtagcgaagactgtagcttcctgagccagacagcctggggtcaagtctcgacagtgaccttgaagcagttgactcagtctagatttcaatgtcctaacctgaagatagggacttcataggttattctgagaattaaatcaatgaaaatcacggctcttaggctgacagtagaagccaggaagcaagtagaaggacgtgctggattaggtcacccaggattttaagataaagatcaaatcctattcaccaaaacaccaaagtgatgcagatctggcccaattcctactgcacagagttgctgccagggcaagaagttgtgcacaagaatgcactttgctaagagtaaaatgctctacaaatcccgaaataaggtcagagcttgtgcttgtgaccatttttatggagttgttcttattatcctggagggctgtgtttctggttcacgttttctggtttccaggaccatcctggcttctagcagaaacccagtttacccccaggcttggcccagtttgtggcatattgatgaagttccccaagagtttgctgaatttcatgtgtctgctgggtgggactagattttctaggactctgggcccttcacactctatgtggggtggaactccactatattagctgctactgtttctgctaatgatacacatatgtgcacagtgcgttgccaacttcagtattttgtgaatattcactaatattattatctgccaagg

SEQ ID NO: 77222 - DNA, 1564 bp, Homo sapiens
atttagttgaattgtggtcagactggttgtgtctgtggacatagaaataccgatgacctgatttcccccaggagtctttcagcttcgggacaggacatggcagaagttgagtgacaatgtgagtcctgctcccatctgagccctcagggacatagtaagtgggcttctcttggaggagaagagaggaaaatgatgacaagatgagcctttaacagatgcaaagtcctggataaaggttcagagagttgagtggagctgagcaggatcaggacccctcttctggctcttttaaatggataaactctgacgttagtggtggtttagtatctctaaggctttatttccaggcctaagagtggggctacgaagagcaagcttttagggattgtagtgagcattaaaaagaacacctcagactgggcatcgtggctcattcttgtaatcccagcactttgggaggctgagrcaggtggatcacttgaggtcaggagttcgagaccagcctggccaacatggcgagactttgtatttactaaaaatacaaacaaacaaacaaacaaacaaacaattagctgggcatggtggtgcatgcctgtagtcccagctactcgggaggctgagggcaggagagttgcttgaacctgggaggtggaggttgaggtgagcagagatcatgccattgtactccagcctggacgacagagcgagactctgtctaaaaaaaaaaaaaaaaaaagggaacacaaattgcattcacatccaagtctcaaccctcagacaacaagcatagggctgggtacacccacattcacccccatttgtggtacagggaagtagcgaagactgtagcttcctgagccagacagcctggggtcaagtctcgacagtgaccttgaagcagttgactcagtctagatttcaatgtcctaacctgaagatagggacttcataggttattctgagaattaaatcaatgaaaatcacggctcttaggctgacagtagaagccaggaagcaagtagaaggacgtgctggattaggtcacccaggattttaagataaagatcaaatcctattcaccaaaacaccaaagtgatgcagatctggcccaattcctactgcacagagttgctgccagggcaagaagttgtgcacaagaatgcactttgctaagagtaaaatgctctacaaatcccgaaataaggtcagagcttgtgcttgtgaccatttttatggagttgttcttattatcctggagggctgtgtttctggttcacgttttctggtttccaggaccatcctggcttctagcagaaacccagtttacccccaggcttggcccagtttgtggcatattgatgaagttccccaagagtttgctgaatttcatgtgtctgctgggtgggactagattttctaggactctgggcccttcacactctatgtggggtggaactccactatattagctgctactgtttctgctaatgatacacatatgtgcacagtgcgttgccaacttcagtattttgtgaatattcactaatattattatctgccaagg

SEQ ID NO: 77223 - DNA, 1564 bp, Homo sapiens
atttagttgaattgtggtcagactggttgtgtctgtggacatagaaataccgatgacctgatttcccccaggagtctttcagcttcgggacaggacatggcagaagttgagtgacaatgtgagtcctgctcccatctgagccctcagggacatagtaagtgggcttctcttggaggagaagagaggaaaatgatgacaagatgagcctttaacagatgcaaagtcctggataaaggttcagagagttgagtggagctgagcaggatcaggacccctcttctggctcttttaaatggataaactctgacgttagtggtggtttagtatctctaaggctttatttccaggcctaagagtggggctacgaagagcaagcttttagggattgtagtgagcattaaaaagaacacctcagactgggcatcgtggctcattcttgtaatcccagcactttgggaggctgagacaggtggatcacttgaggtcaggagttcgagaccagcctggccaacatggcgagactttgtatttactaaaaatacaaacaaacaaacaaacaaacaaacaattagctgggcatggtggtgcatgcctgtagycccagctactcgggaggctgagggcaggagagttgcttgaacctgggaggtggaggttgaggtgagcagagatcatgccattgtactccagcctggacgacagagcgagactctgtctaaaaaaaaaaaaaaaaaaagggaacacaaattgcattcacatccaagtctcaaccctcagacaacaagcatagggctgggtacacccacattcacccccatttgtggtacagggaagtagcgaagactgtagcttcctgagccagacagcctggggtcaagtctcgacagtgaccttgaagcagttgactcagtctagatttcaatgtcctaacctgaagatagggacttcataggttattctgagaattaaatcaatgaaaatcacggctcttaggctgacagtagaagccaggaagcaagtagaaggacgtgctggattaggtcacccaggattttaagataaagatcaaatcctattcaccaaaacaccaaagtgatgcagatctggcccaattcctactgcacagagttgctgccagggcaagaagttgtgcacaagaatgcactttgctaagagtaaaatgctctacaaatcccgaaataaggtcagagcttgtgcttgtgaccatttttatggagttgttcttattatcctggagggctgtgtttctggttcacgttttctggtttccaggaccatcctggcttctagcagaaacccagtttacccccaggcttggcccagtttgtggcatattgatgaagttccccaagagtttgctgaatttcatgtgtctgctgggtgggactagattttctaggactctgggcccttcacactctatgtggggtggaactccactatattagctgctactgtttctgctaatgatacacatatgtgcacagtgcgttgccaacttcagtattttgtgaatattcactaatattattatctgccaagg

SEQ ID NO: 77224 - DNA, 1564 bp, Homo sapiens
atttagttgaattgtggtcagactggttgtgtctgtggacatagaaataccgatgacctgatttcccccaggagtctttcagcttcgggacaggacatggcagaagttgagtgacaatgtgagtcctgctcccatctgagccctcagggacatagtaagtgggcttctcttggaggagaagagaggaaaatgatgacaagatgagcctttaacagatgcaaagtcctggataaaggttcagagagttgagtggagctgagcaggatcaggacccctcttctggctcttttaaatggataaactctgacgttagtggtggtttagtatctctaaggctttatttccaggcctaagagtggggctacgaagagcaagcttttagggattgtagtgagcattaaaaagaacacctcagactgggcatcgtggctcattcttgtaatcccagcactttgggaggctgagacaggtggatcacttgaggtcaggagttcgagaccagcctggccaacatggcgagactttgtatttactaaaaatacaaacaaacaaacaaacaaacaaacaattagctgggcatggtggtgcatgcctgtagtcccagctactcgggaggctgagggcaggagagttgcttgaacctgggaggtggaggttgaggtgagcagagatcatgccattgtactccagcctggacgacagagcgagactctgtctaaaaaaaaaaaaaaaaaaagggaacacaaattgcattcacatccaagtctcaaccctcagacaacaagcatagggctgggtacacccacattcacccccatttgtggtacagggaagtagcgaagactgtagcttcctgagccagacagcctggggtcaagtctcgacagtgaccttgaagcagttgactcagtctagatttcaatgtcctaacctgaagatagggacttcataggttattctgagaattaaatcaatgaaaatcacggctcttaggctgacagtagaagccaggaagcaagtagaaggacgtgctggattaggtcacccaggattttaagataaagatcaaatmctattcaccaaaacaccaaagtgatgcagatctggcccaattcctactgcacagagttgctgccagggcaagaagttgtgcacaagaatgcactttgctaagagtaaaatgctctacaaatcccgaaataaggtcagagcttgtgcttgtgaccatttttatggagttgttcttattatcctggagggctgtgtttctggttcacgttttctggtttccaggaccatcctggcttctagcagaaacccagtttacccccaggcttggcccagtttgtggcatattgatgaagttccccaagagtttgctgaatttcatgtgtctgctgggtgggactagattttctaggactctgggcccttcacactctatgtggggtggaactccactatattagctgctactgtttctgctaatgatacacatatgtgcacagtgcgttgccaacttcagtattttgtgaatattcactaatattattatctgccaagg

SEQ ID NO: 77225 - DNA, 1564 bp, Homo sapiens
atttagttgaattgtggtcagactggttgtgtctgtggacatagaaataccgatgacctgatttcccccaggagtctttcagcttcgggacaggacatggcagaagttgagtgacaatgtgagtcctgctcccatctgagccctcagggacatagtaagtgggcttctcttggaggagaagagaggaaaatgatgacaagatgagcctttaacagatgcaaagtcctggataaaggttcagagagttgagtggagctgagcaggatcaggacccctcttctggctcttttaaatggataaactctgacgttagtggtggtttagtatctctaaggctttatttccaggcctaagagtggggctacgaagagcaagcttttagggattgtagtgagcattaaaaagaacacctcagactgggcatcgtggctcattcttgtaatcccagcactttgggaggctgagacaggtggatcacttgaggtcaggagttcgagaccagcctggccaacatggcgagactttgtatttactaaaaatacaaacaaacaaacaaacaaacaaacaattagctgggcatggtggtgcatgcctgtagtcccagctactcgggaggctgagggcaggagagttgcttgaacctgggaggtggaggttgaggtgagcagagatcatgccattgtactccagcctggacgacagagcgagactctgtctaaaaaaaaaaaaaaaaaaagggaacacaaattgcattcacatccaagtctcaaccctcagacaacaagcatagggctgggtacacccacattcacccccatttgtggtacagggaagtagcgaagactgtagcttcctgagccagacagcctggggtcaagtctcgacagtgaccttgaagcagttgactcagtctagatttcaatgtcctaacctgaagatagggacttcataggttattctgagaattaaatcaatgaaaatcacggctcttaggctgacagtagaagccaggaagcaagtagaaggacgtgctggattaggtcacccaggattttaagataaagatcaaatcctattcaccaaaacaccaaagtgatgcagatctggcccaattcctactgcacagagttgctgccagggcaagaagttgtgcacaagaatgcactttgctaagagtaaaatgctctacaaatcccgaaataaggtcagagcttgtgcttgtgaccatttttayggagttgttcttattatcctggagggctgtgtttctggttcacgttttctggtttccaggaccatcctggcttctagcagaaacccagtttacccccaggcttggcccagtttgtggcatattgatgaagttccccaagagtttgctgaatttcatgtgtctgctgggtgggactagattttctaggactctgggcccttcacactctatgtggggtggaactccactatattagctgctactgtttctgctaatgatacacatatgtgcacagtgcgttgccaacttcagtattttgtgaatattcactaatattattatctgccaagg

SEQ ID NO: 77226 - DNA, 325 bp, Homo sapiens
cgctgccccccctccccctctccgctctgttctctctctgcccacaggctttctctgtyaaatcctggggtctgttctaaagttttctgcatgtttatggcctcagcctttctgcatcctggcaattgtggaaataatcttttcagcttcacttcccactgtggttccaccaggtgttttagtttttccaggagaggaatctgactgacaggcctcatctacagagtcatgaatcaccaatccaatactggatggactgcccaggcagcctgagctcatcccatgaatgactgtgcagaaggacagtcctccaggagatgatgca

SEQ ID NO: 77227 - DNA, 648 bp, Homo sapiens
cactaaatgttactgtttttattccccaagacactttcaacagtattcaaatgcctattaaatttgtccattcatttatgcaaccaacgtttattgccagttatatgccaggcattcagaatacaaaaatgaataattcaacagtttctagccctcaaagagttcacagtctagttggggtggcagctatgtacacggctaatttataattcagagtagtaaggatttagggatctacttgacgcaaatctaaaatgtcttagcagatatgkctgttacattatgagttaaacaagcttgtgtggactttcctgagaaaaataactgcaattattcatggcattgtttctaagggaaaatgtgttctgcattccaaacagtcaatttaaaattgaatttttggaatacagcccattttcccctgggggctatttctccattatctaagaatccctctctgtcttaggacagttttcatacacaactcccacctgttctacatagcatatggtactacctgcaggttgcatagtttcatggtcatcaccttcctcacctgggctctgcactacatgtttaagatagtcctctgatcaagcaggttgagttaagcaggtaggactgaagtagccccaaatctgactgttt

SEQ ID NO: 77228 - DNA, 686 bp, Homo sapiens
ctttaccaaataaaaaacactagttaaaggcccttaccttttctaggagggagctctccgttctgggttgattctgttccagtgtatacaatttctccatctttaaccatttcattccacagaccacagagcccatctcttgtgaatgcaagctggcaatgataaacgagataagcttacagagtgctcacactcacaytgcaatttttaaagaatgatatgggaaaaaaatctcaatcccccttatgtattcgatcatttggtaataaaatcaatgatttactgaattagtgatttaatcattttacatttcaggaaagtcatccaagaaatataaatgaaaaggtgcataatagtataaatactatgctacctcttatgtaacatacaagaaaaatgacacgtggtcgggcgaggtggctcatgcttgtcatcccagcactttgggaggccgagcggggcacatcacgggggatcaggaatttgagaccagcctggccaacacggtgaaaccccgtcccaactaaaaatacaaaaaattagccaggcgtggtggcgggcgcctgtaatcccagctactcacgaagctgaggcaggagaattgcttgaacccaggaggcagaggttgcagtgagccaagatcgcaccactgcactcagcctgagtgacaagagcgagactcggtg

SEQ ID NO: 77229 - DNA, 538 bp, Homo sapiens
cacatttttcctctggtgcacactatccaaaacctagtcatttcccttactcctaggaggaatttagatgactttttttttggccaggtgcagtggctcacgcctgtaatcccagcaatttgggaggccgaggcaggcagatcgctttgaggtcaggagaccagccaggccaacacagtgaaaccccatctctactaaaaatacaaaaattagtcgggcatgcatggtggcacacacttgtaatcccagctactcggaaggctgaggygggagaatcacttgcattcgggaggcggaagttgcagtgagccaagattgcgccactgcacgccagcctgggcgacagagcaagactgcgtctcaaaaaaaaaaaaaaaaaaaaaaagactttctaatcatattggaaatgtgtaacaaggaccaagtactgtgtattaaacttaataaatcaaaacaacaggccctctaagatataaatggtgcttcactgtatgtttatctgcccaacccatcataggaactcaattcagcattaaac

SEQ ID NO: 77230 - DNA, 378 bp, Homo sapiens
tgggctctcttccctggccccaggatgggaattsagggggaaaaggtcacctattctcctattcttatcccacaaaagaaaacttatgcatcagttgtcaagctaaggagcttcagagtccacaaatagggaaattgctaagagcttatcagtagtgtccactacccatccccacctggggtcacgtggagaatgatggtgggggcgacgatcttgtcctacttcaggtgaaaagcaggggtgtgggggggtttcattgtgaagggctcctttgttaaaattccttccaattccaggaaaaacatgcactcgaaagccattatctcttttacttcttactagggaacttccaggaaagagacgggggggggggtgggg

SEQ ID NO: 77231 - DNA, 528 bp, Homo sapiens
aaaattagccggcgtggtggtgaacatctgtaatcccagttactcaggaggctgaggcaggagaatcgcttgaatccaggaggcagaggttgcagtgccgagrtcacaccattacactccagcctgggcaacagagcaagactccgtatcaaaaaaaaaaacacacaaaaaaaacacaaaaaacagaaaataaacagtatgaaaagacatctaaaacataaagtcacagaaagactgagagagattgaaaaaagatacacatgtcatatgtacctaacccaaagaagggttggaagctatattattatcagataaaataggctttgggcaaaaagcaatatgggagattttttaaggtcacaatatgatgataaaaattctaataaaccaagggagaaggtaatctaaaatgttaatgtatctaataactagcactcaaaatacatgaaagcaaaatatgacaaaattgcaaccctcagagggcaatttaaatacatatctcagtatctgataaaagagacaaaaaac

SEQ ID NO: 77232 - DNA, 528 bp, Homo sapiens
aaaattagccggcgtggtggtgaacatctgtaatcccagttactcaggaggctgaggcaggagaatcgcttgaatccaggaggcagaggttgcagtgccgaggtcacaccattacactccagcctgggcaacagagcaagactccgtatcaaaaaaaaaaacacacamaaaaaacacaaaaaacagaaaataaacagtatgaaaagacatctaaaacataaagtcacagaaagactgagagagattgaaaaaagatacacatgtcatatgtacctaacccaaagaagggttggaagctatattattatcagataaaataggctttgggcaaaaagcaatatgggagattttttaaggtcacaatatgatgataaaaattctaataaaccaagggagaaggtaatctaaaatgttaatgtatctaataactagcactcaaaatacatgaaagcaaaatatgacaaaattgcaaccctcagagggcaatttaaatacatatctcagtatctgataaaagagacaaaaaac

SEQ ID NO: 77233 - DNA, 528 bp, Homo sapiens
aaaattagccggcgtggtggtgaacatctgtaatcccagttactcaggaggctgaggcaggagaatcgcttgaatccaggaggcagaggttgcagtgccgaggtcacaccattacactccagcctgggcaacagagcaagactccgtatcaaaaaaaaaaacacacaaaaaaaacacaaaaaacagaaaataaacagtatgaaaagacatctaaaacataaagtcacagaaagactgagagagattgaaaaaagatacacatgtcatatgtaccyaacccaaagaagggttggaagctatattattatcagataaaataggctttgggcaaaaagcaatatgggagattttttaaggtcacaatatgatgataaaaattctaataaaccaagggagaaggtaatctaaaatgttaatgtatctaataactagcactcaaaatacatgaaagcaaaatatgacaaaattgcaaccctcagagggcaatttaaatacatatctcagtatctgataaaagagacaaaaaac

SEQ ID NO: 77234 - DNA, 629 bp, Homo sapiens
agaaatatgtctataacaactcaaattcccaacaaattacatttgctatatttggtaactctctaacagtgtttctttccataataattgaagcagaattgagatgtcataaccgaaactgatactgcagacgcagttgttacttgggagcagaggaggggcagtgagaagcatttggcttttctgtaagttgaaatttttgttgttgtatttttatctgtaaatgattaggaatggaactgtggtgmgtaaactcatgaatgttaatatggctatagcttctgcttccgtaacacttagttattctatcccttattacactcttacagacgttgatagttcaacaattggagcttttaaactaatggaaggctttcaaccaagtagaatgccttcattactagcaagcagggagatctgaatgtgaattgaggtggtttaaaccaatttaaggaaacatttttataaaagactaatgcccataatttatgtttattttctgttttctgtgatttgaataaattagggcagggatttatattatttgtcttcttttcacatgcctcacccagtgcccacctgcattagtccatgatagctctgataacaaacaaaccagaaacctcagg

SEQ ID NO: 77235 - DNA, 1329 bp, Homo sapiens
tagttgccttctaagacattccccctcatttgtcttttttttttttaagacggagtttcgctctttgttgcccaggctggagtgcactggcrtgatctcggctgactccaacatccacctcccagcttcaagcgattctcctgtctcagcctactgagtagctgggattaccggcacctgccaccatgcccggctaatttttgtatttttagtagagacagggtttcaccatgttggccaagctggtctcaaactcctgatacacccgccttggcctcccaacgtgctgggactacaggtgtgagccacccagcctggcccatttgtctatttttttaatctatctatctgtttatttattatcaagcggactcatggattcttattttattcattgttacaagctaagttgatatgagttgagtttctgtcacttaaaatcagaatattcctgaaaagccttcaggaacttctgagaaaagtgacacagtttccctgggcattgcactcaagaggtccttataatcttcacacctgccaaagtgcttcctgatgctgccattaaatcccttctggcccactctacaagtccaaattctctgacaatcaggctcaaagaagacaaatgtggccagtaaatggcccctagatctttgtggagcaatcatgtgagaactgagtatggctttaggaaggtaaggtacttcttgctatatccaaggttcttctcactatcttctgtcccttctcagcagcttcgctcaaagagctgggccagctgccgactcctcttccaatgtttccaaccatcctcagagcttctcctcattcccctcttatgcttagctatacctctggctctatttgtttcaaatgttgagtattatgcctaaaaagactgctgatgatggacttgatattttttgtttgcccctccagaaccattcttcaaccttcctcacccagctcaatgactgaactgaactgcatcaaccataccaacagctggattcagccaacggtgagtactggcaagaaataagaaagcaagagagtactggggtatcattatcccaaatttcaccctttccagctcaccatgggtgtctatactcctctatcaaatcctttttccatgtagccatcttccctgagttctggaaaccctagttttcctctcttcaggtcataagtatggccagctctggggtatgccaccattgccttttggtctatctgaacaccactgcatgttggtttcacttaaccccgagtatacatttgaaaatatttccttaattaaactttccttgatcaccccacttgaat

SEQ ID NO: 77236 - DNA, 1329 bp, Homo sapiens
tagttgccttctaagacattccccctcatttgtcttttttttttttaagacggagtttcgctctttgttgcccaggctggagtgcactggcatgatctcggctgactccaacatccacctcccagcttcaagcgattctcctgtctcagcctactgagtagctgggattaccggcacctgccaccatgcccggctaatttttgtatttttagtagagacagggtttcaccatgttggccaagctggtctcaaactcctgatacacccgccttggcctcccaacgtgctgggactacaggtgtgagccacccagcctggcccatttgtctatttttttaatctayctatctgtttatttattatcaagcggactcatggattcttattttattcattgttacaagctaagttgatatgagttgagtttctgtcacttaaaatcagaatattcctgaaaagccttcaggaacttctgagaaaagtgacacagtttccctgggcattgcactcaagaggtccttataatcttcacacctgccaaagtgcttcctgatgctgccattaaatcccttctggcccactctacaagtccaaattctctgacaatcaggctcaaagaagacaaatgtggccagtaaatggcccctagatctttgtggagcaatcatgtgagaactgagtatggctttaggaaggtaaggtacttcttgctatatccaaggttcttctcactatcttctgtcccttctcagcagcttcgctcaaagagctgggccagctgccgactcctcttccaatgtttccaaccatcctcagagcttctcctcattcccctcttatgcttagctatacctctggctctatttgtttcaaatgttgagtattatgcctaaaaagactgctgatgatggacttgatattttttgtttgcccctccagaaccattcttcaaccttcctcacccagctcaatgactgaactgaactgcatcaaccataccaacagctggattcagccaacggtgagtactggcaagaaataagaaagcaagagagtactggggtatcattatcccaaatttcaccctttccagctcaccatgggtgtctatactcctctatcaaatcctttttccatgtagccatcttccctgagttctggaaaccctagttttcctctcttcaggtcataagtatggccagctctggggtatgccaccattgccttttggtctatctgaacaccactgcatgttggtttcacttaaccccgagtatacatttgaaaatatttccttaattaaactttccttgatcaccccacttgaat

SEQ ID NO: 77237 - DNA, 1329 bp, Homo sapiens
tagttgccttctaagacattccccctcatttgtcttttttttttttaagacggagtttcgctctttgttgcccaggctggagtgcactggcatgatctcggctgactccaacatccacctcccagcttcaagcgattctcctgtctcagcctactgagtagctgggattaccggcacctgccaccatgcccggctaatttttgtatttttagtagagacagggtttcaccatgttggccaagctggtctcaaactcctgatacacccgccttggcctcccaacgtgctgggactacaggtgtgagccacccagcctggcccatttgtctatttttttaatctatctatctgtttatttattatcaagcggactcatggattcttattttattcattgttacaagctaagttgatatgagttgagtttctgtcacttaaaatcagaatattcctgaaaagccttcaggaacttctgagaaaagtgacacagtttccctgggcattgcactcaagaggtccttataatcttcacacctgccaaagtgcttcctgatgctgccattaaatcccttctggcccactctacaagtccaaattctctgacaatcaggctcaaagaagacaaatgtggccagtaaatggcccctagatctttgtggagcaatcatgtgagaactgagtatggctttaggaaggtaaggtacttcttgctatatccaaggttcttctcactatcttctgtcccttctcagcagcttcgctcaaagagctgggccagctgccgactcctcttccaatgtttccaaccatcctcagagcttctcctcattcccctcttatgcttagctatacctctggctctatttgtttcaaatgttgagtattatgcctaaaaagactgctgatgatggacttgatattttttgtttgcccctccagaaccattcttcaaccttcctcacccagctcaatgactgaactgaactgcatcaaccataccaacagctggattcagccaacggtgagtactggcaagaaataagaaagcaagagagtactggggtatcattatcccaaatttcaccctttccagctcaccatgggtgtctatactcctctatcaaatcctttttccatgtagccatcttccctgagttctggaaaccctagttttcctctcttcaggtcataagtatggccagctctggggtatgccaccattgccttttggtctatctgaacaccactgcatgttggtttcacttaacccygagtatacatttgaaaatatttccttaattaaactttccttgatcaccccacttgaat

SEQ ID NO: 77238 - DNA, 2054 bp, Homo sapiens
tctccctaagaaaacatgcagagacccaaatgtcacataaatggatggcttgggagtattagcttaataaccttcaaggaaggtattcttaaaaccctctctagtaaaatgacaacaaaatagttgattcttcttttcaaaaacctgatggtcatccttgagtgtttttactctcacctctccccaccccaatatcgaatccacgtcgatttccccactgtgctatcgacacaagacagacccaaaggcccagacacccccgtccatgctgccacagcatctctcacacagacgcctctccctctgatctcctacagtccatcagtggattatccctgcccccatagctggagagctgctctgcctggtggctttctatggccctgcatggtgaggctctggcttggtctcccaccagattgccacccagcctcacccttctgctttctgtttcttgtatttgccaaacttgttcctacttcaaggtccctctgcctggaccactctgtccccagagcttcacatggctttaaggtctccattcaaatgcccccttctgggagaaggccacctacagttactggcttrcccatcttcctgccatggtgttgtcacagcacatatcactgactggaatgatcccatttgaacagcctctcctcatttatcctgcctgcctctcttccctccttcttccacccctgccaccaaaatgtaagttctgccagaggagggtcctcacctgtcttgttcactctgtagtctggctatggtagctgtatagtatatatttgctaaactaattaaataaattatagtcaaatcattcctttcacatcgtgtaataaaactagtagactggctcctgtttttaaaaatattttaattgattttcatgaagacatcagtagaatgccattaatatcgcccctaggatttatttctccagattaaatttctcttattcctctaatctttctcaccagcctcactcttatcctcttaatcactttccagggccttccctggaggctctccaatttctccttgtcctcctgagaagctgaataaccttgttcttacggggacccacagtgaacctacagagggggtgaggcaaaaattctgcatggcagagggcttaaaaatggaggttttctaagctggcatagattcagatacaaccactttctagctcaatgaccttgagtgtgtcacttcctcagccttggtttcctcctctgtaaaacggggctgacaaaaatatctcaaagagcagtctgtggtgaagcttccaggagctttttccaacaaagcgcttagcataaggcctgctgcacaccaacacctcagtaaattacaactacttactaataaataggctaaaactataaccactttaactaaacaggggagccgtgcaaggatgctgagctgtatgcaggcaacattctacgtggtttcagatattgtaggtgaaaagaaaaggtaagcgagaagaaagattatttatgaaaaccctgaataaagcaaagggggcatgaaagaccgtctaaagcctgttcctggagtggcaggcacgaaacagacttcactaattgtagtgtgcacagtgaaagagccaactgagtgtgcaatagaagcaaatgtacagggcaaaagtctcacctgcctgaaggcaaagaacacctccttttcattcctggaagatgagctcatacagggatatcatccagggtatcacacacccgccttttcaaatgcagagcactcctcagccctggaaggagtggcagaggcttgactccacttccttcctttggaggccccaggacctgctcagagattcttgttaatggaagccttgcggccccagttggcagacattcactgagagatacacaagcaccaaactcagaaagactatttttaggaggtttatgtttagagcacacacttccacaatgacccagcacaatggggcaattctgagggtccaccagaactgatgcactgcaaaagcagtgggtaggcctcagagtgcttagagatca

SEQ ID NO: 77239 - DNA, 1198 bp, Homo sapiens
gcatcttctcatttgggcctctcaactcaccctagaagttagtaccattgtgcccatttgagaggtgcgaacactgaggctcagcaactgacttgtcagggtcatatgaccagtcagcagtagcatctcgattcaaacccagattgtcgtcactcagattcagactctcaactctacacagttctgccttcccaagaccagccacctctcttaaaagtagatttttaaaagtcaatcctctgatttctttctaagtatacatatttttttcctatcattcataaagcatttgtttcaagcaaaaaaactgaaaacctcgctgttcaagtagaaaatccagctatggctctataattctgaaattcccgttccaggaaatgtatactgttgactttttcaaaagattagtgagctgtgagccctctcctgagaggattacatcttacttcagggcgaccaggtggctcctgatgttctgaaatactcgaacttggccacacactctggaattttaaattagttaccagtatttactaacaaaggaaaacaacccatgtatataaaacacatacacccgcacacaaacaccctttattggttgccagataatgatttgtctgaagtgtgttgtctgagttgstgtgcgaatttcgtattataaaagcaaatgacaatagcattccaacagggacctaggccaaagtcaagaggaaagaatatccaaacgtagcattagcattccagaagtcaaatgactattattatgtcagtggggcaaaagcctatgcccattgagctgtttgtacatgacgcagtcatattgcactaacagacatttcactaataatgaaaaccagtaggaggctgagcgtaaagctggatgttatgactcgcgactgtagattacctgaatccagtaaatttactgtctcccacatctattgttctttttacaatattgttccacctctgcctcaaacaatacaatggaaaaggcgttatggatggcacatgtacaaagagtcaaacacctgccctatatttccaactttcaccttgcttcgcaaattatagcacaatgttacagcaacagcaaattttagtcttacagctgcccacttctgctgtgcaaaggacaagattaggaggattttggaaagaaagcaaaaaaaaaaatccacctccctagggacataat

SEQ ID NO: 77240 - DNA, 512 bp, Homo sapiens
gttgtcaagaagtttagatgaaatatcatgaaaatgtttggcatgtgcctggcacataggaagtactcaataaatgttaactatgatcatgatcactgggaaagataaaacacttttgattaaaggccagtataggaaaaggtagatttaggataccccaccaccactgccttcaaaggagctccaatggagaccatctggatgggcaagttgcttctccactctcagactcaaggtcattcatcatcttttgactgggaataatgatgataataattatacttcagtgggaagtcatattattaaataagagaattactaagtaaaatcactgagtaaaattcatggcagtagggtagtttcagggtcatatttttaaatacaattccagtcctttccyggaccttctgataattttattccactcaacccatctcactccagcttctctcccagaacccctagggaagggtttgttttaaataacaagtcatgttgaccaataatcttta

SEQ ID NO: 77241 - DNA, 1290 bp, Homo sapiens
aggcaagctacagaaagaaggtaacactggccctgaagaatgaatgggattcatcaggtagtcctttggtgtgaggttgagtaaggacctggatttctggtagatggaacagccaatgcaagagtttggggcctatgcaaggaatctgcggtgggcccagtgttagcaagaagggtccagagaaaattaattttttcaacaaatatttcactgccagtcactggtgaggcactggccatctactggtgaccaacataggacctgcatctgcccttaagggggcatcctgagccataaagtaaatgagtctaggaacatgccaacaaaccaagtatatatcactcaggaatatgctgagaaaccaaatagtgtcctgtgaagcagatcatggggtcaggcctctctgataaggtgatatttgagctgagatgtgaagacagaggatgagccagctctgcaaagatcacagagaagggcattccaggtggggagaccagcaagggcaaaggcctatggtggggaaactgggccacagaatacatcctgatgatacatggcatgttttctcatatttgtcatgtgatcactccagggggatgtgatgtttgatgcctcctataggctcattcaagaggaaccctttttggaaattcttctgaaatgagtgcagtagttgtgggttctgaattacatgaaaaccactcacgtgttcagttcagctccttttccaaacagacggccttcctggcatgctacttcggctgtgcgtcattacaacgtgcctgccgtatttgttctgctctggtcaggtccccaccccttcccatctgaacaaaactgccaatgagcaaattgccactttttaaccaaaggacaccaattatgtttcccctttactttcactgtggctatgaagaataaaacttcattaatcgtctcctaagtggtcctttcctaaacctaggttgaaggaagtttttmctactgacatcatctcatgactgtcagctaccattaattagatgtgaatgtctttctccatccacccacccagctcttggtttggaatgattctcggaaggcatttttgctgtttaccagagagagatgactaggaaatgtgtggattgcttggttgtgtcctatctgccaaagaaaaaccaggcaggagctgtgaggaaacaatggaaaatgacaaagagccaagtcacatctctcttcagcttctcctccctccctcaccctgtgcctgctctgcctccagttcacctgctcctgagctctgagaaa

SEQ ID NO: 77242 - DNA, 586 bp, Homo sapiens
taacaataaagaacccagttcccaacttcgacatttggctggtgctccggtgacgcctgtcccaaaagagaaaagccaaagaagtaaatctgagttacctgaacagaaattaaaatttcccacataaataaatctcatgatttccaattttctctcttgactttaatttctgtggctcactggcattgagtctttttttttttctttactatctgcatcctgagtatttcccatatgatttgtaaatggctctagtaacctctaagtaaacaaagtgttcattcattcrgccattctttcactcatttattcactcatcaaaaattatgaagtgccttgtatgtgctaaacattgtgttaggtgccagaagatatatagataaatagaatatatccttgtcatccgaaaagataacaattgagggctatatcgcaatgaacacttgaccttttctagtgcattccaggtttgcacatgtccgctcagaggccctggacataaaggagccatctgtcaaaacagactagactgtaaccttgaagagctgggaaacagagctgaaactcaggagttctcctcaagtca

SEQ ID NO: 77243 - DNA, 1651 bp, Homo sapiens
aaattgttaccaggcacgccatgctggtattaatttcaaattaaaacttagactatgtatgacctctttaaacagctattttccaattcgtttattttggctgtaattatgactgattgctcaattcttactggaatagctatgtgtagtttcattttagttgaagcttttacagtaataactggggaatattttctacataaatgtataagatacctgttttttaccttatagttaaaagatgacagacttgaacatctgatgtacttctccttactgcattgtaaaattaatttgtcttttcatgtggctacatctaggcagtttcaacaatttgaactttgttttatataagaaataaaggaaaataatcagccatgaagtagttaatttattgatattttatgtatgtgtgtgtgtctatacatacacagtcacatatataaacatgctcagaagtcagaataaaagtattccttgataagacattaaaatacaaagccatatcgaggtgtgcatcacatccccatttaaaaaaatcagacccctgcattttcttttgcacattgatactagaaaaagaacttcattgattgtttttattatgttaaaagtctcagcctttcttcttgacactgtattctatttaagcccatcctttgtcatcccaaagaaatccattttaaatattgttttggaagctagatttctgatgcattctacttctactagaccttatttttgtgtgtgtgatgtactgcacaaaattgtctattgatatgaagcaggcgttggaacgatttttcagctttgatcactagaatgaatcgatttttaacaaaccctcggtgtggcagcagttgctgatgttgtgtgtctaacaacttcattgaagggctgcatttgatttgctrttgctaagtgctgtctttcaatgagcttgtctgtgaagacttcctcaactaactgaaggtcgtttatcaggttagaaaatgctgttaaatgttatttactgattaaaatataattataggcagtctccattacacagaatcatcaatttgccattagtgctacttggtgtaagctttaaaaatgctaatgaaactgaaaactagctttccagctgaacatgctgattacactaaaaaggtatttgttcactttgaatgtgcaaggttagtgacaaaatccactgtggtgttacttttttcttagtgcttactattttttgtgttcagccagtagactagattataaggcattgttgtcttcacagaagaaccatgcaatcaaaagtctccaaaactgtgagcattctaacaactggaaacatgaaattataacaccactgactatttatgtcccatatgtgagctacaccatggggcaatatgctaaggtaaagaaataattgttgtcactggattcccgaaaatagcaatataattgcttgatctgcaatgagattgtcagtccttcctcttttaatccttatttgatttctacagccacttaacaagccaaactgtgtaaaatgtcaataaagacaaagtctttatttttttaagaattctcattaatattactgaaagcttattcatcaaactattttactccattatcataatctgttaggaagtaggaagta

SEQ ID NO: 77244 - DNA, 1183 bp, Homo sapiens
ttacaccagctccatctgtctaaacactagttcagttgtgagcactttaattacattcatacagcactggatattttcatgtaaaataatcttcccttggttatttgataattgtagcatgtaacatacttaatttttttttctttttttttgagacagagtctccctctgttgcccaggctggagtgcaatcgtgcgatctcagctcactgcaacctctgcctcctgggttcaagcgattttcatacctcagcctcccaagtagctgggattactggcgtgcaccaccacgtctggctaatttttgtattttttgtaaagatggggttttgctgtgttggccaggctgatctcgaactcctagcctctagtgatctgcccgcctccgcttaccaaagtgctaggattacaggcgtgagccactgtgcccagccaacatatgcttttaagagaagttaccaagactattggaaatcaaaagtattttatctttttatttcctagcaaaacaaattcaaatcgacagtaatagtctattttttgagtattctcctggagatttaactctgggctgaacttatacacgttaactttcacgtttaaaataaatttgtgtacaatttttgctttgtgttttaatattagaatcaatctaacactaataacctgtactgtaattatcgcctgtttttttttagttgtgacattttggggcctcygtaacaggatccttcctccctttcctttgccctgcccttcttgtcctttcttgttgagcaacaaactggcatgcccaagtggaatgcgccacattcagttgccctttagcctcacgtcggacaccctgtttccaaacacggctgagtcggctggattggctgtctctgtgcgactgcttctttgggggtatgtgtcaccggggctggtgcatgtatgtgtgagtagatggtaactcggtacgtgacaccaggctatgtggaactcaactgtgtaattttgtgtccgttttcttagaaagcgtttcttctgttggtaattaaggccatggaattctagagaactccccagtgttggttttcgttcctgtctctgaagcatagttagtctttcctttcccatcctatgagggtttctctgcttgtccttctctcttctggagatcccctttgctgttcacagcaag

SEQ ID NO: 77245 - DNA, 580 bp, Homo sapiens
tgtgcraatcccccatttgcctgcctgtggcaggcatggaaatcatagcaagagaacagaagaaacagagccaaagcccaggaaaaccaccgcacagtgcaacagccacatgactgggacagttagactttaaccaggacaccctcctagttccaaggaaaggcagtaactcaggcatgaatcttatcaggacaggaacagaatggcattagacatggaacacaaagacataaacagacgctgttgccatgaagaccctttaaaaataaaacaggctgggtacggtggttcatgcctataatcccagcactttgggaggtcaaggtgagagaattttttaatttaaaaatgtgagagattcaaataaacagtggctgtagtttgcttctaattttgttttgttttgttttattttttgagacagagtctcgctctggtgcccaggtggagtgcagtgacatgatctcggtgcacggcaatctccacctccagagctcaagcgatcctcctacctcagcctcccgagtagctgggattacaggcacaggccaccatacctggctaatttttgtattttttg

SEQ ID NO: 77246 - DNA, 726 bp, Homo sapiens
tcacaaagacgacttccactagatttgcattaagtcatctcaggtaatagcaagctcagggcctgctatggcatgtacctacaacaattttatcaagatacaagtgatgagagcctgtagaatctcacctttaactccactcttatctttgtgaaccaggccasgtcttaaaaatgagatctcttctagatagaaggaaaagaatagttggatgcagagtatgtgagcatacatatgagctttactcccagctcttgtgtgtttaaatagaattcagtagaaacagctccttctgtcctgtgattctgatcatatttatcctgatccctaaggtcatctttcctttcagtaccatgactggggacaggtcctaccaccagcacggaggataaatggctcattcaaaagacatatgcaaaggatgtggagaaataggaacacttttacactgttggtgggactgtaaactagttcaatcattgtggaagtcagggtggcgattcctcagggatctagaactagaaataccatttgacccagccgtcccattactgggtatatacccaaaggattataaatcatgctgctataaagacacatgcacacgtatgtttatagcggcactattcacaatagcaaagacttggaaccaacctaaatgtccaacaacgatagactggattaagaaaatgtggcacatatacaccatatacaccatggaatact

SEQ ID NO: 77247 - DNA, 536 bp, Homo sapiens
acaatttagcttctaactaaaaaaaaaaaaaaaaaatcctccttttgcctgagtagcacatgattcacatagtatgtgtgtarcaaaaagctaaaaagtatgctagtaactgggactggccagtgatagagcaagcagtgggaggatagtatgttgtccttttgacctcttttttattttctcccgagtcacctggtccaggaaatcagtaaccctccaaatccatggagcaaacatcctgccctcactgtgttcctgattggtgtctctcttctctccgttctgttccattctccccaacactttcatatgcagacttttccacatgtgctggctcatgtcatggtgatagatgattcctggtaaaggtcactagcccagggctgcatttatcagcagcagttttctgtcatagctggctgaattactcctaagcccggagaagaaaaacagctgccagaatgaatcaagggaactttgggtgggtatttatgaagctgtgtgcatgtgtatccacgtgcaagtatggtcataag

SEQ ID NO: 77248 - DNA, 707 bp, Homo sapiens
tggcttggaacatgagtccactactttcctagggtagtgcagtgcaagaacatgcggttgacaatcctaccacagatactatgcaatggggaagaaatatttttcctatggaattcagggtaatactgccaaaagaagataaacaggatgatggatggccacagaaaatgtctaccacatttgctagtctgacattttgtcaatcttctgagttttttggttccaccttaatagttattttccaactctggtcactgttacttcctcctcaactttgatcctcctctagaatttctgtaacatttttcacaatctccattacttaagggaatttatctagtaatagaactaatttactacacagaaaaacgtttttgtttgtagtcctgtcaaatattaaaagtgtgaatgcatcaacaatttgacaccctaaattcatccattcccttgtatctgtgtcagtctctggcatgagatcttagaaggccactttgtgctcccaatcctaaatcacattttaatggacaaaattcccccattctggcaaatcagtatgaggatctataagttctgcagagaattagastactgaataaaattaagctgtcaaaatgcggatgctaacttgcaattcctgttctaaccgaaacagcttcctctgattatattatcaatatagagacacagtcctgtgcagaccaatttta

SEQ ID NO: 77249 - DNA, 668 bp, Homo sapiens
gatccttctaataaataataagtttccttaccctcattactcgacgccaaaaatgaatcaaaacctttaccaatgtattttgttggatttttgttgttgttgttgttgttgttgttgttgtttgttttttgagacacagtttcactctgtcacccaggctggagtgcagtggcatgatctcggctcactataacctccacctcctgggttcaagtgattctcctgcctcagcctcctgagtagctgggattacaggcacacgccactacacctggctgattcttgtatttttagtagagacagagttttaccatgttgrccaggctggtctcgaactcctgaccttaagtgatccgtccgccttagcctcccaaagtactgggattacaggcataagccaccacactcagcctgtattttgtttcaatattcttctaacatgcatagcaaactccagaatttagagaagcttaatggtaagacttttttaaaaaaggatgatttacatattcaaaaaaaagcaagaaaaccaattttgattatgaaggaatcaagtcattgtcagtcatgtaaaatcagaggaatcaaacaattagagggtcacaggtaagtgaaaaaaggaggcagaaagtataggctaaagtgagagaagtggactggctcaactc

SEQ ID NO: 77250 - DNA, 605 bp, Homo sapiens
cttctttctacttgccttttctgtaaacatatctttygtaaggtatttctcagattagctttcgtttcacatgttgtcttttatagctgtaacaacaaaagtgggcagtgtttgaacctaatttttgaaattttaaaagcagttaaaaagtacttaaccaaagttacaacaggataaaatatgtttgtttatttgcatcttttattctcttctataatgtacatcataccactgtaacaaaagtgacattcttttaaaataaaagcgcttaaaattccacagatgaagaagaagattagaagcagtaagaatgggaaaagaaccaccataaaagcaaaaaatgtgaataacaggcaaaatagtttgaaattttaaaaggttaattagaagaccagattgtgaagcttttggtttaattccatctggttttggagtctcttcaaataaataatcaaagatatgttaataatatataaattttaagtcatcaaaggtaaccgttcttcctaggaaaaaatggaattcagaatagtgtctgtgtcttacccaatctgggaaaaatagaattattgatgccaaaagaaagttttgtattttcttttgag

SEQ ID NO: 77251 - DNA, 605 bp, Homo sapiens
cttctttctacttgccttttctgtaaacatatcttttgtaaggtatttctcagattagctttygtttcacatgttgtcttttatagctgtaacaacaaaagtgggcagtgtttgaacctaatttttgaaattttaaaagcagttaaaaagtacttaaccaaagttacaacaggataaaatatgtttgtttatttgcatcttttattctcttctataatgtacatcataccactgtaacaaaagtgacattcttttaaaataaaagcgcttaaaattccacagatgaagaagaagattagaagcagtaagaatgggaaaagaaccaccataaaagcaaaaaatgtgaataacaggcaaaatagtttgaaattttaaaaggttaattagaagaccagattgtgaagcttttggtttaattccatctggttttggagtctcttcaaataaataatcaaagatatgttaataatatataaattttaagtcatcaaaggtaaccgttcttcctaggaaaaaatggaattcagaatagtgtctgtgtcttacccaatctgggaaaaatagaattattgatgccaaaagaaagttttgtattttcttttgag

SEQ ID NO: 77252 - DNA, 605 bp, Homo sapiens
cttctttctacttgccttttctgtaaacatatcttttgtaaggtatttctcagattagctttcgtttcacatgttgtcttttatagctgtaacaacaaaagtgggcagtgtttgaacctaatttttgaaattttaaaagcagttaaaaagtacttaaccaaagttacaacaggataaaatatgtttgtttatttgcatcttttattctcttctataatgtacatcataccactgtaacaaaagtgacattcttttaaaataaaagcgcttaaaattccacagatgaagaagaagattagaagcagtaagaatgggaaaagaaccaccataaaagcaaaaaatgtgaataacaggcaaaatagtttgaaattttaaaaggttaattagaagaccagattgtgaagcttttggtttaattccatctggttttggagtctcttcaaataaataatcaaagatatgttamtaatatataaattttaagtcatcaaaggtaaccgttcttcctaggaaaaaatggaattcagaatagtgtctgtgtcttacccaatctgggaaaaatagaattattgatgccaaaagaaagttttgtattttcttttgag

SEQ ID NO: 77253 - DNA, 994 bp, Homo sapiens
atcaacttatttacccagcataagctgttcccaatattaaaatgcaaacttacaagttacttgaaaaaatgtgatacatcactgagaagctccacttcaccatatgctcccactctctgccctcaactcctaccccaatttggcacaaggtatttactgcttctaaagatttcattcctctttatttaattattttattttttctgtgtgtgtgtgaatccagctggtcaactctttatttcctatttttctttaagaagtgtataaatacatacacccacatacacacacacagccacatactctctcacacacacacaagtcactttaccatacagttatgtaaccagaggatgcctgtcctgactaatatccttttarataaagcatttgaaccatcacaattgctggtttaatctaataatttaatgtggaaatctactttcaagtaagacacccccttaaaaaacaaacattaaataaccaattggaccaaggcatatttgatattttaaatcttgtcacaaatcttatagacttaaataaagtgcagagttgagaaggaaaaaaattaacatattccgatgaataaattatgacctaagtatgggttacatgtaatcattcagatagacgctgtgtctcaaatgtaaaaggtatagatattttttggaaaagccaactgtttaataattagaatctttgatgtagaatgattaaatacagatttttacgacaattctttgtgagaatgtcactaatgttttactagaatctcaaagatgccaaattctgtaactagaagcaatgattctgccatcaaagttatctagacttaaatcctgcttgtatcagcttagttttgctgtgtgacttggaccaattacttaacctctctgtgactcagtttcttcacatgttaaatgcagataattttagtacccattattataagattcttgtgaagatttaacaaatcagtatgtgtaaagtg

SEQ ID NO: 77254 - DNA, 994 bp, Homo sapiens
atcaacttatttacccagcataagctgttcccaatattaaaatgcaaacttacaagttacttgaaaaaatgtgatacatcactgagaagctccacttcaccatatgctcccactctctgccctcaactcctaccccaatttggcacaaggtatttactgcttctaaagatttcattcctctttatttaattattttattttttctgtgtgtgtgtgaatccagctggtcaactctttatttcctatttttctttaagaagtgtataaatacatacacccacatacacacacacagccacatactctctcacacacacacaagtcactttaccatacagttatgtaaccagaggatgcctgtcctgactaatatccttttaaataaagcatttgaaccatcacaattgctggtttaatctaataatttaatgtggaaatctactttcaagtaagacacccccttaaaaaacaaacattaaataaccaattggaccaaggcatatttgatattttaaatcttgtcacaaatcttatagacttaaataaagtgcagagttgagaaggaaaaaaattaacatattccgatgaataaattatgacctaagtatgggttacatgtaatcattcagatagaygctgtgtctcaaatgtaaaaggtatagatattttttggaaaagccaactgtttaataattagaatctttgatgtagaatgattaaatacagatttttacgacaattctttgtgagaatgtcactaatgttttactagaatctcaaagatgccaaattctgtaactagaagcaatgattctgccatcaaagttatctagacttaaatcctgcttgtatcagcttagttttgctgtgtgacttggaccaattacttaacctctctgtgactcagtttcttcacatgttaaatgcagataattttagtacccattattataagattcttgtgaagatttaacaaatcagtatgtgtaaagtg

SEQ ID NO: 77255 - DNA, 753 bp, Homo sapiens
gcattaacatagcttgtattgtcttaaaattattccagattggttccacattatggcagtaaacaagtcacctcaaatgtctgtagttattgctgtaattgatcaacttgtcaaagcagaaagtgaaagaactcagacttrttgagctactcttaagttacttctgcagttggtgactgagctacctgctgagtggatagggacctgacaggtggaattgtgcagacagtagctatgggacattgggtttccttctttgaaaactatcaggtccagaagtcacatataactccaacttccaagtttttcaatgatacttcttcacaagtgagatcactgtttctaaataaaataaaagaatggactggataaagaaaatgtggcacctatacaccatggaatactacgcagccataaaaaaggatcagttcatgtcctttgtggggacatggatgatgctagaaaccatcattctcagcaaactaacacaaaaacagaaaacgaaacactgcatgttctcacttataagtgggagttgaacaatgagaacacatggacaacaggaaggggaacatcacatactgggcctgttgtggggtgagggactaggggagggatagcattaggagaaatacctaatgtagatgatgggttgatgggtgcagcaaaccactatggcatgtgtatacctatgtaacaaacctgcacattctgcacatgtatcccagaacttaaagtattaaaaaaaaaaaa

SEQ ID NO: 77256 - DNA, 1036 bp, Homo sapiens
ataacttactcctatgtctttgaaacagtytttatgaggttcagacagttattagctccattttataaatgtggagagcaagacacaggcaggtgaagtaacttggccaaggttgcccagttagaacatagtagagccggatctcagcccctgctctgcgttgcctcttgtagtcaatagacattgtatttcttcagtttgtggatttctgccttcccatctgtgcccatgcaattctgtcccatttgaaacagcttcactttttctgcctagatacctgtttctcatttgttgagacctaaaataaactccaatttgaggtgaagccatctctggaactctctctagctgttatcctccctcctagtaactcatagcacttaaagtttgtactgttcattcacattcaatcatacacaattttccaacatattttgccttgttattcaactctctggaatgtttacatgccctgtttcctcaaacagattgtaagttcatagagggccaggcaaattggtatatgtctgcatgtccttcatatacctagcacaccattgtgtaacagtaggtgttcacaaaatgttcattggatgacttttggcccagcttctaaagcaagggtctccaaacctcaggccacataccgatactgctctgtggcctgttaggaaccaggccacacagcaggaggtgagcagctggtgggtgagtgagtgaagcttcttttgtatttacagccactccccattgctggcaataccgcctgagctctgcctcctgtcagatcagtggcagcattaggtaggagcacgaacccttattgtgaactgcccatgcgagggatctaggtcgtgcactccttgtgaaaatctaatgcctgatgatctgtcactatctcccatcacccccagatgggaccccctagttgcaggaaaacaagttcagggtttccactgatcctacattatggtgagttgtataattatttcattatatgttacaacattacaatgtaataataatataaatacaa

SEQ ID NO: 77257 - DNA, 1036 bp, Homo sapiens
ataacttactcctatgtctttgaaacagtctttatgaggttcagacagttattagctccattttataaatgtggagagcaagacacaggcaggtgaagtaacttggccaaggttgcccagttagaacatagtagagccggatctcagcccctgctctgcgttgcctcttgtagtcaatagacattgtatttcttcagtttgtggatttctgccttcccatctgtgcccatgcaattctgtcccatttgaaacagcttcactttttctgcctagatacctgtttctcatttgttgagacctaaaataaactccaatttgaggtgaagccatctctggaactctctctagctgttatcctccctcctagtaactcatagcacttaaagtttgtactgttcattcacattcaatcatacacaattttccaacatattttgccttgttattcaactctctggaatgtttacatgccctgtttcctcaaacagattgtaagttcatagagggccaggcaaattggtatatgtctgcatgtcyttcatatacctagcacaccattgtgtaacagtaggtgttcacaaaatgttcattggatgacttttggcccagcttctaaagcaagggtctccaaacctcaggccacataccgatactgctctgtggcctgttaggaaccaggccacacagcaggaggtgagcagctggtgggtgagtgagtgaagcttcttttgtatttacagccactccccattgctggcaataccgcctgagctctgcctcctgtcagatcagtggcagcattaggtaggagcacgaacccttattgtgaactgcccatgcgagggatctaggtcgtgcactccttgtgaaaatctaatgcctgatgatctgtcactatctcccatcacccccagatgggaccccctagttgcaggaaaacaagttcagggtttccactgatcctacattatggtgagttgtataattatttcattatatgttacaacattacaatgtaataataatataaatacaa

SEQ ID NO: 77258 - DNA, 601 bp, Homo sapiens
ctcgtttgcaacaatgtggaatcaggaccctggaaaagtttctcctggagatgggggtaggggtgggataggaaagaaggaagctttaccttttgtcatccttgtaccactggaattctgctgaggggactgctgaggcttcacactgcagtgtccccttttgtcccacggggacacctgtacccttggcttctgaaatgtatggtggatctgcaaaaagaagatgtctcatagccgcccccccaccttttttttttttttttttgagatggagtcttgctcttgtggctcaggctggaatgcagtggcatgatcttggctcactgcacrttctgcctcccgggttcaagcaattctcctgcatcagcttcccaagtaattgggattacaggtgcacggcaccatgcctgcctaatttttgtatttttagcagcgacggggtttcaccatgttggccaggctggtctccaactcctgacctcaggtgatctgctcgcctcagcctccaaaagggctgggattacagggcactgcacctgatctacagcattttaaaatgaagaaggctgcttcatttgttgattttgtttctcagtctctg

SEQ ID NO: 77259 - DNA, 645 bp, Homo sapiens
  misc_feature (1)...(645): n = A,T,C or G
ctttacaacaagaaaactgtacagtgctggaggctagaagtcaaaatcaagtgattggttggaccatgctctctctgacagtgacaggggagaaccctccctcgcctctcctggcttctggtatgcaccagcaattcctggcgttccttggctcctagaagcatcactcctatcacatggtcatcttcaccctgtgtgtcttcacactaccctttctctgtgcatgtctgcccgaatccctttttataaggacaccagtcagattagattagggtctaccataatacctcattttaacttaattacctttgtaaagacctttttccaaatatagtcactctctgaggtactgatggttaggatctcaacataccttttttgggaggacacaattgaacccataatarggtgtttgcaaggaagagttaaaatttgaaagaaaggtggtatttgcttagatagatagggcacagctttctaggtgacaaaaaaaaaaaaaaaaaaatctgtgaagaacaaatcatcatgttggtccaggantgagaactagcatggcctggcaggagagctgcagcagtggcagtggtggcgtggtataccagttgtttagactaagttctacagagggcttctcctgggcccctc

SEQ ID NO: 77260 - DNA, 937 bp, Homo sapiens
atttttttctccaaatagctgttgatatctgaacacaatttaccaatattcagtggtgacacaatttttctattcaaaaacaaaccatggttttaaaacagaaagtgtttttgctaatatatcctgtcaccaaatgctaaagcagcttctgaagtccatctgaaatcctttttttttttttttttttttttttttttgagacggagtctcagtggcactgaaatcaattttcttaatgagggcatcacagttaaataacagcactagcccagctgccttttatccatatcttctcaagtaactttaaacacagttcttaattttaaactggcaacaataaaaaaaaattattgtgccacagaagtaactgtgagtacactgttctcattctacaactaactgattttatgaccagacatgtcttttatctgtaaagattactgtttctcaactttctactaaagaaaaatgttttcgtagtaaaagcataatagagatgttgagaaacttcttctgcaaaaggtcaaatagtaaatatttcaggccttmtgggccacatacactgtctaatacaatttgattttttccttatttttttacaaccttttaaaaatgtaaaaaacatttgtagttgtctggctggctgtgcaaaaacagccaagggccagaattggcctaagggtcataagtttgctacttatccatatagttggccatatggatctgaaggcaaagtaaagcttaaatcccagctctattatttcttcttggttttgacttggtcagttacttaaactctgcgtctcaactgtaatatgtctgtaatagcatctacctgacagtatttccatgagagtaaaatgagttagtatatataaagcagtcgacacaaactcctacatatgtgttaggcagcatctcacacatatattcaaag

SEQ ID NO: 77261 - DNA, 937 bp, Homo sapiens
atttttttctccaaatagctgttgatatctgaacacaatttaccaatattcagtggtgacacaatttttctattcaaaaacaaaccatggttttaaaacagaaagtgtttttgctaatatatcctgtcaccaaatgctaaagcagcttctgaagtccatctgaaatcctttttttttttttttttttttttttttttgagacggagtctcagtggcactgaaatcaattttcttaatgagggcatcacagttaaataacagcactagcccagctgccttttatccatatcttctcaagtaactttaaacacagttcttaattttaaactggcaacaataaaaaaaaattattgtgccacagaagtaactgtgagtacactgttctcattctacaactaactgattttatgaccagacatgtcttttatctgtaaagattactgtttctcaactttctactaaagaaaaatgttttcgtagtaaaagcataatagagatgttgagaaacttcttctgcaaaaggtcaaatagtaaatatttcaggccttatgggccacatacactgtctaatacaatttgattttttccttatttttttacaaccttttaaaaatgtaaaaaacatttgtagttgtctggctggctgtgcaaaaacagccaagggccagaattggcctaagggtcataagtttgctacttatccatatagttggccatatggatctgaaggcaaagtaaagcttaaatcccagctctattatttcttcttggttttgacttggtcagttacttaaactctgcgtctcaactgtaatatgtctgtaatagcatctacctgacagtatttccatgasagtaaaatgagttagtatatataaagcagtcgacacaaactcctacatatgtgttaggcagcatctcacacatatattcaaag

SEQ ID NO: 77262 - DNA, 647 bp, Homo sapiens
aagggattgctcataaaagaacttgttatattttctctcttgaatgtgcatgactgtgacatactgtattttgccattgttaaactcagtttaatagaataaatattcaaataagaattgactataccaatattcyagtagagaaggaataagctgatagacgtgtctttgagttctgtcaggcaagacttaaccaaatcttgacacacggttaaaattggttgttaatgaaaggtaactagataaaataggtatatatttgcttaagaacattttaaaaatatttctttttttagatttggaattcacaataggtttcttccgttcctcctttgtaaattatgaaatatttattgtttagactgagtaatatgacatgaaacaacaaacctgcacatttctaatttataacaaatctgtttccttaatgggtggaaggaaatctgaggacagttctaaggagtcttgtctgctttcagtgcgatcttctagtcatactgaagacaatacctctccagattggtctttccccttcttctcctctccccggtcaacgtcaatcacatgcaccactccaggttttagaatcaggtcatccgtctctacctgactcctgttgtcctccacctccatgtagcttccttttg

SEQ ID NO: 77263 - DNA, 1044 bp, Homo sapiens
aggaagtaccttcgtataagcccaagaaacaaaagggttttgcttcttttgcatcaaagctgctccttttggagcatcacctcaatgcagtcttctcttttcagtgtgacaaaactttggataaatatccaagaatccttcctttactacacaaggagaaaaggagaaagtgtattgaacagcattttttgtgcttggcatgaagaaaatcagtcctgcaagaatgtgagaaaattttggtatataagccaaacaattgcttcatgagcactgcctaacagctcatgttcaccttggaagaaaaaggtaatgaaacataaacaagctttggaactaaggagaaggagcagaaatgcttacaaagctcccaccctgcacaggcgccagacacagctactgacagcccaggcaatacttggcaggtgtcggagatggaggagagaggctaaaggtgattcattctcaactccaaatgagaggtcccctgggtaacacttaatattgcttcatctctgatttcctatcagctgcctttgccataatgggagatgtccatgggaattaaactgaaaagaggcctggggttaaatctctatagtgcttctgtcagctaaggagagagagatgggaaacttgcacaagggctggtgggctccccacccctcctttttaccaggaacaggctccccyaacttaaaaaaaaaaaaaaacaaaaaagcttttatcccaaaatcagatatttattttttagcatatccagatcaaaaggggaaataattccaatttgtttatagaaaatgtagacatgcccaggggttatgataaattgagatctagacttcatgtgggatttgaggctgcccagcttacaataatgctagactgtttgcagtgtctttaatgcaatgtcctcagacctttcaaagccagtataattgaaaatcgtaggcaggggaagattaagctgtttgatcaaggataggaagagatactttttcattgaagtttaagaggagccaggaagttggggggaaaaggcaaaaa

SEQ ID NO: 77264 - DNA, 1076 bp, Homo sapiens
acaattgcaaaaatatggcatcagcctaagtgcccaccaaccaacaagtggataaagaaaatgtggtatacatacatcaagaaatactactcaaccataaaaaggaatgaaataatgtattttgcagcaacttggatggagctggaggctattattctaaggtaagtaactcaggaatggaaaaccaaatatcatatattctcactcataagtgggagctaagcctatgaggacccaaaggcataagaatgatataatggactttggggactcagcagagaaagcttgggagaaggtatcaaaaaactacatattgggtaagtgtgtacacttcttgggtgacaggtacactaaaatctcagaaatcaccactaaagaacttgtacatgtaacgaaaaaacacaggtaccccaaaaactattgaaattgtaaaaagaaaaaaaacaagtaaaaaaaattattattaacattttcagaaatgaactgagcatgaagcactgagtttcccagtttatgagtcaatgacactcaactcatccaacctgctttctctctactgcatgcccttggccacccatgaagcatatggacatatgcacaaacacacatgcctttaagcagcatccctcaaatcacatcaactcagcaatcacctgctttccctttcctacaaggctaatataatctcaggtacctactacctccactctcccatgttaaactgctagacacatctgcagcttccactcctctttccatgatatgtttattaaagtaggaactagcacttgcttattattcttccatagggctagcactatgcgtgaaacatggtaggcacttattayagcaagggagggagggagtcaggaagttaggctggcaggcaggaagaattgttacagttcaactaatactaacttgccccaacttttgttattatcttgtttctttttctcattttttgctctgattccaaggtcccggggggaaagagtgatccaaaattaaaatcagatactttactgctcaaaataaatgtatttctagaagaaagtttacagatataaaaatag

SEQ ID NO: 77265 - DNA, 564 bp, Homo sapiens
aactttcatcccagaggaattaatccttttgcacttccagattattacctggccccttcagcagattctgaggaagcccaaagggtcaccctctgggtgaagctgattcaagtyatgccacagaactagagagcagggggcaatagccacaggtgggccaggtcagcctgtgagatgaggcggatgctgcagtgtctatttgagagccacagagtgtaagagttgatagcacatgcagatcctgtgcccaaagaggtgcatgatgtggaacaagtggcaagggccctggagacaagtgaggccagaagacctgggtctgaacctaaataaaagctgccagacacaccaattcttaggtgctgggaagctcttaaatgaagttaatggcccagcaattccatgagttaattacaatgtcttcattcaacatttaagagacctgagtggaagtcagatggtgtaagtggtaaaacaggatcctaatagggtctagtgactccaaacctagaagtatttccattttattatatcatcatagttcagcaagccaagatgtaaactatg

SEQ ID NO: 77266 - DNA, 1225 bp, Homo sapiens
tgtgtatttataatagagtgatttctattcctttgggtatatacccagcaatgggttgctgagtcaaatggtatctgtctttaggtctttgattttcattcaaggtttacttattgagcctctatccagtagctggcactttccttttgctttttgagaccagtctaaaagaaaaaaagaccacatatgcaaacacatcttcattttaaagccttgccatctatatttatttctttatggcacgatatggttcatcttccttctgtgtattgttagctctatgaggccaggaacgatgtctgtttctattgtgaatcaccaccatattcacagcaccagcagagtgtggggcatatagtaggttctcaataaatattctgcatgaataaattaattagttgacatcttttctttctgctcctgatgccaatattttttgtctggatgtcatttatatctcatacatcctaaaacacagacttagagtcagaatttctgggatagactattggctttgtaaattcctagctcttgggaaagttctttaatctcttcatctgtacttgtattttttatctgtaaaatggaagaatcatagtgcttgcctcatcagtttgttatgtgtattaaatagcataatgaccatgactagaagacacacgcacacacaaacacatacacgtcagtgacagagctatgatttgaactcagttctgtgtactccaaaaattgttctctttgcagaacatttgcccaaacacacatttattaaacaactactatattccagttgttattataatgcccattttataggtaatcaaacagagctttagcaaatttaaattatctgcatgggtaacccaacaagaaatctgtgaagatgaggtcccttccatgactccaatttttgttctttattttcaggaaagcaactaccacaaacaatgttgtttcttgtgtttcccctagatttatggccccaaattacccagaatacatcaaggccatgactatttttcacagctaagtggatcttctactcaaaatttattgtagttcatggcaagaatttgaaggttataaaagtctagcaataaaacaccctgaaacttacagtttgagtgaaaattgctgaaattratattagggttataatttgtcttccctattttccacatattttatgaccactgtagagagtttttgttgttgttggttttta

SEQ ID NO: 77267 - DNA, 2070 bp, Homo sapiens
gaaccaatttgtaccccaatcacaaatctcctctaattcctcattaaatgcctgaaaatgacacagacacacacacacacaaaagaaaacatgacgattcctctattgagtacttctttgtattaaacttgagtttgtatcagacaaattcacttaagatctggcagccattcctttggagacaaatgtcagggctaggttcctatctcctaggaacctaggaaagaatgaaactgctgatataagtattttgaaagtatctaaaatgaattacactgggaggcaaaggtgaaaaaattaaaataaaataaaaaaataaaaaagtaattacattcttaaaattacttaaagaaaatgtggattcataatttggctactgaaaataaaagttagaatgcaaatcttttgctatgaaactcgtgccacaaaattgggtcatggaagatctagaaaacagaatcagatactttacatatataaaaaaattgtctccctaaatttattctatgtgtccaagtcaggtataatgcaaaaactcataaccataacaaaataaaaatattagcaaaaactaagtgttcacattttaaaagctaaaaatcttaccttttaaaatataattaatgtggacaaaaataactaagaataatttggtggttggttaagcactattttaattactccttgaatttctgggctttgtcttctaggtatcactgtataaatataatttttctttcttaatcatgaagaaaggataaacatgatcctctagtgtgaaggtgactttgtatttgggtgagcagaattttcctgctaagtctcactactttaagatttgtaaaaatcaaagggttaagtaatgtttttgctattttaaatattacatattttagtatttgaaggattttgctaacaagttatccacattatactttatcaaccttaattttcatctagattaaaataatcatgcaaattattcatattaaattatgagattaatttgtgtaaattaatttagtaaattatttgcataaacttcttttcttattatgcattagctttagtccctgagaacccataagaccaaactgttaactcaatgtatatatacaagtctatcaattgtcctttgaatataaaagctactgtttatcatttttttctctctgtgatgagcctagttttataatgggcattcttataatcactttttccttaataaagaaacctaactctaacctttatgttctttggtatgtgaaaggacacactttgagtttaaagtgtttattagtttttggcagtcaccaaggaagctgactagtcacttgtaatgtacaaattttgcagttaaaaaataaaaaagaaagaagtcttggccaaacaatgaaatgacaaaagggcatttttgtctttcccaaataccatttaacattctaatcttgtaaaagatgacccaatgatttttcatgaattaaatatattcagaatagcagaatattttaagctagaatatatcacaaaatgcaataaggacaatatgctaaataaatggcatttctgacctcatactattggctgattcttacctaccgtgtataagaaaaagccaaattaaatattgtgccaatccaggattcattagcagaacgtgtcagctgtgtaaaaccttcctcacaagtgtctgatcagtactctggtgcatacttgttgagcttcatttacaagattgtcagaaaactaaatgtattttcacagtaccttccaaatctttaatcaagcaacatctaatgaagccaaaagacaatttttcaattcttttccacttcctttttcttccaagaggatatttatgaacgtagaaaaaagatgacacacaccttagtggtgcggaagagggatatctataatccacatattaccaaatgagaagttcaagtgctattcttcacttcaaggggaactggaaggaaggatttgttttattacaggtctactaatgccaactctaaatccccattcttttacgggagagtttataaaatccmtcttccacttgtgaaa

SEQ ID NO: 77268 - DNA, 566 bp, Homo sapiens
ccagtcttttctactattcaatataaaatgattagatgaacaccaaaactgataaaaatgctgtatcttgcttaagtgaaagatggagaggaaatacatacaaataagaagtatagaatatcacttggtggttttgcctaatagaaaaagttacaaaggataatagatggttgtgataaaatcagccctggagatcgtagaggaataaacgctgtccaaaggaaattaaactgcagatctgcctacattcagtaaaagggcttcccctaagaaccacccctcccatgtcaagtgaaacttacctgttttatcaaattgtcagtttctgttaagtgacataaataataaaaaacacttagaacagtgcctgaccctctagttkttcactattgctattactgtttttgtataatcagtcagttcttgagaactaaatgtaccaaatatcagcaattttatgtagctccacctcattattaatactttgagtttgttagcagctgagcttagaagctaaagtttcttgttgcatctttagtcctaattcatacagaattatttaaaat

SEQ ID NO: 77269 - DNA, 954 bp, Homo sapiens
caatttcctctgctttggttttctttcccacacatacctaatgttatattaaactactaattttttagactttgtcctcaaatagaacgcaaacccctttatgacagcaacactatttatttgtattctctttatctccattgggtaggtgctcaaaaaatagtttttgaataatcaaatggaagaatgaactatctaaatgtgtattcaggagccagatatatatttatggagggatatcagaagaagaatsacaggtagtcaaataggaaagcaaagagggaaatcagattatagagcagctgtaaaagcctagagaactcaattaacctaagattttaaagggctatgtcacacagattttagtttttttaaataaaattctgtagcatgaaagcaaaaacaaatacaaaaaaaaaaaaaaacatttcagctgattattgacatgacaagctaccagaaaattgaaggaagttgctagaaagaagttctagcaagaatcaagaaactaggtcttaagtttaattcttactgcttatttcttaagtgtaatccctggaccaacagcctcagcatcacctgggaaaggataggaaccatcattttttagggaactcaccctagagctactgaatgagaaactccaaggcaagggccagaactgtattttaacaagtcctccaggtgactctgatgcaggtcaaagttaggaacaatgccctaaactgttaaaataactgaaacgtgaagctttgctgaaaaaggagttaggataactgccagaatagagaggacagttggatcagatgtacagacatcttaatggttataacaaatgataatctgattttataattaattacttcctcgtacactgagatgagacccaagctcttcatacagctgccttgcctagtaggcaaactcctttcattcacagctgcaataggaggc

SEQ ID NO: 77270 - DNA, 391 bp, Homo sapiens
atacacaggacacagcgagagatgagagagagtggggggtgggggaggtgagagacagtgggaggaggggggagggggaagagagtgggaggaggggagagagagttgcagggagggaagagagagacaaaagcaagacacaacctttgtcctctattcatgtcaacttgcagtttctggacacaaactagtaggaaatgtagagcccagaaagatcgtgtcagagaacttgacgagacagtgtagatatagtttatctgggtggggcggggtggggggaaatcccaatttttctaaaacaaacaaacaaacaaacaaaaaaaacaccayattcttggtagaggttttttcaaaaatccaacaataaaaactactgggcttctctaaatgc

SEQ ID NO: 77271 - DNA, 640 bp, Homo sapiens
tgatatatgtaaataaacatacttacttcacaatctttaagtctttaaaaattatgtccttaagaaagtctcaaatgtattggccttatgtttctattttgatctctggctccatgtgttaatgactctgatatttttctgacaaataaaaggttttaaaaattgctattgcttatttgggttcttcctaggttatttcttctcattagtaacatttctggggaaagatgtcatgctcttagtgtgcatccaacatgaaaaaatatttcaaaataaaacaatagtaattttttaaaaaccctcttacctttgaaaagaaccatcgccttatgccataatcttcctcttgctatttggctgtggttattttttaggattggtatatgtctggcatctagaagacattaaaatatttttaatgaagagtcagtgtcatgtgggaggaaaaaattcgtatcctgggatatgggtsgaacttcatgaaagtgattgtgtctttcttatccaagggaagaagtttttgttctttctgaatgaacttgagggaaaaaggcaatcaatgtttttccagtgtaacctgatagattctccaagtcctcaagttcaaatatttattcttttgtctttgtaatgaaaacaa

SEQ ID NO: 77272 - DNA, 644 bp, Homo sapiens
aaaagacaagccataaaacaagaaaagacaaatatgtagtctatatatatgtcttatatataagactacatgaagtagtcccaaaatgtaataaaaacaacccaatttttaaaatggacaaaaattcaaattacttcactaaagaaaacacacagatggtaaataaatgtgaccatgaaaacagagtcaacatcattgatcatcagggaaatgcaaattataaccacgacgaaatatcactacatgcttactggagtggcaagaaagaaaaaagaaaaaccatcaataacaagtcctggtgaggaaagagagcgccagctctcctacataactgctgcaaatgsagatggtacagccactttcaaaaatggtttgtcaatttcttataaagttaaacatatagctaccataaaattcaatgctcctaaaattttacctaaggaaagtaaaaactcgtattcacagaaaagcctctttggagaagtttacagtgggtttatttataatatttttctttttactgttgcaacaaaaatgactgcttgcatcaaaccaaatacttatatttcatgcactccctccactggtttctatgctttctctttatataacaatttcctacacatctgtagttctctttaggg

SEQ ID NO: 77273 - DNA, 1205 bp, Homo sapiens
gtttataaaataactttataccaaagcctccttttgttgaaggaggtttcrtaattgagtaatcagacctcaaacattcaaagattacgtttatgtaagatctacgtattttattattgttctaacaataatagactgtttttatcattgtcctaatagtgagagacaaaaatatgaaaaattcactgttttgagatgacataaccctattgaccattggcaatctcataattgctgtcttcgaggcattacaaatgagaaatcaggtttggagttactggatttggaaactggaagaagtcttagcaggaaggagccaggcttcaatagggaaagtagcatatttatattagcagttcagtagaaaaaatttcatatgtgaaaccatttctgtaggtgtataaagggctgaacaggaaaacagaagagggtaagaaaacccagaatatggcagctgcagatagctgctttgcccttaagtccacagggacagggaaagaggataatgttgaatccagcagctggctggtggggttagaacaaccaaggtatatcaacaacagcccacagaagccacgctgagtagaaataaaggggagatacatgttggttgctctctcctgatctccagttttctacccgaattccccatctgccaaatctaaccagaagttagttggctaagaagcttggaaaatgtaattttacaagtcagcctcctgcaatacagaacaaagtaagagaagcacaggagaataatatcaggacaaagaagcaagtaaccaggaacaggatgtctaatacaacttcgtcatttataaattattgaatggagagctggcactgtgaccagcaaaaggatcccaataatcatgggttaaattgcgaacattctctcagcaaatatttattgtgcagctctaatgtgccacacagtgttctaggtactggggacagagtagttaccaatagagatgaagctcctgcctcatagaacttataatcaaatgaattttccaaattatttgcatcagcaaatcattgcactgatacaaaccaaaaacaatctaccacaactatccatgagcttgttccaccaactcatactggcccttttcttggtataagagtgaacactccaaccacagtatctacctgggtaaaccttctttcttccaaatgccccttcacattcagaaaaatat

SEQ ID NO: 77274 - DNA, 1205 bp, Homo sapiens
gtttataaaataactttataccaaagcctccttttgttgaaggaggtttcataattgagtaatcagacctcaaacattcaaagattacgtttatgtaagatctacgtattttattattgttctaacaataatagactgtttttatcattgtcctaatagtgagagacaaaaatatgaaaaattcactgttttgagatgacataaccctattgaccattggcaatctcataattgctgtcttcgaggcattacaaatgagaaatcaggtttggagttactggatttggaaactggaagaagtcttagcaggaaggagccaggctycaatagggaaagtagcatatttatattagcagttcagtagaaaaaatttcatatgtgaaaccatttctgtaggtgtataaagggctgaacaggaaaacagaagagggtaagaaaacccagaatatggcagctgcagatagctgctttgcccttaagtccacagggacagggaaagaggataatgttgaatccagcagctggctggtggggttagaacaaccaaggtatatcaacaacagcccacagaagccacgctgagtagaaataaaggggagatacatgttggttgctctctcctgatctccagttttctacccgaattccccatctgccaaatctaaccagaagttagttggctaagaagcttggaaaatgtaattttacaagtcagcctcctgcaatacagaacaaagtaagagaagcacaggagaataatatcaggacaaagaagcaagtaaccaggaacaggatgtctaatacaacttcgtcatttataaattattgaatggagagctggcactgtgaccagcaaaaggatcccaataatcatgggttaaattgcgaacattctctcagcaaatatttattgtgcagctctaatgtgccacacagtgttctaggtactggggacagagtagttaccaatagagatgaagctcctgcctcatagaacttataatcaaatgaattttccaaattatttgcatcagcaaatcattgcactgatacaaaccaaaaacaatctaccacaactatccatgagcttgttccaccaactcatactggcccttttcttggtataagagtgaacactccaaccacagtatctacctgggtaaaccttctttcttccaaatgccccttcacattcagaaaaatat

SEQ ID NO: 77275 - DNA, 1001 bp, Homo sapiens
  misc_feature (1)...(1001): n = A,T,C or G
ttttcatccatttatcagtatttacacctcagtgggtaattgacttatctttttgaaaatgtgctttctacttctctcaatcctattcagctcattcttatttttttctaagtttaccttcagtcaatcccttacagccatttttcagggtagaaggattctttacatactcctgtcaatcactcctgacccctatgaaatgatatgattgtttttttctgtctttttattcctcagttttaatttgcatttctcctgaatatattacttccctttagtattgcagcctttgcttcttcagtcctccctaatcctcaggatcaggaggaaaacacamcccaccctctactcccactttcagacctttggccgcaccatatctcaaatgctttaactctgttggtatttataaaacatctgcttaacacgtatcttcataattgcttactcttaatctttaaatgaatttatttggagacttcagaaaaaatatttgactactgatgcagttaacttaatggttagatgtctatttaggattactgtatcttattagatcagtttttgaaagttatactttcataactaattgtctaattaacattgactaacataatacagtttgatgccttctcaaaaatattttacttttactgttatgttactttttatatttttaatgnnnnnnnnnnnnnnnnnnnnnnnnnnnnnnnnnnnnnnnnnnnnnnnnnnnnnnnnnnnnnnnnnnnnnnnnnnnnnnnnnnnnnnnnnnnnnnnnnnnngaattcaatggaatttcaaataacagctcaagcctgtaggctgccactccacatctgaaacaatgcttcccactgtttttctagttgacacaatttattaaaacctctcaacatatacaaataaaattatgataagcccccaaatccaaccagaacgccacgcatgaaacatttaggtcataatttaccttacagagtcagaaaaaaaactgagaaaaa

SEQ ID NO: 77276 - DNA, 438 bp, Homo sapiens
cagctgcagccccgcactgggcaggtcctgggctccagaccttcttctgactggctgtgccgcggggccacggctgaggctctgagtgtgtttattaactgtcaaatgggtcggagcagagccccccgccctgtgaggttatctttcggataaaaaatgaggcagccgtctgcagcgcttagccccacgcgggcccacactgattgtgcagtcacgagactaggtgaaaagagtaatcaaggaaaaataaataacaacacacttcctgtttatgggccttagtgctgctaaacccccgctccaatgtcacctttcctgcctggccgtctgccgcagagtgaggacagcagggtgactgagagcacaggctgcagaaccacttcctggttcaaatcccsgctccatctcttcttggctgtgtggccttgggcaggttac

SEQ ID NO: 77277 - DNA, 674 bp, Homo sapiens
caacctctgcctcctgggttcgagtgattctcctgcctcatcctcccgagtagctgggattacaggtgcgcaccaccaggcccagctaattttgtatttttaatagagatggggtttcaccatgttggccaggctggtcttgaactcccgacctcaggtgatccacccacctygacctcccaatatttatttttgagatggagtctcactctgccacccaggctagagtgcagaggcgtgatctcggctcactgcaagctccacttcccaggttcaaaggattctcctgcctcagcctcccgagtagctgggattacaggcaccctcctccattcccggctaatttttgtatttttagtagaggcgaggtttcaccctgttgggcaggctggtctctaactcctgacctcaagtgatccacctgcctcagcctcccaaagtgctgggattacaggcatgagctactgcacctggccatatgtgcccaactttctaaaatgttgactcaaatttgtttgaaaccatgcaggcaaaacgaagtaggtctatgagccacatttggtctgtaagccactagtttgcatccttctgggttatacaatttcccttcttcacattaagtcacaggagaatagagggggagtattttttttgcacggaatcctttgggttct

SEQ ID NO: 77278 - DNA, 674 bp, Homo sapiens
caacctctgcctcctgggttcgagtgattctcctgcctcatcctcccgagtagctgggattacaggtgcgcaccaccaggcccagctaattttgtatttttaatagagatggggtttcaccatgttggccaggctggtcttgaactcccgacctcaggtgatccacccaccttgacctcccaatatttatttttgagatggagtctcactctgccacccaggctagagtgcagaggcgtgatctcggctcactgcaagctccacttcccaggttcaaaggattctcctgcctcagcctcccgagtagctgggattacaggcaccctcctccattcccggctaatttttgtatttttagtagaggcgaggtttcaccctgttgggcaggctggtctctaactcctgacctcaagtgatccacctgcctcagcctcccaaagtgctgggattacaggcatgagctacygcacctggccatatgtgcccaactttctaaaatgttgactcaaatttgtttgaaaccatgcaggcaaaacgaagtaggtctatgagccacatttggtctgtaagccactagtttgcatccttctgggttatacaatttcccttcttcacattaagtcacaggagaatagagggggagtattttttttgcacggaatcctttgggttct

SEQ ID NO: 77279 - DNA, 1282 bp, Homo sapiens
tgcatcttaagagcatttttgcagagaacatgctgttttgttgacctataaatcagaagcttaagaaaaaaacaaaacctttatttgtcccagatgtgtactagaaacccaatgtcctaatctgaggaaccaactcggtgcctgggaaggtaatgtctcatttagacttcttctgcaggggatggtgatagactgtcttcacacttcacatccgtgaaatattttgcaggttatgaaattgatttgaaaaatagttttaaaaatcccaaaccattggtgattyagccccaaattaatatcttttcaaaagatgtggattaaaggtgaataaaggtaagctggggggttatgagatataataaaaatgtggggttacgagaatggtgatatcaaaaggattagtcatggattttgaaacacaagataatgggtaggaaatggtggtcatctgttgtgtttggcagccctacatcaatctcctttccatagcatcctgatttcatttaaggggattagctttctcccacatgtgtcttcttaatggcagagagagtacatccctgcctctaaggaaatggaaaagaatccatgctcttttgccgtgggggatgggcacatgatctgggctcaaccaattggattcaccatctcaggaacttgagtcttgagcaagtgctgaaaggatggaagaaacaggccatttgtatcagggatggggcagtgtttgaccagtccattctgctgtgtggctgtagctgtgttcttactgcctggtcctccagtgccattagttccagctggttttagttgcttaatgcctgttactccagcctcctgttgattttctgagcccttatgtttctccaacaaattcctttggcttaagacagctagagttggtgactaatatacagatgataaattcccataaaggaggctgttaaagtggtaagaaaataaaaactttgtccttcaatgactcagaaataatccctttggatttgttcatgcctcagccctgcattctgacctcagatctctgcccaataagcaatctctggctgcctgagataatgatcctatagtggccaccattaaggtggtaacttcaactcacctaagatatgaaatataagataggaagaactgaagatagagatgataaaatataaccaacacatagtattgatacttgtgtgtcaagtgtaatgatatttaataaatgcttgctagtaaaagctcgtgtcatgtcacagagaatttgttacattggagaaactga

SEQ ID NO: 77280 - DNA, 1282 bp, Homo sapiens
tgcatcttaagagcatttttgcagagaacatgctgttttgttgacctataaatcagaagcttaagaaaaaaacaaaacctttatttgtcccagatgtgtactagaaacccaatgtcctaatctgaggaaccaactcggtgcctgggaaggtaatgtctcatttagacttcttctgcaggggatggtgatagactgtcttcacacttcacatccgtgaaatattttgcaggttatgaaattgatttgaaaaatagttttaaaaatcccaaaccattggtgatttagccccaaattaatatcttttcaaaagatgtggattaaaggtgaataaaggtaagctggggggttatgagatataataaaaatgtgrggttacgagaatggtgatatcaaaaggattagtcatggattttgaaacacaagataatgggtaggaaatggtggtcatctgttgtgtttggcagccctacatcaatctcctttccatagcatcctgatttcatttaaggggattagctttctcccacatgtgtcttcttaatggcagagagagtacatccctgcctctaaggaaatggaaaagaatccatgctcttttgccgtgggggatgggcacatgatctgggctcaaccaattggattcaccatctcaggaacttgagtcttgagcaagtgctgaaaggatggaagaaacaggccatttgtatcagggatggggcagtgtttgaccagtccattctgctgtgtggctgtagctgtgttcttactgcctggtcctccagtgccattagttccagctggttttagttgcttaatgcctgttactccagcctcctgttgattttctgagcccttatgtttctccaacaaattcctttggcttaagacagctagagttggtgactaatatacagatgataaattcccataaaggaggctgttaaagtggtaagaaaataaaaactttgtccttcaatgactcagaaataatccctttggatttgttcatgcctcagccctgcattctgacctcagatctctgcccaataagcaatctctggctgcctgagataatgatcctatagtggccaccattaaggtggtaacttcaactcacctaagatatgaaatataagataggaagaactgaagatagagatgataaaatataaccaacacatagtattgatacttgtgtgtcaagtgtaatgatatttaataaatgcttgctagtaaaagctcgtgtcatgtcacagagaatttgttacattggagaaactga

SEQ ID NO: 77281 - DNA, 1239 bp, Homo sapiens
tcacagggaactctctttggggacagagcagcagtagtattttcagaaaaatcaagtttttcaggcagcagtggcatgacgagtgacagcatgtcatagagagggacagcagtgtggagggtacaagtgccagcatctagtgctcagcagtgttgcccatgtgaactcacagggccccctctgaagtgtgatttggggtattgttcttgcctgagtagtcctgaacgttgttttccagccctcatgataagttggagagttgccaaataactttttttcttttttcatttttttttagtagtagaggcggggtttcaccgtgttagtcaggatggtctcaatctcctgacctcgtgatccgccctcctcggcctcccaaagtgttgggattacaggcgtgagccaccatgcccggccgccaaataactttttaataaactatttctttgctccaattagctagagttggattatgttgcttgcaatcaagaactctgaatggtatgaaaatcagcgctaggaatgggaggcttgtttcccatggtctggacacttacaaagagaaactaacaagttccaattcctgatcttcagtccatgctttaagccagtaatttagaaccgaaaaaaataaaaaaaataaaaacaaaaagaataaaccaacaaaccaaatcaatgaacaaacaaaagccctcaaaatttgacaccaaagggtttttgaattataacatgagttgaagtcrcagttttgccaggtttcttgtatgagaattcaggcattgtttgggaaagactggaaccctgaaatctggaatgaaggaatgttggagcacactgtaaaaaagtgaatatgttcccccatatttagagtacactccacagcaaaaccccactggcactctcttgtcagtggaagcaggctgtctttacagtcttatgaggctatggttattttgcttgaaactttaaaatgaccttatctaagctaattacctggaaagggttgaccaattctcctcaaaccccatcttccctccttctcattatttttacacttcaaaccagggtcagaacccagcgtgaccgggaatccaattacaaagtcaaacccagaaggaaaagacttcataactaaacaattgcaaaaggttaccagtttatatcagcaaatattttgaatacttgtggaaatagatgtggaggtactaaaccaaagagtaaagaatataactttagatc

SEQ ID NO: 77282 - DNA, 1239 bp, Homo sapiens
tcacagggaactctctttggggacagagcagcagtagtattttcagaaaaatcaagtttttcaggcagcagtggcatgacgagtgacagcatgtcatagagagggacagcagtgtggagggtacaagtgccagcatctagtgctcagcagtgttgcccatgtgaactcacagggccccctctgaagtgtgatttggggtattgttcttgcctgagtagtcctgaacgttgttttccagccctcatgataagttggagagttgccaaataactttttttcttttttcatttttttttagtagtagaggcggggtttcaccgtgttagtcaggatggtctcaatctcctgacctcgtgatccgccctcctcggcctcccaaagtgttgggattacaggcgtgagccaccatgcccggccgccaaataactttttaataaactatttctttgctccaattagctagagttggattatgttgcttgcaatcaagaactctgaatggtatgaaaatcagcgctaggaatgggaggcttgtttcccatggtctggacacttacaaagagaaactaacaagttccaattcctgatcttcagtccatgctttaagccagtaatttagaaccgaaaaaaataaaaaaaataaaaacaaaaagaataaaccaacaaaccaaatcaatgaacaaacaaaagccctcaaaatttgacaccaaagggtttttgaattataacatgagttgaagtcacagttttgccaggtttcttgtatgagaattcaggcattgtttgggaaagactggaaccctgaaatctggaatgaaggaatgttggagcacactgtaaaaaagtgaatatgttcccccatatttagagtacactccacagcaaaaccccactgrcactctcttgtcagtggaagcaggctgtctttacagtcttatgaggctatggttattttgcttgaaactttaaaatgaccttatctaagctaattacctggaaagggttgaccaattctcctcaaaccccatcttccctccttctcattatttttacacttcaaaccagggtcagaacccagcgtgaccgggaatccaattacaaagtcaaacccagaaggaaaagacttcataactaaacaattgcaaaaggttaccagtttatatcagcaaatattttgaatacttgtggaaatagatgtggaggtactaaaccaaagagtaaagaatataactttagatc

SEQ ID NO: 77283 - DNA, 737 bp, Homo sapiens
aatataaatactgttatcacagcaccagcaagccataatctttatacctatcagttctatttctattaacagtaaaaacattaagcaagatataagactacctgcccaagaattcagtcttttttcatttttgtttttctcagttctgaggatgttaatcgtcaaattttctttggactgcattcctcactactttttgcacaatggtctcacgttctcacatttgttctcgcgaataaattgataaaaggtgttaagttctgtgaatgtctttttaattatgggcataattgtgcttgactggataaaaacttaagtccacccttatgtttataataatttcttgagaacagcaaactgcatttaccatcgtaaaacaacatctgacttacgggagctgcagggaagtggtgagacagttcgaacggctcctcagaaatccagtgacccaattctaaagaccatagcacytgcaagtgacacaacaagcagatttattatacatttattagccttagcaggcaataaaccaagaatcactttgaagacacagcaaaaagtgatacactccgcagatctgaaatagatgtgttctcagacaacaaagtcccttcagaatcttcatgttgcataaatgttatgaatattaataaaaagttgattgagaaaaagtctcacgataacaagaaatctgagtcattattctcatgaggtcagatatttaaatattatcctgt

SEQ ID NO: 77284 - DNA, 1061 bp, Homo sapiens
atgtgaggctccccacaagctcatataattagaccagaaaataaaaggttaaaatcargttcatttcagacaagaggcaacgtaaaagaatagtacagtgagaaatacaacgtaccagtgacagaagccatgaaccagccttaaaaatgcgtgcggcattcaagttcaaatataatccacattaaaaagtcaactgaatttaaacaatctcatggagaaaatttatgtcctctaaatttagccgtttctaaatgttaagaaaacaaaaccataagaagctaaagtagagttctggtcagtaaattaattaatttacacagacatcccaggaattaatattgcatagagataggagaaaacactaattcagttgtattaaaacaatcaaatcagaaatacagtgtaaacattttgctctagtagtttcattggccgaacacatctttaccttaatagagtgttcaaaatagtgaaaatctactttgaaagagcacaggtaaggctgtaagcaaacttaaaaacaaaaggttggcccaacatatttcttataagaagggcagagtgaattcagcatccgctgcaacaggaattcagcatcttgtaggtgacacattacataatgaaaatagtgttttttacattttaatattatcattcataaaaccaaaaccttgctgatgaatttaaataggaactgcatctgtgaatagaaactgctttatttcttcctttctgattgctatgcacattttattttcccccttattgcactggatgacacttcctgttcaaggcagggaaggagcagtgagagcattgagagttctttgaacaaacttgtaaggcagacttcttcagtttattgtggtataggacatcataaaaaccttaagtgttcaacttaatgtacctatgttcaaatcaatgtatctattatattaatgtgtctatgttcaaattaatctatagaaagcacaagtttttttctgtatttgtatttttaaagccactttagcttcatagcaaaattaagaggaaagtacagagagctcccatacacc

SEQ ID NO: 77285 - DNA, 1061 bp, Homo sapiens
atgtgaggctccccacaagctcatataattagaccagaaaataaaaggttaaaatcaagttcatttcagacaagaggcaacgtaaaagaatagtacagtgagaaatacaacgtaccagtgacagaagccatgaaccagccttaaaaatgcgtgcggcattcaagttcaaatataatccacattaaaaagtcaactgaatttaaacaatctcatggagaaaatttatgtcctctaaatttagccgtttytaaatgttaagaaaacaaaaccataagaagctaaagtagagttctggtcagtaaattaattaatttacacagacatcccaggaattaatattgcatagagataggagaaaacactaattcagttgtattaaaacaatcaaatcagaaatacagtgtaaacattttgctctagtagtttcattggccgaacacatctttaccttaatagagtgttcaaaatagtgaaaatctactttgaaagagcacaggtaaggctgtaagcaaacttaaaaacaaaaggttggcccaacatatttcttataagaagggcagagtgaattcagcatccgctgcaacaggaattcagcatcttgtaggtgacacattacataatgaaaatagtgttttttacattttaatattatcattcataaaaccaaaaccttgctgatgaatttaaataggaactgcatctgtgaatagaaactgctttatttcttcctttctgattgctatgcacattttattttcccccttattgcactggatgacacttcctgttcaaggcagggaaggagcagtgagagcattgagagttctttgaacaaacttgtaaggcagacttcttcagtttattgtggtataggacatcataaaaaccttaagtgttcaacttaatgtacctatgttcaaatcaatgtatctattatattaatgtgtctatgttcaaattaatctatagaaagcacaagtttttttctgtatttgtatttttaaagccactttagcttcatagcaaaattaagaggaaagtacagagagctcccatacacc

SEQ ID NO: 77286 - DNA, 1061 bp, Homo sapiens
atgtgaggctccccacaagctcatataattagaccagaaaataaaaggttaaaatcaagttcatttcagacaagaggcaacgtaaaagaatagtacagtgagaaatacaacgtaccagtgacagaagccatgaaccagccttaaaaatgcgtgcggcattcaagttcaaatataatccacattaaaaagtcaactgaatttaaacaatctcatggagaaaatttatgtcctctaaatttagccgtttctaaatgttaagaaaacaaaaccataagaagctaaagtagagttctggtcagtaaattaattaatttacacagacatcccaggaattaatattgcatagagataggagaaaacactaattcagttgtattaaaacaatcaaatcagaaatacagtgtaaacattttgctctagtagtttcattggccgaacacatctttaccttaatagagtgttcaaaatagtgaaaatctactttgaaagagcacaggtaaggctgtaagcaaacttaaaaacaaaaggttggcccaacatatttcttataagaagggcagagtgaattcagcatccgctgcaacaggaattcagcatcttgtaggtgacacattacataatgaaaatagtgttttttacattttaatattatcattcataaaaccaaaaccttgctgatgaatttaaataggaactgcatctgtgaatagaaactgctttatttcttcctttctgattgctatgcacattttattttcccccwtattgcactggatgacacttcctgttcaaggcagggaaggagcagtgagagcattgagagttctttgaacaaacttgtaaggcagacttcttcagtttattgtggtataggacatcataaaaaccttaagtgttcaacttaatgtacctatgttcaaatcaatgtatctattatattaatgtgtctatgttcaaattaatctatagaaagcacaagtttttttctgtatttgtatttttaaagccactttagcttcatagcaaaattaagaggaaagtacagagagctcccatacacc

SEQ ID NO: 77287 - DNA, 577 bp, Homo sapiens
cttttgcagaaatatagacctgaatctgttgaaaaggccaagccagaactggaatgatcaattcaaaacatattacagtaaagccatgagtcttaaaaaaaaaatcctggccgggcgctgtggctcacgcctacaatcccagtactttsggaggctgaggcaggcagatcacgaggtcagaagatcaggatcatcctggccaacatggtgaaaccccgtgtccactaaaaatacaaaaattagctgggcgtggtggcacgtgcctgtgatcccagctactcgggaggctgaggcaggagaatcgctgaaccagggagtaggaggttgcagtgagcacagatcgcgccactgcactccagcctggcgacagagcgagactccgtctcaaaaaaaaaatgataaaataaaaaatatccctaaggagtctccaaaaagatcaaataatgttgaagggaagaagaattagactggcatcagatgcttcaaaaataacatactaagttccatttctgtttatgcctaacaaaccaatatacaaatataggtgaactataagctatacgtcctggaaatacag

SEQ ID NO: 77288 - DNA, 577 bp, Homo sapiens
cttttgcagaaatatagacctgaatctgttgaaaaggccaagccagaactggaatgatcaattcaaaacatattacagtaaagccatgagtcttaaaaaaaaaatcctggccgggcgctgtggctcacgcctacaatcccagtactttgggaggctgaggcaggcagatcacgaggtcagaagatcrggatcatcctggccaacatggtgaaaccccgtgtccactaaaaatacaaaaattagctgggcgtggtggcacgtgcctgtgatcccagctactcgggaggctgaggcaggagaatcgctgaaccagggagtaggaggttgcagtgagcacagatcgcgccactgcactccagcctggcgacagagcgagactccgtctcaaaaaaaaaatgataaaataaaaaatatccctaaggagtctccaaaaagatcaaataatgttgaagggaagaagaattagactggcatcagatgcttcaaaaataacatactaagttccatttctgtttatgcctaacaaaccaatatacaaatataggtgaactataagctatacgtcctggaaatacag

SEQ ID NO: 77289 - DNA, 577 bp, Homo sapiens
cttttgcagaaatatagacctgaatctgttgaaaaggccaagccagaactggaatgatcaattcaaaacatattacagtaaagccatgagtcttaaaaaaaaaatcctggccgggcgctgtggctcacgcctacaatcccagtactttgggaggctgaggcaggcagatcacgaggtcagaagatcaggatcatcctggccaacatggtgaaaccccgtgtccactaaaaatacaaaaattagctgggcgtggtggcacgtgcctgtgatcccagctactcgggaggctgaggcaggagaatcgctgaaccagggagtaggaggttgcagtgagcacagatcgcgccactgcactccagcctggcgacagagcgagactccgtctcaaaaaaaaaatgataaaataaaaaatatccctaaggagtctccaaaaagatcaaataatgttgaagggaagaagaattasactggcatcagatgcttcaaaaataacatactaagttccatttctgtttatgcctaacaaaccaatatacaaatataggtgaactataagctatacgtcctggaaatacag

SEQ ID NO: 77290 - DNA, 567 bp, Homo sapiens
ggaggtgctgggcaaggccgtccacagtgcacgcggtgtggtgaccgtgtgtggttggcaaggctgtcagcagtacacacagtgcagcaaccaccgtgtgtggtcagcaaggccatccacagtccacacagtgcaataaccgtgtgtggcgagcaaggctattgacactgtacgccgtgcagcgaccgtgtgtggtcagcaaggccatggagagtgcacacagtacagtgaccacctgtggtcggcatggccatyaacagggcacacagcacggtgaccatgtgtgatcagcaaggccgtggatagtgcccgtggtgtggtatccatgtgtgatcggcaaggccatggatagtgcatgtggtgcggtgaccctgtgtgattggcaaggccatggatagtgaacgtggtgcggtgaccgtgtgtgatcggcaaggccatggatagtgcacgtgttgcggtgaccatgtgtgattggcatgaccatcgacagtgcttatggtgtggtgaccgtgtgtgatccgcaaggccatggatagtgagtgcacacggtgcggtgaccatgtgtga

SEQ ID NO: 77291 - DNA, 702 bp, Homo sapiens
cacagcaaattcctggtcaccctttgttgttggctggttgggtttgtygctttccttgttgtttacaagctccaggtatttgtgacagatcttatcatctccttccctcttagtcacctcttggcccaactctgcatattttactctttttaactctgctcctgttctgacctccccactctcggaagcatatttgcttggtgttttcagattttatttcattttggctatttaaagagatgcaataaactaaatatggcctggcaagtctggtcttaaaatagaaaatatatatatatgtatatttgtgtgtgcatgtgtgtctgtgtacataggcgcatgtgtgtgcccttgagtgtgcatccgtgtgtgtgtgtgtggccggtgtactataaacccagggcatcagtctcctgacgtcattgcttgcactttttgccattctcccccaaacactagttttcagcctgtattttctcagtttccccaaaaatgattttttaagaaaagtcaaatcagaaagtgatcagcctctaccgccggactctgctttagtatccatccatgtctctgaggtcttggggctcataggaatgtgcttattttcatagtcccattaacatgaatagtttcagaagggccagctcagttttgtcttcagttttctcactggtgattgtgcaggggtggaatggcaatgga

SEQ ID NO: 77292 - DNA, 702 bp, Homo sapiens
cacagcaaattcctggtcaccctttgttgttggctggttgggtttgttgctttccttgttgtttacaagctccaggtatttgtgacagatcttatcatctccttccctcttagtcacctcttggcccaactctgcatattttactctttttaactctgctcctgttctgacctccccactctcggaagcatatttgcttggtgttttcagattttatttcattttggctatttaaagagatgcaataaactaaatatggcctggcaagtctggtcttaaaatagaaaatatatatatatgtatatttgtgtgtgcatgtgtgtctgtgtacataggcgcatgtgtgtgcccttgagtgtgcatccgtgtgtgtgtgtgtggccggtgtactataaacccagggcatcagtctcctgacgtcattgcttgcactttttgccattctcccccaaacactagttttcagcctgtattttctcagtttccccaaaaatgattttttaagaaaagtcaaatcagaaagtgatcagcctctaccgccggactctgcttyagtatccatccatgtctctgaggtcttggggctcataggaatgtgcttattttcatagtcccattaacatgaatagtttcagaagggccagctcagttttgtcttcagttttctcactggtgattgtgcaggggtggaatggcaatgga

SEQ ID NO: 77293 - DNA, 674 bp, Homo sapiens
catctcaaaacctgtttctttatctgtaaaatgaaagggctgaattatatcatgcttttaaattcttaagagatccttagggtagaaaagatgtgtgagtcaagatctgggcctcatcactacttcaacccgagaatgtgtgcttgagtcaagaaaaataattaaacttggaaagaaataaaggcaaaaatgataaaagaaaacaaaaacaaaaacaaaaagtaaaaagctctaaactacacactccctagaactccatcctgaggctggcagctgcttgctggatgtgccagtaagtaacaagtgtctctgcaaggctcagctaatccacataaaatcagaatgtccaggtcttattcttaagtatcacaagaagtccatgtggagaaaaaaagagtaagacaagaagayggcctaaatgaaaagttttatttttaaatcttgaatgagaaaataagcagttaactagtaatttttcttttattttggaaaaatacaaagactttaaaaaatattacacatatattcaatattcgcttctgtattagactatttagaatgttcaatatatttcataatatatttacaaaaattttgagtgaccccctttttcactatataatgtatggtgtttgatgatcagtgcttttatttctaagccccaggcaggaaaa

SEQ ID NO: 77294 - DNA, 542 bp, Homo sapiens
tcattccattttatattattttcttcctcatgagaaaatcagtgtttattatcacaggtgacaaaacacaggagaaaaacaaacagtgaggttacatttaatcactttaagtgggtttcatctttgcttttttgttttcattcccaagccagaagccgtaaaccgagcgagagtgcaaattgcctttctcaggtgcacgttgctgagataggctgggagaacaggtgtggagcccgtgaaaagataaacattaagtcattcttggggaaacggtatttagctagacagctgaagacggacttttgaaataccattgtgctactgctgttcaaatattgactaagtgaacctggaaaggaagaaattttggkcgcctaacatagaactcgttgtctttttctgtctttaaatgttatctcaaagacccaagagaaggggtagtttacctaagaaagaaatatgagctttgcttatggagtttcaggtatacctaatgtaagttaattaagcaaatacaatgtagcagccttgcatttggccta

SEQ ID NO: 77295 - DNA, 542 bp, Homo sapiens
tcattccattttatattattttcttcctcatgagaaaatcagtgtttattatcacaggtgacaaaacacaggagaaaaacaaacagtgaggttacatttaatcactttaagtgggtttcatctttgcttttttgttttcattcccaagccagaagccgtaaaccgagcgagagtgcaaattgcctttctcaggtgcacgttgctgagataggctgggagaacaggtgtggagcccgtgaaaagataaacattaagtcattcttggggaaacggtatttagctagacagctgaagacggacttttgaaataccattgtgctactgctgttcaaatattgactaagtgaacctggaaaggaagaaattttggtcgcctaacatagaactcgttgtctttttctgtctttaaatgytatctcaaagacccaagagaaggggtagtttacctaagaaagaaatatgagctttgcttatggagtttcaggtatacctaatgtaagttaattaagcaaatacaatgtagcagccttgcatttggccta

SEQ ID NO: 77296 - DNA, 1135 bp, Homo sapiens
acatggtggttcttagcatgaaagataagcctgaatattgtcttctttggttcttctcttgtcatcataggttcctgtttgccaagattttttgtttgtttgtatgttcattgtttatgtttttagatgtaaagacaaaaaatgctaagtatcacttagcttgcagacaaaatattagtttataatcagtgtattmgatttgtgaacacacttgtctaatcataccacttatttagcaaatattaaaactatgtatttgcaagggaatttaagttgcatataaggtaatgcaacatttcagatacttataagtaattcaaataacataacttgaatccaatgtgaatttttcaatttatatgaaatttcacaataataaatgaaaataaaacatataagaatctatcacaattatttgtagaatagatacatatggacaattttattttaaaatgtgtatttttttctataaatcaaatgatacaaacatgggatgtgaggataattttatctctgtataaccaaatatgagattgttataaatattattgaacaaaagattcttcttgaataatagaactctgcaagtttgttcatgataggattcaccataaattatttggaaatttcctgtgatagctgtaatttttggtaagataatggaagaataaataatgagtcaaaaactgcttcatattatcctatatttgaaacacaggatttttaagttgttaaacaaaaatggttataaaactaaatttatttgataaataaaatttatctatctttgaggtattcttctatccgattttttaaatgagatgttttatgaatagaatactcatagattagaagaaatgcaaagaatagtcagtattactaaaaataaatataaaaccacaaaaaggttttatttgactctggtgtatgatcagtgtatctctatgtggttggtatactgaaccaaatgatcttagtaaggaggctgctaatgggtcataaattgcccagctttaaaagattcatacattatttctagtgtattctagcaggttattttcattgttttaactattaaatgaattctgtgacaagaaaaagaggagaattaggtgcaaattaattaacatttttt

SEQ ID NO: 77297 - DNA, 1135 bp, Homo sapiens
acatggtggttcttagcatgaaagataagcctgaatattgtcttctttggttcttctcttgtcatcataggttcctgtttgccaagattttttgtttgtttgtatgttcattgtttatgtttttagatgtaaagacaaaaaatgctaagtatcacttagcttgcagacaaaatattagtttataatcagtgtattagatttgtgaacacacttgtctaatcataccacttatttagcaaatattaaaactatgtatttgcaagggaatttaagttgcatataaggtaatgcaacatttcagatacttataagtaattcaaataacataacttgaatccaatgtgaatttttcaatttatatgaaatttcacaataataaatgaaaataaaacatataagaatctatcacaattattygtagaatagatacatatggacaattttattttaaaatgtgtatttttttctataaatcaaatgatacaaacatgggatgtgaggataattttatctctgtataaccaaatatgagattgttataaatattattgaacaaaagattcttcttgaataatagaactctgcaagtttgttcatgataggattcaccataaattatttggaaatttcctgtgatagctgtaatttttggtaagataatggaagaataaataatgagtcaaaaactgcttcatattatcctatatttgaaacacaggatttttaagttgttaaacaaaaatggttataaaactaaatttatttgataaataaaatttatctatctttgaggtattcttctatccgattttttaaatgagatgttttatgaatagaatactcatagattagaagaaatgcaaagaatagtcagtattactaaaaataaatataaaaccacaaaaaggttttatttgactctggtgtatgatcagtgtatctctatgtggttggtatactgaaccaaatgatcttagtaaggaggctgctaatgggtcataaattgcccagctttaaaagattcatacattatttctagtgtattctagcaggttattttcattgttttaactattaaatgaattctgtgacaagaaaaagaggagaattaggtgcaaattaattaacatttttt

SEQ ID NO: 77298 - DNA, 1081 bp, Homo sapiens
tcattctcgaattccaaaaacaacagaaattaatccacgtggtacaaatcacaccatggttgcctccttggttacaggtaggtgatattgactagagaggagtacaagagaccttttagatgatgaaaatgttatatatcttttattgggtgggtggtggttacatgggtttatacaacttcaaagctcatcacgttgaaaacttaagacctgggcattttattatataaaaagtatgactcagttaaaaatcaaatagcagagtaaacttcttccatgtttttattttagtgctacaccagagcccagagcatgatttaacaactctagaagacaggtaaaagtaattatttccctggatccttagctgcaaggggtgactttattaaaacatataaagtacaaaagatttsgtgctatggacttgcccagatgaacatcatccacttcacaagtttggaatgttacatgattactttggagattctgcttgtgattttttcactcagaagacaaacctagtgttcaagtaccactttactcagttaatgcgtaccttataacttgcttgattttgctattcagtattctattaagttttaaagtatgcccaaaataaagagctacaaaggcttgttcactatgtatatatatgctcccttcactcagcattttaattagaaaaggaagaaaaaaagggcttagcttaattctggaagggtccacagagacattaaataatttgtgcaatttttctggtgctggcacattattttccaggcaggcaaaagcatcagtacagccagaaacagctcccaaatgtgaccggcgaggcatgttagatcttaaataacaatcgtgccctgctgttggaaagcctcccaaatgtgaccagcagggaacattagatcttaaataacaaccatgcctctccatttagagaataaatcagtgttcaaaagaaacctgtccatgcaagtatactgtgattaaaattaagtgaaattaagtggagtgtgattggatgaatttttttggcagtttatacaaaatagcaattgttggtgcaaccaggctaaat

SEQ ID NO: 77299 - DNA, 1081 bp, Homo sapiens
tcattctcgaattccaaaaacaacagaaattaatccacgtggtacaaatcacaccatggttgcctccttggttacaggtaggtgatattgactagagaggagtacaagagaccttttagatgatgaaaatgttatatatcttttattgggtgggtggtggttacatgggtttatacaacttcaaagctcatcacgttgaaaacttaagacctgggcattttattatataaaaagtatgactcagttaaaaatcaaatagcagagtaaacttcttccatgtttttattttagtgctacaccagagcccagagcatgatttaacaactctagaagacaggtaaaagtaattatttccctggatccttagctgcaaggggtgactttattaaaacatataaagtacaaaagatttcgtgctatggacttgcccagatgaacatcatccacttcacaagtttggaatgttacatgattactttggagattctgcttgtgattttttcactcagaagacaaacctagtgttcaagtaccactttactcagttaatgcgtaccttataacttgcttgattttgctattcagtattctattaagttttaaagtatgcccaaaataaagagctacaaaggcttgttcactatgtatatatatgctcccttcactcagcattttaattagaaaaggaagaaaaaaagggcttagcttaattctggaagggtccacagagacattaaataatttgtgcaatttttctggtgctggcacattattttccaggcaggcaaaagcatcagtacagccagaaacagctcccaaatgtgaccggcgaggcatgttagatcttaaataacaatcgtgycctgctgttggaaagcctcccaaatgtgaccagcagggaacattagatcttaaataacaaccatgcctctccatttagagaataaatcagtgttcaaaagaaacctgtccatgcaagtatactgtgattaaaattaagtgaaattaagtggagtgtgattggatgaatttttttggcagtttatacaaaatagcaattgttggtgcaaccaggctaaat

SEQ ID NO: 77300 - DNA, 2473 bp, Homo sapiens
tgcatatttttctatatgctgtctactatactaatagctatcatactgagatggggtatctctactgttacccaaagtcattggagattctaggttatagctcacacaagggaataatgattcctatctctcaaagaaatgaacccaaaagattatcatctagccaccacttctctttagaaaaatgtaaatacagagaagtgatatgcacatataaaattatatgaaagtctgaaagtgtagagcaatacctgtagaaaattcaaggttaggaagaataaagttctcacaaaatcaaatttttattgctgtatgtaaggaaagacagctcaaaactgaaggccatttagacatgtgtatccatgtatttatgtgtatacacattagacatatgtgtatttccactcttcactttattatcctttcttcatgttcacacttgtatttacacatacacacacactcctcctcttcagaaggttccatctgaaaacgtatatcccttcttcttgacaaatcactccctattcacaggagaaactgttgcttcatgattgctttaaaattgtcattctcacctaacatcatatgcctctgtcaggaggacaagggtgtgtttgcttttgcagagaagtgaaggcttaaggtgggtcatgaaatttagccaatggagatgaaccaaattctaatccaacgctttcttattcaagagcagatcagcaggctttcttacttagtagtctattaacttagcacctctgtctaataccttactttctctctgcagcaaaatggcatattggagaaagaatattctctctgttagggaggatttggtcttgtcctctaagcacaatgatgtactattgttgtgctgaggaatattggtcattgttccgctctgcctgaggcctgtgtcacaaagaaactgtaacaatggctgttcttttagtttactaaggaaagagtagagactcactcagatttcaggttttgttttttttttctttttgagtgggagcttcgtaggagcttgcaactgtcgtaatggaagaaacacacaggaaaagaagaatcagaattatttaaatcctttctgaaattactcactctgaaatctataatcagtgtatgcaaagccttagactaagttatttccctgtcaaatcaatcataaaggaaagaaatagttcccaattctatattttatccagaagtactgaaacaaaaacacaatattaataatattttgccacatttatattttctgtgtctatgaggatttacaattacctaaaacatttatcaaaaatgaaacaaatgcatacccttttaaaactactttttttctttcaacgtagcatagatcatttttattcatctctttcttactctctacttattgtttcttcctcatactttgtgtgatttttcaggctagcatgtttgaaatataayggaaccagctaataacatgtttcaattttcaaaaataaaactatatcaatataaatttatatgattatacacagccatattaaaaatatatgttactgttatttcatactgctttatatagaaggatactcatattcaattacttatagaaaataatacaatattctttttcaagagtaaactcagaatctagggcatgtttctcagtggagctgtgctttccacaaaggcacattgtataaaggcatggaggtattttcacttgtcataattattgtggagatgttctaggcatgagcttttaatgctaaatgtttaaaggtcataagttggtagaacattattaagacttttatgttctcaaatttttaatgacccacagcgagtcatgaggtcggattttttttaaatatctaattttagaatcagattgcatttttacaataaaacataactcatttttgcattgttttaatatatgctgattttttccaagaatacagtattgggtaaatgcagacaaggcctgctttctttctaactttagcattcaaaaattatacacatgcacatgcacacgtgcacacacataaacttggcccttatatcaaaatgtcaaatatagaaaaatagtctaacttgttgaaagttttcttacttttaataagcataatttaaacacattctgtctacttaattttgtatactaagttatataaataactattactatatacatggggagattttctttttcttttattcttactccctcttttcctgactctctgccctcctgttgtggcaaatcctgtgaaaacttactcattctagaaagctgagacctatacttggtcatagtaatagtgaaatgccaaatcaatattataattttgctaacttcaattgctttttcagttccgtggtaactgccctctttccattatacataaaaagaaaaataccatctttttccactcatgtaaacccttattttcaagatttattaaatacc

SEQ ID NO: 77301 - DNA, 2473 bp, Homo sapiens
tgcatatttttctatatgctgtctactatactaatagctatcatactgagatggggtatctctactgttacccaaagtcattggagattctaggttatagctcacacaagggaataatgattcctatctctcaaagaaatgaacccaaaagattatcatctagccaccacttctctttagaaaaatgtaaatacagagaagtgatatgcacatataaaattatatgaaagtctgaaagtgtagagcaatacctgtagaaaattcaaggttaggaagaataaagttctcacaaaatcaaatttttattgctgtatgtaaggaaagacagctcaaaactgaaggccatttagacatgtgtatccatgtatttatgtgtatacacattagacatatgtgtatttccactcttcactttattatcctttcttcatgttcacacttgtatttacacatacacacacactcctcctcttcagaaggttccatctgaaaacgtatatcccttcttcttgacaaatcactccctattcacaggagaaactgttgcttcatgattgctttaaaattgtcattctcacctaacatcatatgcctctgtcaggaggacaagggtgtgtttgcttttgcagagaagtgaaggcttaaggtgggtcatgaaatttagccaatggagatgaaccaaattctaatccaacgctttcttattcaagagcagatcagcaggctttcttacttagtagtctattaacttagcacctctgtctaataccttactttctctctgcagcaaaatggcatattggagaaagaatattctctctgttagggaggatttggtcttgtcctctaagcacaatgatgtactattgttgtgctgaggaatattggtcattgttccgctctgcctgaggcctgtgtcacaaagaaactgtaacaatggctgttcttttagtttactaaggaaagagtagagactcactcagatttcaggttttgttttttttttctttttgagtgggagcttcgtaggagcttgcaactgtcgtaatggaagaaacacacaggaaaagaagaatcagaattatttaaatcctttctgaaattactcactctgaaatctataatcagtgtatgcaaagccttagactaagttatttccctgtcaaatcaatcataaaggaaagaaatagttcccaattctatattttatccagaagtactgaaacaaaaacacaatattaataatattttgccacatttatattttctgtgtctatgaggatttacaattacctaaaacatttatcaaaaatgaaacaaatgcatacccttttaaaactactttttttctttcaacgtagcatagatcatttttattcatctctttcttactctctacttattgtttcttcctcatactttgtgtgatttttcaggctagcatgtttgaaatataacggaaccagctaataacatgtttcaattttcaaaaataaaactatatcaatataaatttatatgattatacacagccatattaaaaatatatgttactgttatttcatactgctttatatagaaggatactcatattcaattacttatagaaaataatacaatattctttttcaagagtaaactcagaatctagggcatgtttctcartggagctgtgctttccacaaaggcacattgtataaaggcatggaggtattttcacttgtcataattattgtggagatgttctaggcatgagcttttaatgctaaatgtttaaaggtcataagttggtagaacattattaagacttttatgttctcaaatttttaatgacccacagcgagtcatgaggtcggattttttttaaatatctaattttagaatcagattgcatttttacaataaaacataactcatttttgcattgttttaatatatgctgattttttccaagaatacagtattgggtaaatgcagacaaggcctgctttctttctaactttagcattcaaaaattatacacatgcacatgcacacgtgcacacacataaacttggcccttatatcaaaatgtcaaatatagaaaaatagtctaacttgttgaaagttttcttacttttaataagcataatttaaacacattctgtctacttaattttgtatactaagttatataaataactattactatatacatggggagattttctttttcttttattcttactccctcttttcctgactctctgccctcctgttgtggcaaatcctgtgaaaacttactcattctagaaagctgagacctatacttggtcatagtaatagtgaaatgccaaatcaatattataattttgctaacttcaattgctttttcagttccgtggtaactgccctctttccattatacataaaaagaaaaataccatctttttccactcatgtaaacccttattttcaagatttattaaatacc

SEQ ID NO: 77302 - DNA, 669 bp, Homo sapiens
tgccgggagcgccttgcattttgcctaggaccttcttaactctccagactcatcagggaagctctgcaggagctcaggataaacaggtccttggcttgaagcctgccggcatgggttgggaatggtgggggctccatgtctgcagcagccacggcagaagctgtggccacatgagctgggctctgggtgcggctgtggccattgaggagggagcatgtcccgggttcttaggttaagtgcgtcttggcaggggggcccggggctgcagcccttcgtgtacccacgtgtccgrtgtctctgtgccatgccgtgacgttgtccttcacgtaaagttttcaagacccacgtcccattgtctgtgaaatcacaaggttttactttatggactgtgtggaatggacccagggaagggggaccagtatatgcccaatttgccagcatgtgcaacagtgaacttccctggacagctggccttggtgtggcagtgggtgctgtacggctggcctctgtgcagtgggttggggggagctggatggctggcctctgtgcggtgggtgggggggagctggacggctggcctctgtgcggtgggtgggggctgtaccactggcctctgtgcggtgggtcgggggaagctggacggctggcctctgtgcagtgggtgggggg

SEQ ID NO: 77303 - DNA, 767 bp, Homo sapiens
gctggcctctatgtagtcggggaggctggatgactggcctctgtgcagtgggggcaggcgctggatgactggcctctatgcagtgggtcggggggcctggacagctggcctctgtgcggtgggttgggggggcctggacgtctggcttctgtgcggtgcgggggccggcctcgggccggtgggcaggctggaaggtcagccaggccctgtggtgtctttagtgagaaacaggaaataaatcaaggggatgttgtagaagttttaccgctgctggtttagaagtgtttgtttttattatttgtatataatgtgttgttttcagtcttgcactggtgtttttaactatcgtgtaaagatgcaaacagcaggccagaaaactgccttgatatatcacattggcaaagaccaagcgcaccccggaccctagtgggtgagccggacccattggcagtggcctttgtggtgcctccagggagcctcacgatgctcacgcctctgaccmgtggttctgcgctcagggcatgaccggagatgtggtctgggagttggttgtgtggatgtttgcgttgccagcgtttacaacaacagaggggaacagcccacagcccagcagtacaatgaggatggtccttgtgataaatgggatgctgtgattagattgtttctgaataagctaaaatgctcaaaatgtgatctttcttttataaaaaggccaggtatggtgatacgtgcctgtaaccccagcactttgggaggctgaggtggga

SEQ ID NO: 77304 - DNA, 929 bp, Homo sapiens
cattcatccatccatccgtttagctgtccatccatccatcatccatccattcatccacccacccataatccatctctttatycctcattcctcccttgtttgtccatcaccatccatctacctactctccatctacccatcatcccttcaccccccgtccatcatgatccatccatcagtttctttacctgtctatccatcatccattgtccacccacccaccaaccatccatccattaaacaaattgaacacattttatgtgccaggcacagtctttggctctgaaaacagcggtgagcagaatagactaaggcgtccagatgttctgtcttcatggaacttaggtttctgtttgtcaaagagatgacagtgtgggatgaatgagtaaaaacaggctgttagattgtgatacgtatttaggagaaaaaataaactagagaaggatggcccacgtgttgagtttggggtttaaatgaagatggggtggttgaggaaggtggtttttgaatgaagagcggaacccgtgaggacccagtcgcctctctctgggaaggacgttcggatgaagatggggtggttggggaaggtggtttttgaatgaagagcggaacccgtgaggacccggccgcctctccctgggaaggacgttcgggggcttgtgctgctgttaggggaggaggggaggtgggcagtgaggggctcacgggagccttgttggccaggtgggactggggctgtcactccaagtcgcccggagctgtccggcagcgtggtctcagggacgtttgctgaggcccgctccttggggtccgttggtcgaggccgggggttgctggccggccctgagttcatgggtttctgctttgtgatgcccagcccctcatgctcccatctgcttctttttctctctagaacactatggctatgc

SEQ ID NO: 77305 - DNA, 540 bp, Homo sapiens
tcccctttcttctgtggctttcattttttaaaaatcctaggtttatgctgccagtactgattattttcagcaaatatcagtgttgatatttgggggattttattctactaatgtaatcaacttcatggattactaatctttgtcctccataaattgaatacattggaatacagatgcaattcacttatgctccaaaatcacaaaattgaacatagtcatgatttaattaatattttaatagcagtcacaagcaacatttgatctctttttggttctgttataaatgatttctaaactgtgttttctgcaagtaaggtycatgaaacacctgcctcagaattggctatcaaattgatccatatacctttttgggaaataggcaccgtcatatgtacattgctgatggagataaaatattgcacaatccctagtaaggggaatttaacagtatctatcaaactacacataacaacatgcccataaatgtgtacgtgctctccaaagctgtctgtagccatctacccctaggaaaaacatcac

SEQ ID NO: 77306 - DNA, 540 bp, Homo sapiens
tcccctttcttctgtggctttcattttttaaaaatcctaggtttatgctgccagtactgattattttcagcaaatatcagtgttgatatttgggggattttattctactaatgtaatcaacttcatggattactaatctttgtcctccataaattgaatacattggaatacagatgcaattcacttatgctccaaaatcacaaaattgaacatagtcatgatttaattaatattttaatagcagtcacaagcaacatttgatctctttttggttctgttataaatgatttctaaactgtgttttctgcaagtaaggttcatgaaacacctgcctcagaattggctatcaaattgatccayatacctttttgggaaataggcaccgtcatatgtacattgctgatggagataaaatattgcacaatccctagtaaggggaatttaacagtatctatcaaactacacataacaacatgcccataaatgtgtacgtgctctccaaagctgtctgtagccatctacccctaggaaaaacatcac

SEQ ID NO: 77307 - DNA, 2834 bp, Homo sapiens
ttaaatcaccctttaagctgcaatgaattctgtgctatgggcacttttcttatctcaatggacctttatttttatttatttatttatttttagacggagttacagtcttggtgcccaggctggagtgcaatggtgcaatctcggctcactgcaaccttggcctccctggttcaaggaattctcctccctcagcctcccaagtagctgggattacaggcatgtgccaacatgcctggctaattttgtattttaagtagaggtggggtttatccatgttggtcaggctggtctcgaactccagacctcaggtgatccacccatcttggcctcccaaatgctaggattataggcatgagccaccgtgtctggcctctcaatggacctttctatggcttggtgactaccctgtccttgaatacttcttgctaggcttttggaacagtatttccttgttctcttccagtccctctggcttctttttcctaatctcccaacagatgttttactctccccataaatgttggtattcctcagagttctgtattcttttcaaaaagggcagctatcggggaacctaccccgacagtcatgtaggttcttttctgttttccctaagcatcagccagtttgagaaataaagggacagagtacaaaagagagaaattttaaagcttggtgtccaggggagacatcacatgtcggtaggttccgtgatgccccacaagctgcaaaaccagcaagtttttattagggattttcaaaagtggagggagtgtacgaatagggtgtaggtcacaaagattacgtacttcacaaggtaatagaatatcacaaggcaaatggaagcagggcaagatcacaggaccacaggaccggggcaaaattaaaattgctaatgaagtttcgggcaccactgtcattgataacatcttatcaggagacagggttttgagagcaaccagtctgaccaaaatttattaggcaggaatttcctcttcctaataagcctgggagtgctatgggagactggggtttatttcacccctacagcctcgaccatggaagacggccacacccaaggggaccatctatagacccaccctcaggggcttattctctttcccagggatgttccttgctgagaaaaagaattcagtgatatttctcccatttgctttttaaagaagagaaatatggctctgttccacccggctcaccggtggtcagagtttaaggttatctctcttgttccctaaacattgctgttatcctgtttttttcaaggtgcccagatttcatattgttcaaacacacatgctctacaattcatgcagttaacacaattatcacagggtcctgaggcaacatacatcctcctcagctgatgggattaagagattaaagtaaagacaggcataggaaatcacaagggtattgattggggaagtgataagtgtccatgaaatcttcacaatttatgtttagagattgcaataaagacaggcataagaaattataaaagtattaatttggggaactaataaatgtccatgaaattgtcacaatccacgttcttctgccatggcttcagccagtccctccatttggggtccctgactccctgcaataggcagctacccagcaatgttatctatacttatgacatctgctactatgcatgcactgatgaatcacatgtctctccatccaaccaaaacttttattggaatgcctgcatttttttaatgtctattgaaaagtgtatattttgggtaccacaagcaccacaacatattctgtaaaaatataatcatctttacctaaactccatagcaactagatcttcctgttgtcattatcttctaattgaataaaatcatcaggaacccagatatccaagctagaaggataaaatatcttcttttcaacccttcattcactatagcccagagatagaatccatttctttatttcatttccagcactcttgagaaggtttcatcgtatctccttggactrttttaatagctgggaactgtctttcctgccccctatttggtttccctacaaactgtccttcacatttttgccagaaggatagttgtaaaatgcaaatcccacattttcactactctgttaaaacatataactctaaagcagcattgtcaagtagaaatataattctagccacatatgtaattttaaatttttcagtaatcagttaaaaaaagtaaagacaggtgaaattcatgttaataatacagtatattttacttagctcaatatatctaaaacgttatcatttcaacacgcaatcagtaaaaaaaaaaagaggtattttacaattttttttgtagtaagcttttgaaatctggtgtgtattactttacatttatagcacatcttaatttggtttagccacattttaagtactcattgccacatgtggatcgtacctcccatactggtctgcacaggactaatacataaaaggtccaaattcgtttgtctggtttatgagggtccttgattatctgcttccattcctcattttcagcaccatctccaatcaacttctcaacaaactctaagtcctagctctgctgaaatttttcaagatctactaagttcttagcatctatgctttcgccaatattatcctcccctttacttggaagagtgccccatcttctctacttggtgacttgattgttctttacaccactttctctgcaaagtttttccaagtccctactactgaagacccagatgcccactcttcttgtacatgtcccagttcatatatggtgtgaatggaagttttgttttgtccc

SEQ ID NO: 77308 - DNA, 978 bp, Homo sapiens
ctgggagcttaactggccttgtttctttctttcatgttccaaattggcattaayattctctttcttctttgattcatcctctttcctttttttttctaagtttcacatagtgatagatttgttccttaaaagaatatgaaccagaaataaggtagctaagcactagactatcacttgtgaaataattattccaatcaaggcaaaaatgaggattcgctttgatagacaattgtcttcatactctcaagactgaagatgatggaaaattgttataataatcattggctatattagttgcttatttgcagtgtttttccaagtatttggagttacatgtaagtcctcccaaattgtttgtaatagatacagtagtagctatcttatgtacacttactgtatgtcagtcactctgacatataatattttaaatccttaacttgtaaatagtattcatattccctgttctacagtcaaaagaagtgaaagaccttttctgaattcataagaaaaggaagtgcttgagccaggactgggagccattgtgacactaatgcccatgcttattctctgtatcatgttgtcatgttcctgtgtaatgtgagctgactttctgggcaaatgtttctatactactgtgtactataggacacgggtgtcttattgctgaagttattgcgtgtgacttcatggactccctgacattttgatcaaatacagttcagagagcaacactgacattttcaaatccaaaaacctaaatttccttctctctattcttcttcatcctttgcttcaagaatgcaaacctcaaatgaattctcaataccaccggagaatcccgctatgcttcttacaaaaattcactttttgaaagtgaattctctcttcaaacttcttactccccaaattcaatcgcattccccatatcactcccactgatgaaaaattgtaaaaactgaatccttccatctatatgca

SEQ ID NO: 77309 - DNA, 978 bp, Homo sapiens
ctgggagcttaactggccttgtttctttctttcatgttccaaattggcattaacattctctttcttctttgattcatcctctttcctttttttttctaagtttcacatagtgatagatttgttccttaaaagaatatgaaccagaaataaggtagctaagcactagactatcacttgtgaaataattattccaatcaaggcaaaaatgaggattcgctttgatagacaattgtcttcatactctcaagactgaagatgatggaaaattgttataataatcattggctatattagttgcttatttgcagtgtttttccaagtatttggagttacatgtaagtcctcccaaattgtttgtaatagatacagtagtagctatcttatgtacacttactgtatgtcagtcactctgacatataatattttaaatccttaacttgtaaatagtattcatattccctgttctacagtcaaaagaagtgaaagacctttkctgaattcataagaaaaggaagtgcttgagccaggactgggagccattgtgacactaatgcccatgcttattctctgtatcatgttgtcatgttcctgtgtaatgtgagctgactttctgggcaaatgtttctatactactgtgtactataggacacgggtgtcttattgctgaagttattgcgtgtgacttcatggactccctgacattttgatcaaatacagttcagagagcaacactgacattttcaaatccaaaaacctaaatttccttctctctattcttcttcatcctttgcttcaagaatgcaaacctcaaatgaattctcaataccaccggagaatcccgctatgcttcttacaaaaattcactttttgaaagtgaattctctcttcaaacttcttactccccaaattcaatcgcattccccatatcactcccactgatgaaaaattgtaaaaactgaatccttccatctatatgca

SEQ ID NO: 77310 - DNA, 854 bp, Homo sapiens
atcttaagacagttattatttaatccctccaatcttcatatagagtgggctgcacttgccctgagaaactacttaatacataccttttgaataaattactattaatgtgaggacattttcatgtgcagtgtgaccttactgctgaaggagtataacatataatgaagcacagtagaataaagaataaattattaaaaatatgccaaatatacatagaactaagacatttatgtaagaaaatatatatttaaattaattttcacacttttttttccttttttgagacagtgtcacactctgtctcccaggctggagtgtagtggtgagatctcagctcactgtaacttctgcctcctgggctcaagcaaacccccccacctcagcctcccaagtagctgagactacaggtgctcaccactatgcctggctaatttttgtattttttttagagatggggtttctccaggttggccagggtggtctcaaaygcctgggctcaagcaattcacctacctcggcctcccaaagtgctgagttcacaggcatgagccaccacacacaagtgcacacttttttcctaatacagtattttgaatattggagaatttattatctagcttaataatattaatgcaataaatatagagcttaatagttgccaaccaaaaatgcaacagcatgaaaatatttatttattaatgctcatgagtctctctgttacctgttttgctcttcctgtcttgactgaactcatttgtgagtttgtagatgacattgtattggttaagcagttctgctaattttggaagtgctctatcgtgtgtttgatggcctttaggtcagtctatgattcc

SEQ ID NO: 77311 - DNA, 854 bp, Homo sapiens
atcttaagacagttattatttaatccctccaatcttcatatagagtgggctgcacttgccctgagaaactacttaatacataccttttgaataaattactattaatgtgaggacattttcatgtgcagtgtgaccttactgctgaaggagtataacatataatgaagcacagtagaataaagaataaattattaaaaatatgccaaatatacatagaactaagacatttatgtaagaaaatatatatttaaattaattttcacacttttttttccttttttgagacagtgtcacactctgtctcccaggctggagtgtagtggtgagatctcagctcactgtaacttctgcctcctgggctcaagcaaacccccccacctcagcctcccaagtagctgagactacaggtgctcaccactatgcctggctaatttttgtattttttttagagatggggtttctccaggttggccagggtggtctcaaacgcctgggctcaagcaattcacctacctcggcctcccaaagtgctgagttcacaggcatgagccaccacacacaagtgcacacttttttcctaatacagtattttgaatattggagaatttattatctagcttaataatattaatgcaataaatatagagcttaatagttgccaaccaaaaatgcaacagcatgaaaatatttmtttattaatgctcatgagtctctctgttacctgttttgctcttcctgtcttgactgaactcatttgtgagtttgtagatgacattgtattggttaagcagttctgctaattttggaagtgctctatcgtgtgtttgatggcctttaggtcagtctatgattcc

SEQ ID NO: 77312 - DNA, 854 bp, Homo sapiens
atcttaagacagttattatttaatccctccaatcttcatatagagtgggctgcacttgccctgagaaactacttaatacataccttttgaataaattactattaatgtgaggacattttcatgtgcagtgtgaccttactgctgaaggagtataacatataatgaagcacagtagaataaagaataaattattaaaaatatgccaaatatacatagaactaagacatttatgtaagaaaatatatatttaaattaattttcacacttttttttccttttttgagacagtgtcacactctgtctcccaggctggagtgtagtggtgagatctcagctcactgtaacttctgcctcctgggctcaagcaaacccccccacctcagcctcccaagtagctgagactacaggtgctcaccactatgcctggctaatttttgtattttttttagagatggggtttctccaggttggccagggtggtctcaaacgcctgggctcaagcaattcacctacctcggcctcccaaagtgctgagttcacaggcatgagccaccacacacaagtgcacacttttttcctaatacagtattttgaatattggagaatttattatctagcttaataatattaatgcaataaatatagagcttaatagttgccaaccaaaaatgcaacagcatgaaaatatttatttattaatgctcatgagtctctctgttacctgttttgctcttcctgtcttgactgaactcatttgtgagtttgtagatgacattgtattggttaagcagttctgctaattttggaagtgctctatcrtgtgtttgatggcctttaggtcagtctatgattcc

SEQ ID NO: 77313 - DNA, 530 bp, Homo sapiens
ttccagttggtgatttattcccagatggtttatttaactagttcctgttgatggacatttgcgttttacatatctccttttataggcattygagatatggttgttacaggtgtttaagaagtgagattgtgggtggtttctagatttgtgccatagttagtaagtcttcaccattttaaagctgtggaaagattttcttgtggtttcttctagggcttttatttgttacattttaattttttcatatacttggtatttaaccaggcataaggtatgagttatagattcaactgtgattttttttctagatgtttactgtttatctcatctttaggagttaaataagccagtttttattatattgtaaatttccatatatattgaggtctgtttctgaacttctgtcctgctccattgatctgctaacttttcatgcaccaatactgcactgttttaattactaaggcattatactatgctttcatatctgatgggcttaattctccctgttactttttgttcaaagtgtt

SEQ ID NO: 77314 - DNA, 570 bp, Homo sapiens
ttttaacttcttgtgggcaagaaccttgtctcaaaatgcctataattccagtaaccagcacagcacccaacgtggcagctgctcagaactgctcactgatgaatatgcaccattcattccttacatttatattacatttatttatttattatttatttttagatacagggtctcactctgggtccaggctggagtgcagtggtgctatgttagctcactgcagccttgaactcctgggatcaagtgatccttccccctcagcctcccaagtagttaggactaccggtgcatactaccacrtccagctagtttttaaatgtttcatagagatggggcctcactatattgcctaggctggtcttgaactcccggcttcaagtaatcctcttgttttggcctcccaaagtgctggaattacaggtatgaacctctatgactggcttacattttaattttcaactttcaaagaacataatttgattggtacttcgattccataaatggagaactggaactatttacaatagaaaacttgaacatgttcgcttgcctgagagaaaaataaaaaca
